United States Patent Application Publication US 2004/0234960 A1 - sequence listing, part 11

SEQ ID NO: 33722 - DNA, 699 bp, Artificial Sequence
  chemically treated genomic DNA (Homo sapiens) CpG-island No: 33722
  unsure (151)
taaaaatataccgcgataacgaaactatactaacgaacgattatcgcgtcaaataaaaacgaatcaatataatcgtaattccgtcaataaaatactaaaatactcgtcacgtaaatatcgaaacgaatatataaatacgatactacattantatcgtatatcgatataactatatcgtataataataaacgataacatcgtaactaaaaaacgataatacgataaaaaaatcgcaaataaacgtcatataatatataaaaacaaatcgaatactacgactaaaaataaaaaaaaaaaatcgcgaaaacgcaacgacgcgaccatataaatcgctaataacaaaaaccacaacgcgtctcgatatatactataaaacaatcgtattcgataaataaataaaaatcgaaatataacgttataccaaacataatcgtcgtacgtaaaaaatacaaaataattatccacgtatcgaacgatcgcaaaaaattaaaaatacgatacgctaaatcgtaaaaccgaacatcgtatacataaaatcgtatcgcaaatattacaaacgtaatatatctcaacgtcgaaaaatcgaactaaattactcgacttcaaacgcgtctacacgatacgacgtaaatcgaaacgacgtatcgtatacgtaattacgaataaatataccaaaataaacgaatcgcctcgtcgcgt

SEQ ID NO: 33723 - DNA, 699 bp, Artificial Sequence
  chemically treated genomic DNA (Homo sapiens) CpG-island No: 33723
  unsure (151)
tagaggtatgtcgcggtagcggagttgtgttagcggacggttgtcgcgttagatgggaacgagttagtatgatcgtaatttcgttagtggggtattggagtattcgttacgtgagtgtcgagacgagtgtgtgagtacgatgttgtattgntgtcgtgtgtcgatgtgattatgtcgtgtagtagtgggcgatggtatcgtggttgaagagcgatgatacgatggagagatcgtaggtgagcgttatatgatgtgtgaggataggtcgggtgttgcgattgagggtggaggaggagagtcgcgagggcgtagcggcgcggttatgtgagtcgttggtggtaggagttatagcgcgtttcgatgtgtgttgtgagatagtcgtgttcgatgagtgagtaggggtcgagatgtgacgttgtgttaggtatggtcgtcgtgcgtgagagatgtaggatagttgtttacgtgtcgaacggtcgtagagggttgagagtgcgatgcgttaggtcgtgagatcggatatcgtgtgtatggagtcgtatcgtaggtgttgtaggcgtagtgtgttttagcgtcgagaggtcggattaggttgttcgattttaggcgcgtttgtacggtgcggcgtagatcgagacggcgtgtcgtgtacgtgattgcgaataagtgtgttaggatgggcgagtcgtttcgtcgcgt

SEQ ID NO: 33724 - DNA, 699 bp, Artificial Sequence
  chemically treated genomic DNA (Homo sapiens) CpG-island No: 33724
  unsure (549)
acgcgacgaaacgactcgcccatcctaacacacttattcgcaatcacgtacacgacacgccgtctcgatctacgccgcaccgtacaaacgcgcctaaaatcgaacaacctaatccgacctctcgacgctaaaacacactacgcctacaacacctacgatacgactccatacacacgatatccgatctcacgacctaacgcatcgcactctcaaccctctacgaccgttcgacacgtaaacaactatcctacatctctcacgcacgacgaccatacctaacacaacgtcacatctcgacccctactcactcatcgaacacgactatctcacaacacacatcgaaacgcgctataactcctaccaccaacgactcacataaccgcgccgctacgccctcgcgactctcctcctccaccctcaatcgcaacacccgacctatcctcacacatcatataacgctcacctacgatctctccatcgtatcatcgctcttcaaccacgataccatcgcccactactacacgacataatcacatcgacacacgacancaatacaacatcgtactcacacactcgtctcgacactcacgtaacgaatactccaataccccactaacgaaattacgatcatactaactcgttcccatctaacgcgacaaccgtccgctaacacaactccgctaccgcgacatacctcta

SEQ ID NO: 33725 - DNA, 606 bp, Artificial Sequence
  chemically treated genomic DNA (Homo sapiens) CpG-island No: 33725
atggtcgcgttcggggacgttcggtgattttaaatattgcgcgtcgtttcggtaatcgcgcggtttcgttttcgtcgttcgtaggaggcggggtttaggggcgggtcgagggcggttcgtggcggttgggtttttttttaattttgcgtttgttgttgggtcgtcggcgcgcgggcggtcgcgatcgtcggggacgagtttggaggaaaaggaatcgggagtcgtttattcgggggcgtttttcggatttttagggttttagcgcgcggtttttatcgagtttgggcgttcggatttcggtagcggatcgttttttcgggttggcggttcgtttgattgggaatagtcggtcggttgtcgggggaacgcgggagtcgggttcgatttgagttacgcgggtttggtgtttatttgtgcgcgtcgtttgcgaaaaaggaacggtttggggagaaggcgtcgtcggtcgttttcgtttttatcgcggtcgtcgttggagagttcgagtcgtttagcgtttttggagttttttaattatgaagtttaatttttttttgcgattgcggatttttaattttaattgttggtgagtgcgtttgcggagtgcgg

SEQ ID NO: 33726 - DNA, 606 bp, Artificial Sequence
  chemically treated genomic DNA (Homo sapiens) CpG-island No: 33726
ccgcactccgcaaacgcactcaccaacaattaaaattaaaaatccgcaatcgcaaaaaaaaattaaacttcataattaaaaaactccaaaaacgctaaacgactcgaactctccaacgacgaccgcgataaaaacgaaaacgaccgacgacgccttctccccaaaccgttcctttttcgcaaacgacgcgcacaaataaacaccaaacccgcgtaactcaaatcgaacccgactcccgcgttcccccgacaaccgaccgactattcccaatcaaacgaaccgccaacccgaaaaaacgatccgctaccgaaatccgaacgcccaaactcgataaaaaccgcgcgctaaaaccctaaaaatccgaaaaacgcccccgaataaacgactcccgattccttttcctccaaactcgtccccgacgatcgcgaccgcccgcgcgccgacgacccaacaacaaacgcaaaattaaaaaaaaacccaaccgccacgaaccgccctcgacccgcccctaaaccccgcctcctacgaacgacgaaaacgaaaccgcgcgattaccgaaacgacgcgcaatatttaaaatcaccgaacgtccccgaacgcgaccat

SEQ ID NO: 33727 - DNA, 606 bp, Artificial Sequence
  chemically treated genomic DNA (Homo sapiens) CpG-island No: 33727
tcgtatttcgtagacgtatttattagtagttgaggttgaagattcgtagtcgtagggagaagttgggttttatggttggggagttttaggggcgttaggcggttcgaattttttagcgacggtcgcggtggggacgggggcggtcggcggcgttttttttttagatcgtttttttttcgtaggcggcgcgtataggtgggtattaagttcgcgtggtttaggtcgggttcgattttcgcgttttttcggtaatcggtcggttgtttttaattaggcgggtcgttaattcggaaaggcgattcgttgtcgaaattcgggcgtttaggttcggtaagggtcgcgcgttaggattttgggggttcggagagcgttttcgggtgggcggttttcggtttttttttttttaagttcgttttcggcggtcgcggtcgttcgcgcgtcggcggtttagtaataggcgtaaagttgaggaaaggtttagtcgttacgggtcgttttcgattcgtttttgggtttcgttttttgcgagcggcggaggcggggtcgcgcggttgtcggagcgacgcgtagtgtttggggttatcgggcgttttcgggcgcggttat

SEQ ID NO: 33728 - DNA, 606 bp, Artificial Sequence
  chemically treated genomic DNA (Homo sapiens) CpG-island No: 33728
ataaccgcgcccgaaaacgcccgataaccccaaacactacgcgtcgctccgacaaccgcgcgaccccgcctccgccgctcgcaaaaaacgaaacccaaaaacgaatcgaaaacgacccgtaacgactaaacctttcctcaactttacgcctattactaaaccgccgacgcgcgaacgaccgcgaccgccgaaaacgaacttaaaaaaaaaaaaaccgaaaaccgcccacccgaaaacgctctccgaacccccaaaatcctaacgcgcgacccttaccgaacctaaacgcccgaatttcgacaacgaatcgcctttccgaattaacgacccgcctaattaaaaacaaccgaccgattaccgaaaaaacgcgaaaatcgaacccgacctaaaccacgcgaacttaatacccacctatacgcgccgcctacgaaaaaaaaacgatctaaaaaaaaaacgccgccgaccgcccccgtccccaccgcgaccgtcgctaaaaaattcgaaccgcctaacgcccctaaaactccccaaccataaaacccaacttctccctacgactacgaatcttcaacctcaactactaataaatacgtctacgaaatacga

SEQ ID NO: 33729 - DNA, 583 bp, Artificial Sequence
  chemically treated genomic DNA (Homo sapiens) CpG-island No: 33729
gagcggtttgaaaggatggagagggagttggatcgcgggcggtagcggtgggggttttcgatattggacggtaaagttcggacgcggcgtgagtagggttgggttgagggaagatttgtttgatttgttaggcgtggttttcgagcgatcgtagttgcgttttttcggaagcgtattttattttattttattcggtcgcggggttcgtagtcggtttcgttggacgatttatcggcggtttcgaagtcgggaggggtcgttttttgttgggttggtaattaggtttgagcgggtgggagggcgggggcgggggcgggggcggaaacgtcgagatcgggcggggatgttgggatgcggggcggttcggggcgtgcgtttggagtcgcgcggagtgtgggttttcgcgaggggcgcggggcgtcgttcgggttttattcgcgatttattagtattttattatttttggatttttttatcgtttttagcggggatagttttgggttcgtttatgtttgtagggtggcgttcgagggcgtggcgttgcggatatttcgtttcgttttggggtttttgggtgggtttg

SEQ ID NO: 33730 - DNA, 583 bp, Artificial Sequence
  chemically treated genomic DNA (Homo sapiens) CpG-island No: 33730
caaacccacccaaaaaccccaaaacgaaacgaaatatccgcaacgccacgccctcgaacgccaccctacaaacataaacgaacccaaaactatccccgctaaaaacgataaaaaaatccaaaaataataaaatactaataaatcgcgaataaaacccgaacgacgccccgcgcccctcgcgaaaacccacactccgcgcgactccaaacgcacgccccgaaccgccccgcatcccaacatccccgcccgatctcgacgtttccgcccccgcccccgcccccgccctcccacccgctcaaacctaattaccaacccaacaaaaaacgacccctcccgacttcgaaaccgccgataaatcgtccaacgaaaccgactacgaaccccgcgaccgaataaaataaaataaaatacgcttccgaaaaaacgcaactacgatcgctcgaaaaccacgcctaacaaatcaaacaaatcttccctcaacccaaccctactcacgccgcgtccgaactttaccgtccaatatcgaaaacccccaccgctaccgcccgcgatccaactccctctccatcctttcaaaccgctc

SEQ ID NO: 33731 - DNA, 583 bp, Artificial Sequence
  chemically treated genomic DNA (Homo sapiens) CpG-island No: 33731
tagatttatttagaggttttagagcggaacggggtgttcgtagcgttacgttttcgggcgttattttgtaggtatgggcgggtttaagattgttttcgttggaggcggtagagggatttagaagtaatgagatgttaatgagtcgcgaataaagttcgggcggcgtttcgcgtttttcgcggaagtttatatttcgcgcgattttaggcgtacgtttcgggtcgtttcgtattttagtattttcgttcgatttcggcgttttcgttttcgttttcgttttcgtttttttattcgtttagatttggttgttagtttaataggaagcggtttttttcggtttcggagtcgtcggtaagtcgtttagcggagtcggttgcgagtttcgcggtcgggtggggtgaggtggggtgcgttttcggggaaacgtagttgcggtcgttcgggaattacgtttggtaggttaggtaggtttttttttagtttagttttgtttacgtcgcgttcggattttgtcgtttagtgtcggggatttttatcgttgtcgttcgcggtttagttttttttttatttttttagatcgttt

SEQ ID NO: 33732 - DNA, 583 bp, Artificial Sequence
  chemically treated genomic DNA (Homo sapiens) CpG-island No: 33732
aaacgatctaaaaaaataaaaaaaaaactaaaccgcgaacgacaacgataaaaatccccgacactaaacgacaaaatccgaacgcgacgtaaacaaaactaaactaaaaaaaaacctacctaacctaccaaacgtaattcccgaacgaccgcaactacgtttccccgaaaacgcaccccacctcaccccacccgaccgcgaaactcgcaaccgactccgctaaacgacttaccgacgactccgaaaccgaaaaaaaccgcttcctattaaactaacaaccaaatctaaacgaataaaaaaacgaaaacgaaaacgaaaacgaaaacgccgaaatcgaacgaaaatactaaaatacgaaacgacccgaaacgtacgcctaaaatcgcgcgaaatataaacttccgcgaaaaacgcgaaacgccgcccgaactttattcgcgactcattaacatctcattacttctaaatccctctaccgcctccaacgaaaacaatcttaaacccgcccatacctacaaaataacgcccgaaaacgtaacgctacgaacaccccgttccgctctaaaacctctaaataaatcta

SEQ ID NO: 33733 - DNA, 899 bp, Artificial Sequence
  chemically treated genomic DNA (Homo sapiens) CpG-island No: 33733
cggagagaggcgtcgggagggtgaataattagtggtagggagaggtagttcggttttatcgttaattttagaggcgcgacgttcggttttatttttaattttatcgttgttttcgcggaaggaagttacgtttttattttcgattttaagtgaggttaggaattacgatgtatttttaaaaggtatttcgatttgtaatatttcgaggggggttttagtttcgtagttattgggaatcgcgcgttcgtttttttttagcgcgttttttattcggttcggttacgagtggattttaggttggtcgttatgttgtcggagtcgtcgtcgtatttcgagcgcggttcgttcgttcgatcgtggttcgaattcgggtttcgttcgtacggtgaggagatagtgcggttcggttgggtaggggagggcgggaagtttatagggttcgcgtttatttggtgtcggagtggtgattagcgggagggacgttatcggcgtcgaggttacgttggagatgggcgttaaagtcgttacgttcgggtgttgggtcgtgtttttgttcgcggatagtacgtagagtacgtttaggtaggtggcggtttaaagtagtgagcgggagagtcgcgatatcgtgtttttagcgttggcgttcgggagaaagttaaggttcgtaacgtttagttaattttttaattttttgcggcgtcgttttcgagattacgttttttcgcgggagcgcgtaggggttacgtgagaggtttttgttttcggcgtgcgggggcgaagaggagggaggtggggttcggacgatattaacgggaattttacggggggaagtaggggagtcgggaggaagtcgaaggaatttggtttttaaagcgattgtgttatagttaagaaaattg

SEQ ID NO: 33734 - DNA, 899 bp, Artificial Sequence
  chemically treated genomic DNA (Homo sapiens) CpG-island No: 33734
caattttcttaactataacacaatcgctttaaaaaccaaattccttcgacttcctcccgactcccctacttccccccgtaaaattcccgttaatatcgtccgaaccccacctccctcctcttcgcccccgcacgccgaaaacaaaaacctctcacgtaacccctacgcgctcccgcgaaaaaacgtaatctcgaaaacgacgccgcaaaaaattaaaaaattaactaaacgttacgaaccttaactttctcccgaacgccaacgctaaaaacacgatatcgcgactctcccgctcactactttaaaccgccacctacctaaacgtactctacgtactatccgcgaacaaaaacacgacccaacacccgaacgtaacgactttaacgcccatctccaacgtaacctcgacgccgataacgtccctcccgctaatcaccactccgacaccaaataaacgcgaaccctataaacttcccgccctcccctacccaaccgaaccgcactatctcctcaccgtacgaacgaaacccgaattcgaaccacgatcgaacgaacgaaccgcgctcgaaatacgacgacgactccgacaacataacgaccaacctaaaatccactcgtaaccgaaccgaataaaaaacgcgctaaaaaaaaacgaacgcgcgattcccaataactacgaaactaaaacccccctcgaaatattacaaatcgaaataccttttaaaaatacatcgtaattcctaacctcacttaaaatcgaaaataaaaacgtaacttccttccgcgaaaacaacgataaaattaaaaataaaaccgaacgtcgcgcctctaaaattaacgataaaaccgaactacctctccctaccactaattattcaccctcccgacgcctctctccg

SEQ ID NO: 33735 - DNA, 899 bp, Artificial Sequence
  chemically treated genomic DNA (Homo sapiens) CpG-island No: 33735
tagtttttttggttgtggtatagtcgttttgagggttaggttttttcggttttttttcgatttttttgttttttttcgtaggattttcgttggtatcgttcgagttttatttttttttttttcgttttcgtacgtcgaaaataggggttttttacgtgatttttgcgcgttttcgcgggggagcgtagtttcggaggcggcgtcgtaggggattgaggggttgattgagcgttgcgagttttagttttttttcgaacgttagcgttgaggatacgatgtcgcggttttttcgtttattgttttgggtcgttatttgtttgggcgtgttttgcgtgttgttcgcggataagaatacgatttagtattcgaacgtgacgattttagcgtttatttttaacgtaatttcggcgtcggtgacgtttttttcgttggttattatttcggtattaggtgggcgcgggttttgtgggtttttcgtttttttttgtttagtcgagtcgtattgtttttttatcgtgcgggcggggttcgggttcgggttacggtcgggcgggcgggtcgcgttcggggtgcggcggcgatttcggtaatatggcggttagtttggagtttattcgtggtcgggtcgggtggggagcgcgttggggggaagcggacgcgcggtttttagtggttgcggggttggggtttttttcgaagtgttgtaagtcgaggtgttttttaaaagtgtatcgtaatttttagttttatttggggtcggaaatggggacgtggttttttttcgcgggggtagcggtggggttgaggatggggtcgggcgtcgcgtttttgaggttggcggtggggtcgagttgtttttttttgttattggttgtttattttttcggcgttttttttcg

SEQ ID NO: 33736 - DNA, 899 bp, Artificial Sequence
  chemically treated genomic DNA (Homo sapiens) CpG-island No: 33736
cgaaaaaaaacgccgaaaaaataaacaaccaataacaaaaaaaaacaactcgaccccaccgccaacctcaaaaacgcgacgcccgaccccatcctcaaccccaccgctacccccgcgaaaaaaaaccacgtccccatttccgaccccaaataaaactaaaaattacgatacacttttaaaaaacacctcgacttacaacacttcgaaaaaaaccccaaccccgcaaccactaaaaaccgcgcgtccgcttccccccaacgcgctccccacccgacccgaccacgaataaactccaaactaaccgccatattaccgaaatcgccgccgcaccccgaacgcgacccgcccgcccgaccgtaacccgaacccgaaccccgcccgcacgataaaaaaacaatacgactcgactaaacaaaaaaaaacgaaaaacccacaaaacccgcgcccacctaataccgaaataataaccaacgaaaaaaacgtcaccgacgccgaaattacgttaaaaataaacgctaaaatcgtcacgttcgaatactaaatcgtattcttatccgcgaacaacacgcaaaacacgcccaaacaaataacgacccaaaacaataaacgaaaaaaccgcgacatcgtatcctcaacgctaacgttcgaaaaaaaactaaaactcgcaacgctcaatcaacccctcaatcccctacgacgccgcctccgaaactacgctcccccgcgaaaacgcgcaaaaatcacgtaaaaaacccctattttcgacgtacgaaaacgaaaaaaaaaaaaataaaactcgaacgataccaacgaaaatcctacgaaaaaaaacaaaaaaatcgaaaaaaaaccgaaaaaacctaaccctcaaaacgactataccacaaccaaaaaaacta

SEQ ID NO: 33737 - DNA, 1179 bp, Artificial Sequence
  chemically treated genomic DNA (Homo sapiens) CpG-island No: 33737
acgtagcgcgtttagttgcgcggggttcggtcggtattcgcggttgaatagcgtcgcggttttcgcggtttcgggtttcgacggcggggacggcggtggcgttcgcgagagttagagaggcggcgacgaggcgagaggcgaggaggcgattcgcgcggtgttattgaggttcgggattacggagatgtcggggttttgttcgacgtttattaggaataagaagggatcggtagagagtagcgttacggtttagagtatagcgatgagcgcgcggacgcggcgtcgggtgattaagacgcgggcgcggagcgggcggtagatggttaggtagcgttcgacgttgagcgcggttatgtgtagtagcgtggcgtaggtgtagttttcgtttacgtagagggataggcggtagagtagcggttcgaatatttagggtcgcgagcgttagaggcggtataggtcgaacggtagttcgagtaggatgagtaggtcggatacggttatgttgtttaggtataagttggtggtggttcgtatgtttcggtagcgttcgattagtattacggttattacgttgtcgtttatttcgacgacgaataggtataggtatatagcggttatcggtattagcgtttttaggggaaagggcgagtagcggcgttcgtcgtaaggcggtagcgcgggttacggcggttttcgcgttttttcggggcggtcgttgtcgttttaggggttgtttatgggtgtttcgcgcggtcgtcgcgtttcgggtcgggttgggagtttggcgcgtggtttttttcggtgagcgtttttttttttagttcgtacgttgcgggcgcggtaggttagacggcggagcgttgcgttgcgttgcggggcgcgagaagcggttttgcggggtgggtttcgaggcgttttcgagttagttgcgcgtagttttcgtttacggtcgcggttcgtttcggttcggttttgtttcgttttcgcgttttttttcgggtttatgtagttttagggcgtttttttttttattaattggaatattcggcgtttttagcgtacgagttttattcggttcggtgagcgatgtttgtattttagatagttttggttataggattgagtattgtacgggcgtttttgttagtttggtatttcgggtattttcgaagggatttg

SEQ ID NO: 33738 - DNA, 1179 bp, Artificial Sequence
  chemically treated genomic DNA (Homo sapiens) CpG-island No: 33738
caaatcccttcgaaaatacccgaaataccaaactaacaaaaacgcccgtacaatactcaatcctataaccaaaactatctaaaatacaaacatcgctcaccgaaccgaataaaactcgtacgctaaaaacgccgaatattccaattaataaaaaaaaaaacgccctaaaactacataaacccgaaaaaaaacgcgaaaacgaaacaaaaccgaaccgaaacgaaccgcgaccgtaaacgaaaactacgcgcaactaactcgaaaacgcctcgaaacccaccccgcaaaaccgcttctcgcgccccgcaacgcaacgcaacgctccgccgtctaacctaccgcgcccgcaacgtacgaactaaaaaaaaaaacgctcaccgaaaaaaaccacgcgccaaactcccaacccgacccgaaacgcgacgaccgcgcgaaacacccataaacaacccctaaaacgacaacgaccgccccgaaaaaacgcgaaaaccgccgtaacccgcgctaccgccttacgacgaacgccgctactcgccctttcccctaaaaacgctaataccgataaccgctatatacctatacctattcgtcgtcgaaataaacgacaacgtaataaccgtaatactaatcgaacgctaccgaaacatacgaaccaccaccaacttatacctaaacaacataaccgtatccgacctactcatcctactcgaactaccgttcgacctataccgcctctaacgctcgcgaccctaaatattcgaaccgctactctaccgcctatccctctacgtaaacgaaaactacacctacgccacgctactacacataaccgcgctcaacgtcgaacgctacctaaccatctaccgcccgctccgcgcccgcgtcttaatcacccgacgccgcgtccgcgcgctcatcgctatactctaaaccgtaacgctactctctaccgatcccttcttattcctaataaacgtcgaacaaaaccccgacatctccgtaatcccgaacctcaataacaccgcgcgaatcgcctcctcgcctctcgcctcgtcgccgcctctctaactctcgcgaacgccaccgccgtccccgccgtcgaaacccgaaaccgcgaaaaccgcgacgctattcaaccgcgaataccgaccgaaccccgcgcaactaaacgcgctacgt

SEQ ID NO: 33739 - DNA, 1179 bp, Artificial Sequence
  chemically treated genomic DNA (Homo sapiens) CpG-island No: 33739
tagattttttcgaaggtgttcggagtattagattgataaaagcgttcgtatagtgtttagttttgtaattaaagttgtttagggtgtagatatcgtttatcggatcgggtagggttcgtgcgttaagggcgtcgggtattttagttagtggagagggaagcgttttggaattgtatgggttcgggagagggcgcgggagcggagtagggtcgggtcggggcgggtcgcggtcgtgggcggagattgcgcgtagttagttcgggagcgtttcggagtttatttcgtagagtcgtttttcgcgtttcgtagcgtagcgtagcgtttcgtcgtttgatttgtcgcgttcgtagcgtgcgggttgggaaaggaggcgtttatcgagagggattacgcgttaggtttttagttcgattcgggacgcggcggtcgcgcggagtatttatgggtagtttttggaacggtagcgatcgtttcgagggggcgcgggagtcgtcgtggttcgcgttgtcgttttgcgacgagcgtcgttgttcgtttttttttttgggggcgttggtgtcggtgatcgttgtgtgtttgtgtttgttcgtcgtcggggtgagcggtaacgtggtgatcgtgatgttgatcgggcgttatcgggatatgcggattattattaatttgtatttgggtagtatggtcgtgttcgatttatttattttgttcgggttgtcgttcgatttgtatcgtttttggcgttcgcggttttgggtgttcgggtcgttgttttgtcgtttgtttttttacgtgggcgagggttgtatttacgttacgttgttgtatatgatcgcgtttagcgtcgagcgttatttggttatttgtcgttcgtttcgcgttcgcgttttggttattcggcgtcgcgttcgcgcgtttatcgttgtgttttgggtcgtggcgttgttttttgtcggtttttttttgtttttggtgggcgtcgagtaggatttcggtattttcgtagtttcgggttttaatggtatcgcgcggatcgttttttcgtttttcgtttcgtcgtcgtttttttggttttcgcgggcgttatcgtcgttttcgtcgtcggggttcgagatcgcggaggtcgcggcgttgtttagtcgcgaatgtcggtcgagtttcgcgtagttgggcgcgttgcgt

SEQ ID NO: 33740 - DNA, 1179 bp, Artificial Sequence
  chemically treated genomic DNA (Homo sapiens) CpG-island No: 33740
acgcaacgcgcccaactacgcgaaactcgaccgacattcgcgactaaacaacgccgcgacctccgcgatctcgaaccccgacgacgaaaacgacgataacgcccgcgaaaaccaaaaaaacgacgacgaaacgaaaaacgaaaaaacgatccgcgcgataccattaaaacccgaaactacgaaaataccgaaatcctactcgacgcccaccaaaaacaaaaaaaaaccgacaaaaaacaacgccacgacccaaaacacaacgataaacgcgcgaacgcgacgccgaataaccaaaacgcgaacgcgaaacgaacgacaaataaccaaataacgctcgacgctaaacgcgatcatatacaacaacgtaacgtaaatacaaccctcgcccacgtaaaaaaacaaacgacaaaacaacgacccgaacacccaaaaccgcgaacgccaaaaacgatacaaatcgaacgacaacccgaacaaaataaataaatcgaacacgaccatactacccaaatacaaattaataataatccgcatatcccgataacgcccgatcaacatcacgatcaccacgttaccgctcaccccgacgacgaacaaacacaaacacacaacgatcaccgacaccaacgcccccaaaaaaaaaaacgaacaacgacgctcgtcgcaaaacgacaacgcgaaccacgacgactcccgcgccccctcgaaacgatcgctaccgttccaaaaactacccataaatactccgcgcgaccgccgcgtcccgaatcgaactaaaaacctaacgcgtaatccctctcgataaacgcctcctttcccaacccgcacgctacgaacgcgacaaatcaaacgacgaaacgctacgctacgctacgaaacgcgaaaaacgactctacgaaataaactccgaaacgctcccgaactaactacgcgcaatctccgcccacgaccgcgacccgccccgacccgaccctactccgctcccgcgccctctcccgaacccatacaattccaaaacgcttccctctccactaactaaaatacccgacgcccttaacgcacgaaccctacccgatccgataaacgatatctacaccctaaacaactttaattacaaaactaaacactatacgaacgcttttatcaatctaatactccgaacaccttcgaaaaaatcta

SEQ ID NO: 33741 - DNA, 645 bp, Artificial Sequence
  chemically treated genomic DNA (Homo sapiens) CpG-island No: 33741
cgtcgcggtttttagtttttttttgtttcggtcgggtttttttttcgtgttttttttcggttttattttcggcgtttagcgttgttttattgtgcgcgattgggagtcgattgtgttttcgttttagcgtttcgtcgcgtatatcggaaacgagcgacgcgtttcgtttcgcggtgtttcgtttacgtttcgatttcgtttttcgcgtttttgttagtttggttttttttgttcggcgttttagcgtattcgttttaggtgtcgggcgtcgggtttggttatcgggcgtaatcgtcggagcgggttaattattggttcgtcggatagtcggttcgtcggcgtttgggggttaggttcgaattttttattagagcggcgttcgttttttttttttttcggtttcgacgtttttttggtttttttttttgttcgggaggttaagtgttcgggagaggcgcgggagttaagatttatgtattcggagagggacgcggagttagcggtcgggtaaagtcgtatttttcgcgtttggggtttcggttttgtttttgggtgtttttcggttatttttagggggagtaaaggtttcgaggtttcgtagcgtttttggtgtttttttgataattcgtagtgattaatgttttt

SEQ ID NO: 33742 - DNA, 645 bp, Artificial Sequence
  chemically treated genomic DNA (Homo sapiens) CpG-island No: 33742
aaaaacattaatcactacgaattatcaaaaaaacaccaaaaacgctacgaaacctcgaaacctttactccccctaaaaataaccgaaaaacacccaaaaacaaaaccgaaaccccaaacgcgaaaaatacgactttacccgaccgctaactccgcgtccctctccgaatacataaatcttaactcccgcgcctctcccgaacacttaacctcccgaacaaaaaaaaaaaccaaaaaaacgtcgaaaccgaaaaaaaaaaaaaacgaacgccgctctaataaaaaattcgaacctaacccccaaacgccgacgaaccgactatccgacgaaccaataattaacccgctccgacgattacgcccgataaccaaacccgacgcccgacacctaaaacgaatacgctaaaacgccgaacaaaaaaaaccaaactaacaaaaacgcgaaaaacgaaatcgaaacgtaaacgaaacaccgcgaaacgaaacgcgtcgctcgtttccgatatacgcgacgaaacgctaaaacgaaaacacaatcgactcccaatcgcgcacaataaaacaacgctaaacgccgaaaataaaaccgaaaaaaaacacgaaaaaaaaacccgaccgaaacaaaaaaaaactaaaaaccgcgacg

SEQ ID NO: 33743 - DNA, 645 bp, Artificial Sequence
  chemically treated genomic DNA (Homo sapiens) CpG-island No: 33743
gaaaatattaattattacgaattattagaaaaatattaagagcgttacgaggtttcggagtttttattttttttggaagtaatcggggagtatttaggggtaaagtcgaggttttaagcgcggggaatgcggttttgttcgatcgttggtttcgcgttttttttcgggtgtataagttttggttttcgcgtttttttcgagtatttagtttttcgagtagagaggggaattagaggagcgtcgaagtcgggagagaaaaggggcgggcgtcgttttggtaagaagttcgggtttggtttttaagcgtcggcgaatcggttattcggcgagttagtaattagttcgtttcgacggttgcgttcggtggttagattcggcgttcgatatttggagcgagtgcgttggggcgtcggataggagaggttaggttggtaaaggcgcgggaggcggggtcggagcgtgggcggggtatcgcggggcggggcgcgtcgttcgttttcggtgtgcgcggcggagcgttagggcgggggtatagtcggtttttaatcgcgtataatgagatagcgttgagcgtcggaagtggggtcgaaggaaaatacggagagggagttcggtcgggataggaagaggttggggatcgcggcg

SEQ ID NO: 33744 - DNA, 645 bp, Artificial Sequence
  chemically treated genomic DNA (Homo sapiens) CpG-island No: 33744
cgccgcgatccccaacctcttcctatcccgaccgaactccctctccgtattttccttcgaccccacttccgacgctcaacgctatctcattatacgcgattaaaaaccgactatacccccgccctaacgctccgccgcgcacaccgaaaacgaacgacgcgccccgccccgcgataccccgcccacgctccgaccccgcctcccgcgcctttaccaacctaacctctcctatccgacgccccaacgcactcgctccaaatatcgaacgccgaatctaaccaccgaacgcaaccgtcgaaacgaactaattactaactcgccgaataaccgattcgccgacgcttaaaaaccaaacccgaacttcttaccaaaacgacgcccgccccttttctctcccgacttcgacgctcctctaattcccctctctactcgaaaaactaaatactcgaaaaaaacgcgaaaaccaaaacttatacacccgaaaaaaaacgcgaaaccaacgatcgaacaaaaccgcattccccgcgcttaaaacctcgactttacccctaaatactccccgattacttccaaaaaaaataaaaactccgaaacctcgtaacgctcttaatatttttctaataattcgtaataattaatattttc

SEQ ID NO: 33745 - DNA, 1038 bp, Artificial Sequence
  chemically treated genomic DNA (Homo sapiens) CpG-island No: 33745
gcgtcgcggtcgtgatttcggtaggagtcgggggttttgttgtcgttgtgttcgttttttgcgaacgttgtcgtttcgatatagcggtttttcggatagtttggtttttttttattttacgtatttttaggttaggatttcgggttattatcgggaattttcgttatcgggtacgtttagtttttgtttaatcggaacggtcgaatagcgtaggtcggtaggagtgtggaggcgatcggttttcggggacgtttattttcgggatttttttcggttcgtacgcggttgtcgcgcggtttgacgggaaacgtagttttcggggttaagagagtagtttcgttcgggatttgtttatcgttgtaaagaggggtcggaggcgaaggaggcggcgaggttgtgcggcgggtcggagcgacgtcgaggtttgacgtgttcgcgtttttgcggttttattttcggtcgtcgtgatttttttttgtacggggcggatacgagtaatgttacgggtttcgtcgcgcgtcgcgagtatttattagggtgagggttgttcgggtgggttgtagtttttttttgtttatagttcggatagttgttcggattaaggaagtcgatattttcgtcgtttcggcgtttcggtgtttcgggtcgaaggtcggtcgttttagtttttttttatggatacggcgggcgtattgacgttataagtttcggcgtacggcgtttttagttttagtttcgtttttcgtcgttattattgggtgagttgtatgagtgacgagtcgggggcggggtaagtcgttcggggcggggttttgtcgtttaacgtcgggggtttagtagttgggttgcgtacggttttcggtagtggggttattacgttgtagggcgtagggttcgggaggaatgtttttatcgtcgaggacggagtcggcgtgacgtcggggagcgggcgggagggggcgaggaatgattttagatttgttgatttcggatgtacgtagttttattatttgttttcggggtaaggtgtagcgttat

SEQ ID NO: 33746 - DNA, 1038 bp, Artificial Sequence
  chemically treated genomic DNA (Homo sapiens) CpG-island No: 33746
ataacgctacaccttaccccgaaaacaaataataaaactacgtacatccgaaatcaacaaatctaaaatcattcctcgccccctcccgcccgctccccgacgtcacgccgactccgtcctcgacgataaaaacattcctcccgaaccctacgccctacaacgtaataaccccactaccgaaaaccgtacgcaacccaactactaaacccccgacgttaaacgacaaaaccccgccccgaacgacttaccccgcccccgactcgtcactcatacaactcacccaataataacgacgaaaaacgaaactaaaactaaaaacgccgtacgccgaaacttataacgtcaatacgcccgccgtatccataaaaaaaaactaaaacgaccgaccttcgacccgaaacaccgaaacgccgaaacgacgaaaatatcgacttccttaatccgaacaactatccgaactataaacaaaaaaaaactacaacccacccgaacaaccctcaccctaataaatactcgcgacgcgcgacgaaacccgtaacattactcgtatccgccccgtacaaaaaaaaatcacgacgaccgaaaataaaaccgcaaaaacgcgaacacgtcaaacctcgacgtcgctccgacccgccgcacaacctcgccgcctccttcgcctccgacccctctttacaacgataaacaaatcccgaacgaaactactctcttaaccccgaaaactacgtttcccgtcaaaccgcgcgacaaccgcgtacgaaccgaaaaaaatcccgaaaataaacgtccccgaaaaccgatcgcctccacactcctaccgacctacgctattcgaccgttccgattaaacaaaaactaaacgtacccgataacgaaaattcccgataataacccgaaatcctaacctaaaaatacgtaaaataaaaaaaaaccaaactatccgaaaaaccgctatatcgaaacgacaacgttcgcaaaaaacgaacacaacgacaacaaaacccccgactcctaccgaaatcacgaccgcgacgc

SEQ ID NO: 33747 - DNA, 1038 bp, Artificial Sequence
  chemically treated genomic DNA (Homo sapiens) CpG-island No: 33747
gtgacgttgtattttgtttcgggggtaggtggtgaagttacgtgtattcggagttagtaggtttgaggttatttttcgttttttttcgttcgtttttcgacgttacgtcgatttcgttttcggcggtgaagatatttttttcgggttttgcgttttgtagcgtggtaattttattgtcggagatcgtgcgtaatttagttgttagattttcggcgttgagcggtaaaatttcgtttcgagcggtttgtttcgttttcggttcgttatttatgtaatttatttaatggtggcggcggggggcggggttaggattgagggcgtcgtgcgtcgaagtttgtggcgttaatgcgttcgtcgtgtttatggagagaagttgaggcggtcgattttcggttcgaggtatcggggcgtcgggacggcgaagatgtcggtttttttagttcgggtaattgttcgggttgtgagtaagaggaagttgtagtttattcgggtagtttttattttggtgagtgttcgcggcgcgcggcggggttcgtgatattgttcgtgttcgtttcgtgtaaggggaggttacggcggtcgggagtggggtcgtagggacgcggatacgttagatttcggcgtcgtttcgattcgtcgtatagtttcgtcgtttttttcgttttcggtttttttttgtaacgataaataagtttcgggcggggttgtttttttggtttcggaaattacgtttttcgttaggtcgcgcggtaatcgcgtgcgggtcggaggggatttcgggggtgggcgttttcgggggtcgatcgtttttatatttttgtcggtttgcgttgttcggtcgtttcggttaagtagaggttgaacgtgttcggtggcgggggttttcggtggtggttcggagttttagtttggaggtgcgtggggtggggagggattaggttgttcgaaggatcgttgtgtcggggcgatagcgttcgtagagggcgagtatagcgataataaagttttcggtttttgtcgaggttacggtcgcggcgt

SEQ ID NO: 33748 - DNA, 1038 bp, Artificial Sequence
  chemically treated genomic DNA (Homo sapiens) CpG-island No: 33748
acgccgcgaccgtaacctcgacaaaaaccgaaaactttattatcgctatactcgccctctacgaacgctatcgccccgacacaacgatccttcgaacaacctaatccctccccaccccacgcacctccaaactaaaactccgaaccaccaccgaaaacccccgccaccgaacacgttcaacctctacttaaccgaaacgaccgaacaacgcaaaccgacaaaaatataaaaacgatcgacccccgaaaacgcccacccccgaaatcccctccgacccgcacgcgattaccgcgcgacctaacgaaaaacgtaatttccgaaaccaaaaaaacaaccccgcccgaaacttatttatcgttacaaaaaaaaaccgaaaacgaaaaaaacgacgaaactatacgacgaatcgaaacgacgccgaaatctaacgtatccgcgtccctacgaccccactcccgaccgccgtaacctccccttacacgaaacgaacacgaacaatatcacgaaccccgccgcgcgccgcgaacactcaccaaaataaaaactacccgaataaactacaacttcctcttactcacaacccgaacaattacccgaactaaaaaaaccgacatcttcgccgtcccgacgccccgatacctcgaaccgaaaatcgaccgcctcaacttctctccataaacacgacgaacgcattaacgccacaaacttcgacgcacgacgccctcaatcctaaccccgccccccgccgccaccattaaataaattacataaataacgaaccgaaaacgaaacaaaccgctcgaaacgaaattttaccgctcaacgccgaaaatctaacaactaaattacgcacgatctccgacaataaaattaccacgctacaaaacgcaaaacccgaaaaaaatatcttcaccgccgaaaacgaaatcgacgtaacgtcgaaaaacgaacgaaaaaaaacgaaaaataacctcaaacctactaactccgaatacacgtaacttcaccacctacccccgaaacaaaatacaacgtcac

SEQ ID NO: 33749 - DNA, 1041 bp, Artificial Sequence
  chemically treated genomic DNA (Homo sapiens) CpG-island No: 33749
ttttagattgtggttatcgttatttttttatttaaatttcgtttcgattattttttcgttttagggtttcgtatttattttgtcgggtttttacgaagcgtttttcgggttatatattgcgtaatttcggtagtcgggcggagtttgtatagaggcggagtcgcggtagtcggagagaacgttttagtaatagtcgttaggaggaagttttaggagtttttgtcgtttacggaacgcgtttgcgtaattcgggtttaggtcgtcgatattttaggatcgtttttcgtttcgtttttaattttggggcggagttttcggtcgcgtcggcgtaaagcgtcgtcgtattttacgtttgcgcgtttcgttcgttcggttttatttttttaggtttttcgcgtgggggagggggtacgtttcggcgagttacgatgatggcggttattattttgtggtgagttagcggattttttgtttgtttcgtcgattttttcgcgttttttgtagatttcgtggttggcgttcggcgcgtgaggaagtacggcggttcgagttcgcggggaaggtcgtagtcgcggaggtagcggcgcggttcggggtacgggttgggggagaggtcgtttcgttgggcgaatgtgataagtttttatttttatcgtttttttttttagagcgcgaggagcgcgggcgatttcggggtttcgttaggttatagatttcgtttagcggttagtattcggcgtaggttcggtagtcgagttgcgcggcggtattatgtaggttattttgaagattttttagtagtagatttttaagatagatattgatttcgaggagacggtatgcgcgcgggtcgggggtaggggtagtcgcgtgcgggtcgcggggagcgttaggagttcgtggggtcgggcggcgcgttttagcgggggaagtttcggagggcgcgatgagggttttgggttttggtgtcggttttggcggcgtatagcggagtcgatttttttgttttggtcgtgggttttgtggtaggagaatggggaa

SEQ ID NO: 33750 - DNA, 1041 bp, Artificial Sequence
  chemically treated genomic DNA (Homo sapiens) CpG-island No: 33750
ttccccattctcctaccacaaaacccacgaccaaaacaaaaaaatcgactccgctatacgccgccaaaaccgacaccaaaacccaaaaccctcatcgcgccctccgaaacttcccccgctaaaacgcgccgcccgaccccacgaactcctaacgctccccgcgacccgcacgcgactacccctacccccgacccgcgcgcataccgtctcctcgaaatcaatatctatcttaaaaatctactactaaaaaatcttcaaaataacctacataataccgccgcgcaactcgactaccgaacctacgccgaatactaaccgctaaacgaaatctataacctaacgaaaccccgaaatcgcccgcgctcctcgcgctctaaaaaaaaaaacgataaaaataaaaacttatcacattcgcccaacgaaacgacctctcccccaacccgtaccccgaaccgcgccgctacctccgcgactacgaccttccccgcgaactcgaaccgccgtacttcctcacgcgccgaacgccaaccacgaaatctacaaaaaacgcgaaaaaatcgacgaaacaaacaaaaaatccgctaactcaccacaaaataataaccgccatcatcgtaactcgccgaaacgtaccccctcccccacgcgaaaaacctaaaaaaataaaaccgaacgaacgaaacgcgcaaacgtaaaatacgacgacgctttacgccgacgcgaccgaaaactccgccccaaaattaaaaacgaaacgaaaaacgatcctaaaatatcgacgacctaaacccgaattacgcaaacgcgttccgtaaacgacaaaaactcctaaaacttcctcctaacgactattactaaaacgttctctccgactaccgcgactccgcctctatacaaactccgcccgactaccgaaattacgcaatatataacccgaaaaacgcttcgtaaaaacccgacaaaataaatacgaaaccctaaaacgaaaaaataatcgaaacgaaatttaaataaaaaaataacgataaccacaatctaaaa

SEQ ID NO: 33751 - DNA, 1041 bp, Artificial Sequence
  chemically treated genomic DNA (Homo sapiens) CpG-island No: 33751
ttttttatttttttgttataaagtttacggttaagataggaggatcggtttcgttgtacgtcgttagggtcggtattaggatttagggtttttatcgcgtttttcggggtttttttcgttggagcgcgtcgttcggttttacgagtttttggcgtttttcgcggttcgtacgcggttgtttttgttttcggttcgcgcgtatatcgttttttcggggttaatgtttattttgaaggtttgttgttggagggtttttagggtgatttgtatggtgtcgtcgcgtagttcggttgtcgggtttgcgtcgggtgttggtcgttgggcggggtttgtggtttggcggggtttcggggtcgttcgcgtttttcgcgttttggggaggaaggcggtgggggtgggggtttgttatattcgtttagcggagcggttttttttttagttcgtgtttcggatcgcgtcgttgttttcgcgattgcggtttttttcgcgaattcgggtcgtcgtgtttttttacgcgtcgagcgttagttacggagtttgtagaaggcgcgagggggtcggcgagataagtagggaattcgttagtttattataggatggtggtcgttattatcgtgattcgtcgagacgtgtttttttttttacgcgaaaaatttggggggatggggtcgggcgggcgaagcgcgtaggcgtggggtgcggcgacgttttgcgtcggcgcggtcgaggatttcgttttagaattgggggcggggcggaaggcggttttggaatgtcggcggtttggattcggattacgtaggcgcgtttcgtgggcggtaagggtttttggggtttttttttagcgattattgttggggcgtttttttcggttgtcgcggtttcgtttttgtgtaggtttcgttcggttgtcgaagttacgtaatgtgtagttcgggaagcgtttcgtggagattcggtagagtggatgcggagttttggagcgggggagtaatcggggcggagtttaagtgaaaggatggcggtaattatagtttgggg

SEQ ID NO: 33752 - DNA, 1041 bp, Artificial Sequence
  chemically treated genomic DNA (Homo sapiens) CpG-island No: 33752
ccccaaactataattaccgccatcctttcacttaaactccgccccgattactcccccgctccaaaactccgcatccactctaccgaatctccacgaaacgcttcccgaactacacattacgtaacttcgacaaccgaacgaaacctacacaaaaacgaaaccgcgacaaccgaaaaaaacgccccaacaataatcgctaaaaaaaaaccccaaaaacccttaccgcccacgaaacgcgcctacgtaatccgaatccaaaccgccgacattccaaaaccgccttccgccccgcccccaattctaaaacgaaatcctcgaccgcgccgacgcaaaacgtcgccgcaccccacgcctacgcgcttcgcccgcccgaccccatccccccaaatttttcgcgtaaaaaaaaaaacacgtctcgacgaatcacgataataacgaccaccatcctataataaactaacgaattccctacttatctcgccgaccccctcgcgccttctacaaactccgtaactaacgctcgacgcgtaaaaaaacacgacgacccgaattcgcgaaaaaaaccgcaatcgcgaaaacaacgacgcgatccgaaacacgaactaaaaaaaaaaccgctccgctaaacgaatataacaaacccccacccccaccgccttcctccccaaaacgcgaaaaacgcgaacgaccccgaaaccccgccaaaccacaaaccccgcccaacgaccaacacccgacgcaaacccgacaaccgaactacgcgacgacaccatacaaatcaccctaaaaaccctccaacaacaaaccttcaaaataaacattaaccccgaaaaaacgatatacgcgcgaaccgaaaacaaaaacaaccgcgtacgaaccgcgaaaaacgccaaaaactcgtaaaaccgaacgacgcgctccaacgaaaaaaaccccgaaaaacgcgataaaaaccctaaatcctaataccgaccctaacgacgtacaacgaaaccgatcctcctatcttaaccgtaaactttataacaaaaaaataaaaaa

SEQ ID NO: 33753 - DNA, 580 bp, Artificial Sequence
  chemically treated genomic DNA (Homo sapiens) CpG-island No: 33753
tgaagcgtcggttatttgggcgaagatttagtcgagtaggagcgttcgagcgacggcggtttcggggcgcgggattcggggttaggtaggggtttttatgtttattagttggcggcgagatcgagcgggtttcgtggcgttcgtggggttggggaggttgggttgaaggcgttttgggtcggttagagggagtgcgagggggtgcggggagttcgtagttttggggagtcggtgtttcgcgcgttataaagggtcggcggcgcgttttttcgcgtttttgttcgttttcggcgttcgttttcgtcgtttttttcgatttttcgttttcggttcgggttatttgtcgtcgcggtgggcggttttcggcgagtttatatttttgtttcgttttttttcggtaggaaatttcgggattttgtaagggatgatttattttagtgatttaatcgcgttatcgagcgcggagttgttttggaggacgtaggcgggtttagttgttcgggttttttaaggttttcggatttatttaggttcgcgatttcgacgtgtagtttaggtgggttgtaggtttatggtagga

SEQ ID NO: 33754 - DNA, 580 bp, Artificial Sequence
  chemically treated genomic DNA (Homo sapiens) CpG-island No: 33754
tcctaccataaacctacaacccacctaaactacacgtcgaaatcgcgaacctaaataaatccgaaaaccttaaaaaacccgaacaactaaacccgcctacgtcctccaaaacaactccgcgctcgataacgcgattaaatcactaaaataaatcatcccttacaaaatcccgaaatttcctaccgaaaaaaaacgaaacaaaaatataaactcgccgaaaaccgcccaccgcgacgacaaataacccgaaccgaaaacgaaaaatcgaaaaaaacgacgaaaacgaacgccgaaaacgaacaaaaacgcgaaaaaacgcgccgccgaccctttataacgcgcgaaacaccgactccccaaaactacgaactccccgcaccccctcgcactccctctaaccgacccaaaacgccttcaacccaacctccccaaccccacgaacgccacgaaacccgctcgatctcgccgccaactaataaacataaaaacccctacctaaccccgaatcccgcgccccgaaaccgccgtcgctcgaacgctcctactcgactaaatcttcgcccaaataaccgacgcttca

SEQ ID NO: 33755 - DNA, 580 bp, Artificial Sequence
  chemically treated genomic DNA (Homo sapiens) CpG-island No: 33755
ttttgttatagatttgtaatttatttaagttgtacgtcggagtcgcgggtttgggtgaattcgggggttttgggggattcgggtaattagattcgtttgcgttttttagggtagtttcgcgttcggtggcgcggttgaattattggggtgagttattttttgtagggtttcggagttttttatcgggaggaggcggggtaggggtgtggattcgtcgggggtcgtttatcgcgacggtaagtgattcgggtcgggggcggggagtcgggaggagcggcgggggcgggcgtcgggggcgggtagaggcgcgggagagcgcgtcgtcggttttttatagcgcgcggggtatcggttttttaagattgcgagtttttcgtattttttcgtattttttttggtcggtttagggcgtttttagtttaatttttttagttttacgggcgttacggaattcgttcgatttcgtcgttaattggtagatatggagatttttgtttggtttcgggtttcgcgtttcgagatcgtcgtcgttcggacgtttttgttcggttgggttttcgtttaggtggtcggcgtttta

SEQ ID NO: 33756 - DNA, 580 bp, Artificial Sequence
  chemically treated genomic DNA (Homo sapiens) CpG-island No: 33756
taaaacgccgaccacctaaacgaaaacccaaccgaacaaaaacgtccgaacgacgacgatctcgaaacgcgaaacccgaaaccaaacaaaaatctccatatctaccaattaacgacgaaatcgaacgaattccgtaacgcccgtaaaactaaaaaaattaaactaaaaacgccctaaaccgaccaaaaaaaatacgaaaaaatacgaaaaactcgcaatcttaaaaaaccgataccccgcgcgctataaaaaaccgacgacgcgctctcccgcgcctctacccgcccccgacgcccgcccccgccgctcctcccgactccccgcccccgacccgaatcacttaccgtcgcgataaacgacccccgacgaatccacacccctaccccgcctcctcccgataaaaaactccgaaaccctacaaaaaataactcaccccaataattcaaccgcgccaccgaacgcgaaactaccctaaaaaacgcaaacgaatctaattacccgaatcccccaaaacccccgaattcacccaaacccgcgactccgacgtacaacttaaataaattacaaatctataacaaaa

SEQ ID NO: 33757 - DNA, 507 bp, Artificial Sequence
  chemically treated genomic DNA (Homo sapiens) CpG-island No: 33757
ttatcggttttgtaagggtcgtggtaatgttttagttgttgtttcgtgtttttttcgtcgtttagttttgagtagtttgcggtggcgttcgggcgtttttcgagtttttcggcgtcgcgaggtagcggtagtagtagtagtagtgatattagggttttaagtgtagtcgttcggggtatggtggcgcggggtcggttggggtagagggagttgcgtgtacgaaagtttagttcggtcgaaagacggcgtatattgggtcggtcggtttcggtcgggattcggtggttatatagggttgttgggtatggtttaggcgcggagtaagcggagcgcggcgttttttgttttcgtcgaggtaatcgggaagtagtcgttcggagttatttgttcggcggtcgaggttgcggcggttgcgagtgtggcggtggcggcggtggttggagtagtggtcgtttcgtttttttttattagggttggattatatagttttcgttcggggttttaagt

SEQ ID NO: 33758 - DNA, 507 bp, Artificial Sequence
  chemically treated genomic DNA (Homo sapiens) CpG-island No: 33758
acttaaaaccccgaacgaaaactatataatccaaccctaataaaaaaaaacgaaacgaccactactccaaccaccgccgccaccgccacactcgcaaccgccgcaacctcgaccgccgaacaaataactccgaacgactacttcccgattacctcgacgaaaacaaaaaacgccgcgctccgcttactccgcgcctaaaccatacccaacaaccctatataaccaccgaatcccgaccgaaaccgaccgacccaatatacgccgtctttcgaccgaactaaactttcgtacacgcaactccctctaccccaaccgaccccgcgccaccataccccgaacgactacacttaaaaccctaatatcactactactactactaccgctacctcgcgacgccgaaaaactcgaaaaacgcccgaacgccaccgcaaactactcaaaactaaacgacgaaaaaaacacgaaacaacaactaaaacattaccacgacccttacaaaaccgataa

SEQ ID NO: 33759 - DNA, 507 bp, Artificial Sequence
  chemically treated genomic DNA (Homo sapiens) CpG-island No: 33759
gtttagggtttcgggcgaaggttgtgtggtttagttttggtggagaggggcggagcggttattgttttaattatcgtcgttatcgttatattcgtagtcgtcgtagtttcggtcgtcgggtaagtagtttcgagcggttgtttttcggttgtttcgacgaagatagggggcgtcgcgtttcgtttgtttcgcgtttgagttatgtttagtagttttgtgtaattatcgagtttcggtcggagtcgatcgatttagtgtgcgtcgtttttcggtcgagttgagttttcgtgtacgtaattttttttgttttagtcggtttcgcgttattatgtttcgggcgattgtatttggggttttggtgttattgttgttgttgttgtcgttgtttcgcggcgtcgggggattcggggagcgttcggacgttatcgtagattatttagagttggacggcgaggagggtacggagtagtagttggagtattattacgatttttgtaaagtcggtag

SEQ ID NO: 33760 - DNA, 507 bp, Artificial Sequence
  chemically treated genomic DNA (Homo sapiens) CpG-island No: 33760
ctaccgactttacaaaaatcgtaataatactccaactactactccgtaccctcctcgccgtccaactctaaataatctacgataacgtccgaacgctccccgaatcccccgacgccgcgaaacaacgacaacaacaacaacaataacaccaaaaccccaaatacaatcgcccgaaacataataacgcgaaaccgactaaaacaaaaaaaattacgtacacgaaaactcaactcgaccgaaaaacgacgcacactaaatcgatcgactccgaccgaaactcgataattacacaaaactactaaacataactcaaacgcgaaacaaacgaaacgcgacgccccctatcttcgtcgaaacaaccgaaaaacaaccgctcgaaactacttacccgacgaccgaaactacgacgactacgaatataacgataacgacgataattaaaacaataaccgctccgcccctctccaccaaaactaaaccacacaaccttcgcccgaaaccctaaac

SEQ ID NO: 33761 - DNA, 569 bp, Artificial Sequence
  chemically treated genomic DNA (Homo sapiens) CpG-island No: 33761
ttcggtttttattgtttttggagtaatttgaatatattgcgaggtttatttgatacgtcgaatcgcggtttcgggaatttattttcgttgtaattatatagcggttatttttcgatttaagaacgcgaggaaaattatagagttattttcgacgcgttagtacgttttcgttattttcgatttggggcgtggtttcgggtgtcgttaaatatgcgggtaagtttcgtttattttttcgtttcggttcggttttttggttgttattaagatgttgtttgcggttttttgggaagtcgcgtggttggtttcgcgggaagatgtgacggtttcgttttttggttcgtagcgttagttttggtcggagaggcggtagagtagggtgggtgttttgttaggtttgagttagtttcgttatacggcgtttttcgttggtgtttttgtttcgttttgagtagattttttagattttatcgtcgtttttgcgttttattttagtaagttcgtttggtttgttttttttgtggggtcggtttagattaggtaaaaaataaaaagataattttatattg

SEQ ID NO: 33762 - DNA, 569 bp, Artificial Sequence
  chemically treated genomic DNA (Homo sapiens) CpG-island No: 33762
caatataaaattatctttttattttttacctaatctaaaccgaccccacaaaaaaaacaaaccaaacgaacttactaaaataaaacgcaaaaacgacgataaaatctaaaaaatctactcaaaacgaaacaaaaacaccaacgaaaaacgccgtataacgaaactaactcaaacctaacaaaacacccaccctactctaccgcctctccgaccaaaactaacgctacgaaccaaaaaacgaaaccgtcacatcttcccgcgaaaccaaccacgcgacttcccaaaaaaccgcaaacaacatcttaataacaaccaaaaaaccgaaccgaaacgaaaaaataaacgaaacttacccgcatatttaacgacacccgaaaccacgccccaaatcgaaaataacgaaaacgtactaacgcgtcgaaaataactctataattttcctcgcgttcttaaatcgaaaaataaccgctatataattacaacgaaaataaattcccgaaaccgcgattcgacgtatcaaataaacctcgcaatatattcaaattactccaaaaacaataaaaaccgaa

SEQ ID NO: 33763 - DNA, 569 bp, Artificial Sequence
  chemically treated genomic DNA (Homo sapiens) CpG-island No: 33763
tagtgtgggattgtttttttgttttttgtttggtttgagtcggttttatagaaagaatagattagacgagtttattgaggtaaaacgtaggggcggcggtgaggtttagggggtttatttagaacgaggtagagatattagcgaaaagcgtcgtatggcgaagttaatttaggtttgataaaatatttattttattttatcgttttttcggttaaggttgacgttacgggttagagggcggagtcgttatattttttcgcgagattagttacgcgattttttagaaggtcgtaggtaatattttaatagtagttaggaagtcggatcggagcggaagggtgggcggggtttgttcgtatatttagcggtattcgaggttacgttttagatcggaagtgacggagacgtgttagcgcgtcgaaggtagttttatggtttttttcgcgtttttgagtcgggaaatggtcgttgtgtggttgtaacggagataaattttcggaatcgcgattcggcgtgttaggtaggtttcgtaatgtatttaagttattttaggggtagtgaagatcgag

SEQ ID NO: 33764 - DNA, 569 bp, Artificial Sequence
  chemically treated genomic DNA (Homo sapiens) CpG-island No: 33764
ctcgatcttcactacccctaaaataacttaaatacattacgaaacctacctaacacgccgaatcgcgattccgaaaatttatctccgttacaaccacacaacgaccatttcccgactcaaaaacgcgaaaaaaaccataaaactaccttcgacgcgctaacacgtctccgtcacttccgatctaaaacgtaacctcgaataccgctaaatatacgaacaaaccccgcccacccttccgctccgatccgacttcctaactactattaaaatattacctacgaccttctaaaaaatcgcgtaactaatctcgcgaaaaaatataacgactccgccctctaacccgtaacgtcaaccttaaccgaaaaaacgataaaataaaataaatattttatcaaacctaaattaacttcgccatacgacgcttttcgctaatatctctacctcgttctaaataaaccccctaaacctcaccgccgcccctacgttttacctcaataaactcgtctaatctattctttctataaaaccgactcaaaccaaacaaaaaacaaaaaaacaatcccacacta

SEQ ID NO: 33765 - DNA, 1253 bp, Artificial Sequence
  chemically treated genomic DNA (Homo sapiens) CpG-island No: 33765
  unsure (946, 1148)
cggagagaaagaaaatatttatatataacgcgggcgagcgaggggaggataagatttgttgacgtagcgatatcgaatagaaagagcgtcgggatagtttacgtatacgtaacgagcgatattacgataatttcgcggcggaatcgataaacggaagttagcgttattcgaaacgaataatagacgagatagttatattataatttttaagaatagattcgtcgcgtttaatatcgagtcgcgcgtatagttaatagtaatagagtttcggacgattaacgattcgtcgcgaaagggtatcggtattagcgggacggcgaattattaatcgttttttatcgttagtagtaaacgcgtataaggagaggatttttagtaatagagatttaagtagtcgagcggcggcggacgttaggttcggggcgacgtatgaggcggagtagaagaattaatatcgtttttaaatcgaggtagatttttttcggggcggcgggggttaattaatagcggttcgatttagcgaatacgggtcgatagttttatagttagtttatatgggattagggggagacggggaagatcgtagaggttcgatagttcggcgagttacgatagtcgataaggataagtattcgtttgtcggtagttcgattagcgatttattcgcgaaggcgtaaggtattcggacgattattcgtaaaggtagtaagttaagcgtggaacgaaataaacgaaaggtacgatcgatttatcgagttataggaatacgatcgtatgaggggagtaagacgcgagtgatatcggatagaattaacggagttataggtagggacgagttagacgggataattagttacggattagtggaaggtttcggtatagcggggatttttaaagattagatgatgtgatcggagtcgtagaagatcgtttacgtagggttttntagcggcgtgttacgtatatatatacggtcgagaatcggatcgaggggtatgcggcgcgaatcgcgtacgacgagcgtcgagaagcgagtgcgacgagtaaggagtgtaatacgtaagtcgtcggatttgtggtacgataagataagtcgtatagtagtggcggggttaatatattaaagaatacgcggagtagaggtcganaatattagttatagtagtcgaggcgcgtcgttattaagagtagtatatggggaggtggagacggatacgtagcgtacgacgtgcgggtataatagacgaatcgta

SEQ ID NO: 33766 - DNA, 1253 bp, Artificial Sequence
  chemically treated genomic DNA (Homo sapiens) CpG-island No: 33766
  unsure (106, 308)
tacgattcgtctattatacccgcacgtcgtacgctacgtatccgtctccacctccccatatactactcttaataacgacgcgcctcgactactataactaatattntcgacctctactccgcgtattctttaatatattaaccccgccactactatacgacttatcttatcgtaccacaaatccgacgacttacgtattacactccttactcgtcgcactcgcttctcgacgctcgtcgtacgcgattcgcgccgcatacccctcgatccgattctcgaccgtatatatatacgtaacacgccgctanaaaaccctacgtaaacgatcttctacgactccgatcacatcatctaatctttaaaaatccccgctataccgaaaccttccactaatccgtaactaattatcccgtctaactcgtccctacctataactccgttaattctatccgatatcactcgcgtcttactcccctcatacgatcgtattcctataactcgataaatcgatcgtacctttcgtttatttcgttccacgcttaacttactacctttacgaataatcgtccgaataccttacgccttcgcgaataaatcgctaatcgaactaccgacaaacgaatacttatccttatcgactatcgtaactcgccgaactatcgaacctctacgatcttccccgtctccccctaatcccatataaactaactataaaactatcgacccgtattcgctaaatcgaaccgctattaattaacccccgccgccccgaaaaaaatctacctcgatttaaaaacgatattaattcttctactccgcctcatacgtcgccccgaacctaacgtccgccgccgctcgactacttaaatctctattactaaaaatcctctccttatacgcgtttactactaacgataaaaaacgattaataattcgccgtcccgctaataccgataccctttcgcgacgaatcgttaatcgtccgaaactctattactattaactatacgcgcgactcgatattaaacgcgacgaatctattcttaaaaattataatataactatctcgtctattattcgtttcgaataacgctaacttccgtttatcgattccgccgcgaaattatcgtaatatcgctcgttacgtatacgtaaactatcccgacgctctttctattcgatatcgctacgtcaacaaatcttatcctcccctcgctcgcccgcgttatatataaatattttctttctctccg

SEQ ID NO: 33767 - DNA, 1253 bp, Artificial Sequence
  chemically treated genomic DNA (Homo sapiens) CpG-island No: 33767
  unsure (106, 308)
tacggttcgtttattgtgttcgtacgtcgtgcgttgcgtgttcgtttttatttttttatatgttgtttttaatggcgacgcgtttcggttgttataattaatattntcgatttttgtttcgcgtattttttagtgtgttggtttcgttattgttgtgcggtttattttgtcgtgttataagttcggcgatttacgtattgtattttttgttcgtcgtattcgtttttcgacgttcgtcgtacgcgattcgcgtcgtatatttttcggttcggttttcggtcgtatgtatatgcgtggtacgtcgttgnggggttttacgtaaacggttttttacggtttcggttatattatttggtttttgggggttttcgttgtgtcggggttttttattagttcgtagttagttatttcgtttggttcgtttttatttatggtttcgttgattttattcgatattattcgcgttttgttttttttatgcggtcgtgtttttatggttcggtagatcgatcgtgtttttcgtttgtttcgttttacgtttggtttgttgtttttgcgggtgatcgttcgggtgttttgcgttttcgcgggtgggtcgttggtcgggttgtcggtaggcgggtgtttgtttttgtcggttgtcgtggttcgtcgggttgtcgggtttttgcggtttttttcgtttttttttggttttatgtgggttggttgtggagttgtcggttcgtattcgttaggtcgggtcgttgttggttggttttcgtcgtttcggggggggtttatttcggtttgggggcggtgttggtttttttatttcgttttatgcgtcgtttcgggtttggcgttcgtcgtcgttcggttgtttgagtttttgttattgggggttttttttttgtgcgcgtttgttgttggcggtggggggcggttagtgattcgtcgtttcgttggtgtcgatgttttttcgcggcgggtcgttggtcgttcggggttttgttgttgttggttatgcgcgcggttcggtattgggcgcggcgagtttgtttttgggggttatgatgtggttgtttcgtttgttgttcgtttcgggtggcgttggttttcgtttgtcgatttcgtcgcggagttgtcgtaatgtcgttcgttacgtatgcgtgggttgtttcggcgttttttttattcggtatcgttgcgttaataaattttgtttttttttcgttcgttcgcgttgtgtgtgggtgtttttttttttttcg

SEQ ID NO: 33768 - DNA, 1253 bp, Artificial Sequence
  chemically treated genomic DNA (Homo sapiens) CpG-island No: 33768
  unsure (946, 1148)
cgaaaaaaaaaaaaacacccacacacaacgcgaacgaacgaaaaaaaaacaaaatttattaacgcaacgataccgaataaaaaaaacgccgaaacaacccacgcatacgtaacgaacgacattacgacaactccgcgacgaaatcgacaaacgaaaaccaacgccacccgaaacgaacaacaaacgaaacaaccacatcataacccccaaaaacaaactcgccgcgcccaataccgaaccgcgcgcataaccaacaacaacaaaaccccgaacgaccaacgacccgccgcgaaaaaacatcgacaccaacgaaacgacgaatcactaaccgccccccaccgccaacaacaaacgcgcacaaaaaaaaaacccccaataacaaaaactcaaacaaccgaacgacgacgaacgccaaacccgaaacgacgcataaaacgaaataaaaaaaccaacaccgcccccaaaccgaaataaaccccccccgaaacgacgaaaaccaaccaacaacgacccgacctaacgaatacgaaccgacaactccacaaccaacccacataaaaccaaaaaaaaacgaaaaaaaccgcaaaaacccgacaacccgacgaaccacgacaaccgacaaaaacaaacacccgcctaccgacaacccgaccaacgacccacccgcgaaaacgcaaaacacccgaacgatcacccgcaaaaacaacaaaccaaacgtaaaacgaaacaaacgaaaaacacgatcgatctaccgaaccataaaaacacgaccgcataaaaaaaacaaaacgcgaataatatcgaataaaatcaacgaaaccataaataaaaacgaaccaaacgaaataactaactacgaactaataaaaaaccccgacacaacgaaaacccccaaaaaccaaataatataaccgaaaccgtaaaaaaccgtttacgtaaaaccccncaacgacgtaccacgcatatacatacgaccgaaaaccgaaccgaaaaatatacgacgcgaatcgcgtacgacgaacgtcgaaaaacgaatacgacgaacaaaaaatacaatacgtaaatcgccgaacttataacacgacaaaataaaccgcacaacaataacgaaaccaacacactaaaaaatacgcgaaacaaaaatcganaatattaattataacaaccgaaacgcgtcgccattaaaaacaacatataaaaaaataaaaacgaacacgcaacgcacgacgtacgaacacaataaacgaaccgta

SEQ ID NO: 33769 - DNA, 713 bp, Artificial Sequence
  chemically treated genomic DNA (Homo sapiens) CpG-island No: 33769
ggcgggggtgcggcgcgcgttttttttcgcgtttcgttcgtcggtgtttcgttcggcgtcgcgttcgggtcggcgcggtcgcggttcggcgcgtgtcgcgttcgttttttttcgttcgttttcgcgcgcgtcggcggtggttgcgcgttgcggtttttcgcggtttcgtcggcgcgggtgcggtcggcgcggcgtcggcgggcggcgtcggggggggcgtcgcgcgtcggtcgcgtcgcgcgcggtcggggcgcgttcgggttcgggcgcggttttgcgcggtcgcgtcgcggtttcgtcggtcgtcggtcggggcgcggtcggtggcgtcgcgtcgcggcgggggcggcgtcgtcgcggggcgcgcggtcgttcgggtcgggcggggcgttcggttcgcggtcggcgcgggcgcggtcgcgtcgcgcggtcgtcggtcgcgggcggggggttcgtcgggcgcggcgggttcgcgcgttcgggcggtttggcgcgtgggggcgggggttcggcgcggggcgcgtcgcgtggcgcgcggttcgcgtttcgtcggtcggtttcgttcgtttcggcgcgtcgcggggcgcgcgtcgcgcggtgtgtcggcgcgcggcgcggcgcgcggggcggtcgttttgcggttcggggtgggtgggggtggggcggcgggtttttggggcggggcggggtttgcgtcgtgcgcgggcgcgcgt

SEQ ID NO: 33770 - DNA, 713 bp, Artificial Sequence
  chemically treated genomic DNA (Homo sapiens) CpG-island No: 33770
acgcgcgcccgcgcacgacgcaaaccccgccccgccccaaaaacccgccgccccacccccacccaccccgaaccgcaaaacgaccgccccgcgcgccgcgccgcgcgccgacacaccgcgcgacgcgcgccccgcgacgcgccgaaacgaacgaaaccgaccgacgaaacgcgaaccgcgcgccacgcgacgcgccccgcgccgaacccccgcccccacgcgccaaaccgcccgaacgcgcgaacccgccgcgcccgacgaaccccccgcccgcgaccgacgaccgcgcgacgcgaccgcgcccgcgccgaccgcgaaccgaacgccccgcccgacccgaacgaccgcgcgccccgcgacgacgccgcccccgccgcgacgcgacgccaccgaccgcgccccgaccgacgaccgacgaaaccgcgacgcgaccgcgcaaaaccgcgcccgaacccgaacgcgccccgaccgcgcgcgacgcgaccgacgcgcgacgccccccccgacgccgcccgccgacgccgcgccgaccgcacccgcgccgacgaaaccgcgaaaaaccgcaacgcgcaaccaccgccgacgcgcgcgaaaacgaacgaaaaaaaacgaacgcgacacgcgccgaaccgcgaccgcgccgacccgaacgcgacgccgaacgaaacaccgacgaacgaaacgcgaaaaaaaacgcgcgccgcacccccgcc

SEQ ID NO: 33771 - DNA, 713 bp, Artificial Sequence
  chemically treated genomic DNA (Homo sapiens) CpG-island No: 33771
gcgcgcgttcgcgtacgacgtagatttcgtttcgttttagaaattcgtcgttttatttttatttatttcggatcgtagggcggtcgtttcgcgcgtcgcgtcgcgcgtcggtatatcgcgcggcgcgcgtttcgcggcgcgtcggggcgggcgagatcggtcggcggggcgcgagtcgcgcgttacgcggcgcgtttcgcgtcgggttttcgtttttacgcgttaggtcgttcgagcgcgcgggttcgtcgcgttcggcgagtttttcgttcgcggtcgacgatcgcgcgacgcggtcgcgttcgcgtcggtcgcgggtcgggcgtttcgttcggttcgggcggtcgcgcgtttcgcggcggcgtcgttttcgtcgcggcgcgacgttatcggtcgcgtttcggtcggcggtcggcggggtcgcggcgcggtcgcgtagggtcgcgttcggattcgagcgcgtttcggtcgcgcgcggcgcggtcggcgcgcggcgtttttttcggcgtcgttcgtcggcgtcgcgtcggtcgtattcgcgtcggcggggtcgcggggggtcgtagcgcgtagttatcgtcggcgcgcgcgggggcgagcgggggggagcgagcgcggtacgcgtcgggtcgcggtcgcgtcggttcgggcgcggcgtcgggcgaggtatcggcgggcggggcgcggggggaggcgcgcgtcgtattttcgtt

SEQ ID NO: 33772 - DNA, 713 bp, Artificial Sequence
  chemically treated genomic DNA (Homo sapiens) CpG-island No: 33772
aacgaaaatacgacgcgcgcctccccccgcgccccgcccgccgatacctcgcccgacgccgcgcccgaaccgacgcgaccgcgacccgacgcgtaccgcgctcgctcccccccgctcgcccccgcgcgcgccgacgataactacgcgctacgaccccccgcgaccccgccgacgcgaatacgaccgacgcgacgccgacgaacgacgccgaaaaaaacgccgcgcgccgaccgcgccgcgcgcgaccgaaacgcgctcgaatccgaacgcgaccctacgcgaccgcgccgcgaccccgccgaccgccgaccgaaacgcgaccgataacgtcgcgccgcgacgaaaacgacgccgccgcgaaacgcgcgaccgcccgaaccgaacgaaacgcccgacccgcgaccgacgcgaacgcgaccgcgtcgcgcgatcgtcgaccgcgaacgaaaaactcgccgaacgcgacgaacccgcgcgctcgaacgacctaacgcgtaaaaacgaaaacccgacgcgaaacgcgccgcgtaacgcgcgactcgcgccccgccgaccgatctcgcccgccccgacgcgccgcgaaacgcgcgccgcgcgatataccgacgcgcgacgcgacgcgcgaaacgaccgccctacgatccgaaataaataaaaataaaacgacgaatttctaaaacgaaacgaaatctacgtcgtacgcgaacgcgcgc

SEQ ID NO: 33773 - DNA, 1153 bp, Artificial Sequence
  chemically treated genomic DNA (Homo sapiens) CpG-island No: 33773
gcgtttgtaggtagggtatgtgtacgcgtgcgtgtgtacgtgtgtgtgtatttgtgtgtgtgtgtgcgcgcgcgtgtgcgtgtgtgtgttcgtttttagatggttgtatgtacggatggttatgagttagtacgtcgtcgttgtgagcgcgcgaggattcggggttttaagtggtgagaattattcgagggatttttcggatgtttttttttttttttgtttttgagttttgtagtatagcggtgtcggtcgtcggtagggaaggttgtattttttttgcgtcgttaaatcgtgtttattatcgcggtgattgtcgtttaggtcgtatttttgagtcgtattcgcgcgtaggggcgtacgggtacgcgtatagggaggtcgtatatatatatatatatttgtatagggacgagtcgggggtttttgacgttcgtcgtttatttcgtttcggtttggagttttttggtttcgtaggtgtagcgacgtttagttttcgtgcggttagcgcgtcgcgtcggcggattttgtagtttagagagtttagggagtttagggaggggagcgtttcgcgggcggggtagtgtcgtataatcgtaggcgcgtttcgcgtcgttttcgtttcgggtttattttttttcgtcgcgttttttttagtttatttacggacgagcggattttcgattttcgcggtagggatattttaagagttttgtttaggtttgcgtcgtttagtatttcgttcgtgtcgggggttcggcggtttcgggcgagagacggaggttacgcgtagggttgggcgtaggggtcgtcgttcgaggattatgggtgggttagcgtttcgtcgggttgttagttggcggggatcgtcggcgtttgtgtcgggtcgcgttcgaggttgcgtcgttcgtgtcgtagcggttaatgcggtagtattcgcgaacgttatcgcggcgggtttcgttggttcgggttgcggcgtgggggcgggggatcggttttgagcggagtttcgcgggaggaggagcggacgggaggttgggagggattcgtaatattacgtaggatcggggtttttaggtgtcggggaaggcgatggggagggtttggtggggtgggagattgggtttgtattttcgggggtttttttaggaga

SEQ ID NO: 33774 - DNA, 1153 bp, Artificial Sequence
  chemically treated genomic DNA (Homo sapiens) CpG-island No: 33774
tctcctaaaaaaacccccgaaaatacaaacccaatctcccaccccaccaaaccctccccatcgccttccccgacacctaaaaaccccgatcctacgtaatattacgaatccctcccaacctcccgtccgctcctcctcccgcgaaactccgctcaaaaccgatcccccgcccccacgccgcaacccgaaccaacgaaacccgccgcgataacgttcgcgaatactaccgcattaaccgctacgacacgaacgacgcaacctcgaacgcgacccgacacaaacgccgacgatccccgccaactaacaacccgacgaaacgctaacccacccataatcctcgaacgacgacccctacgcccaaccctacgcgtaacctccgtctctcgcccgaaaccgccgaacccccgacacgaacgaaatactaaacgacgcaaacctaaacaaaactcttaaaatatccctaccgcgaaaatcgaaaatccgctcgtccgtaaataaactaaaaaaaacgcgacgaaaaaaaataaacccgaaacgaaaacgacgcgaaacgcgcctacgattatacgacactaccccgcccgcgaaacgctcccctccctaaactccctaaactctctaaactacaaaatccgccgacgcgacgcgctaaccgcacgaaaactaaacgtcgctacacctacgaaaccaaaaaactccaaaccgaaacgaaataaacgacgaacgtcaaaaacccccgactcgtccctatacaaatatatatatatatatacgacctccctatacgcgtacccgtacgcccctacgcgcgaatacgactcaaaaatacgacctaaacgacaatcaccgcgataataaacacgatttaacgacgcaaaaaaaatacaaccttccctaccgacgaccgacaccgctatactacaaaactcaaaaacaaaaaaaaaaaaaaacatccgaaaaatccctcgaataattctcaccacttaaaaccccgaatcctcgcgcgctcacaacgacgacgtactaactcataaccatccgtacatacaaccatctaaaaacgaacacacacacgcacacgcgcgcgcacacacacacacaaatacacacacacgtacacacgcacgcgtacacataccctacctacaaacgc

SEQ ID NO: 33775 - DNA, 1153 bp, Artificial Sequence
  chemically treated genomic DNA (Homo sapiens) CpG-island No: 33775
ttttttggaagagttttcgaaagtataggtttaattttttattttattaagttttttttatcgtttttttcgatatttaaaagtttcggttttgcgtaatattgcggattttttttagtttttcgttcgttttttttttcgcggggtttcgtttagggtcggtttttcgtttttacgtcgtagttcgggttagcggggttcgtcgcggtggcgttcgcggatgttgtcgtattggtcgttgcggtacggacggcgtagtttcgggcgcggttcggtataggcgtcggcggttttcgttagttagtagttcggcgaggcgttggtttatttatggttttcgggcggcggtttttgcgtttagttttgcgcgtagttttcgtttttcgttcggggtcgtcgagttttcgatacgggcgagatgttgaacggcgtaggtttggataaagtttttaagatgtttttgtcgcggaggtcgaggattcgttcgttcgtgggtgagttgggaggggcgcggcgagggagggtgggttcggggcgggggcggcgcggggcgcgtttgcggttatgcgatattgtttcgttcgcgaaacgtttttttttttgggttttttgggttttttgggttgtaggattcgtcgacgcggcgcgttggtcgtacgggggttgggcgtcgttgtatttgcggggttaaaaggttttaggtcggggcgaggtgagcggcgggcgttagagattttcggttcgtttttgtatagatgtgtgtgtgtgtgtgcggtttttttgtgcgcgtgttcgtgcgtttttacgcgcggatgcggtttagggatgcgatttaggcggtagttatcgcgatggtgggtacggtttggcggcgtagagaagatgtagttttttttgtcggcggtcggtatcgttgtgttgtagagtttaaaagtagagggggaaaaaggtattcgaagggtttttcgagtgatttttattatttggagtttcgggttttcgcgcgtttatagcggcgacgtattggtttataattattcgtgtatataattatttggagacgaatatatatacgtatacgcgcgcgtatatatatatataggtatatatatacgtatatacgtacgcgtatatatattttgtttgtaggcgt

SEQ ID NO: 33776 - DNA, 1153 bp, Artificial Sequence
  chemically treated genomic DNA (Homo sapiens) CpG-island No: 33776
acgcctacaaacaaaatatatatacgcgtacgtatatacgtatatatatacctatatatatatatacgcgcgcgtatacgtatatatattcgtctccaaataattatatacacgaataattataaaccaatacgtcgccgctataaacgcgcgaaaacccgaaactccaaataataaaaatcactcgaaaaacccttcgaatacctttttccccctctacttttaaactctacaacacaacgataccgaccgccgacaaaaaaaactacatcttctctacgccgccaaaccgtacccaccatcgcgataactaccgcctaaatcgcatccctaaaccgcatccgcgcgtaaaaacgcacgaacacgcgcacaaaaaaaccgcacacacacacacacatctatacaaaaacgaaccgaaaatctctaacgcccgccgctcacctcgccccgacctaaaaccttttaaccccgcaaatacaacgacgcccaacccccgtacgaccaacgcgccgcgtcgacgaatcctacaacccaaaaaacccaaaaaacccaaaaaaaaaaacgtttcgcgaacgaaacaatatcgcataaccgcaaacgcgccccgcgccgcccccgccccgaacccaccctccctcgccgcgcccctcccaactcacccacgaacgaacgaatcctcgacctccgcgacaaaaacatcttaaaaactttatccaaacctacgccgttcaacatctcgcccgtatcgaaaactcgacgaccccgaacgaaaaacgaaaactacgcgcaaaactaaacgcaaaaaccgccgcccgaaaaccataaataaaccaacgcctcgccgaactactaactaacgaaaaccgccgacgcctataccgaaccgcgcccgaaactacgccgtccgtaccgcaacgaccaatacgacaacatccgcgaacgccaccgcgacgaaccccgctaacccgaactacgacgtaaaaacgaaaaaccgaccctaaacgaaaccccgcgaaaaaaaaaacgaacgaaaaactaaaaaaaatccgcaatattacgcaaaaccgaaacttttaaatatcgaaaaaaacgataaaaaaaacttaataaaataaaaaattaaacctatactttcgaaaactcttccaaaaaa

SEQ ID NO: 33777 - DNA, 688 bp, Artificial Sequence
  chemically treated genomic DNA (Homo sapiens) CpG-island No: 33777
tcgtcgcgttagttttcgcggaggtttagcgggcgtttttgttttttttcgggtcggaattcgggaagggttggcgtcgagttggtcgtttatttttaggggttagggtacgtttcgaaggttttgcggaggggcgcgcggatatcgggatcgtagttttcgttttcgggggtcgaataggagtcgcggggtttcgagggtcgtttcgtcggttttcgtttagtttttcgttcggcgcggggcgcgtaggacggcggagcgcgggcggaaggtaggggggcgggatcgtcgtcgtcgttattcgcgttgttgtaaagttttttcggtggtatagtttttgcgcgttttttgtgggggcggttgttgcgttttcgtcgtttcgtcgttcgtcggttcggggcggtagaggttgggagacgcgagtttggggtcggggcggtagcggggatttaagatcgaaaggggtcgagcgggtacgtttcgggtttcgggttcgggttttatttgggcgtcgcgagagggcgttgttgacggcgcggcgcggcggtgatcggacggcgggacgcgcgcgtcggcggggtagggttgggtcgttttgtttttttttgttcgcgtcgatcgtggtacggtcgattgtgtttattaattttacgttttttatttttatatttgatttttttttattgtt

SEQ ID NO: 33778 - DNA, 688 bp, Artificial Sequence
  chemically treated genomic DNA (Homo sapiens) CpG-island No: 33778
aacaataaaaaaaaatcaaatataaaaataaaaaacgtaaaattaataaacacaatcgaccgtaccacgatcgacgcgaacaaaaaaaaacaaaacgacccaaccctaccccgccgacgcgcgcgtcccgccgtccgatcaccgccgcgccgcgccgtcaacaacgccctctcgcgacgcccaaataaaacccgaacccgaaacccgaaacgtacccgctcgacccctttcgatcttaaatccccgctaccgccccgaccccaaactcgcgtctcccaacctctaccgccccgaaccgacgaacgacgaaacgacgaaaacgcaacaaccgcccccacaaaaaacgcgcaaaaactataccaccgaaaaaactttacaacaacgcgaataacgacgacgacgatcccgcccccctaccttccgcccgcgctccgccgtcctacgcgccccgcgccgaacgaaaaactaaacgaaaaccgacgaaacgaccctcgaaaccccgcgactcctattcgacccccgaaaacgaaaactacgatcccgatatccgcgcgcccctccgcaaaaccttcgaaacgtaccctaacccctaaaaataaacgaccaactcgacgccaacccttcccgaattccgacccgaaaaaaaacaaaaacgcccgctaaacctccgcgaaaactaacgcgacga

SEQ ID NO: 33779 - DNA, 688 bp, Artificial Sequence
  chemically treated genomic DNA (Homo sapiens) CpG-island No: 33779
aataataagaaagaattaagtgtgaaagtaaaagacgtggagttaatggatatagtcgatcgtgttacggtcggcgcgggtagggaggagtaggacggtttagttttgtttcgtcggcgcgcgcgtttcgtcgttcggttatcgtcgcgtcgcgtcgttagtagcgttttttcgcggcgtttaggtgggattcgggttcgggattcgaggcgtgttcgttcggtttttttcggttttgggttttcgttgtcgtttcggttttagattcgcgttttttagtttttgtcgtttcgaatcggcgggcgacggggcggcgagggcgtagtagtcgtttttataggaagcgcgtaggaattgtgttatcgaagaaattttgtaatagcgcgagtggcggcggcggcggtttcgtttttttgtttttcgttcgcgtttcgtcgttttgcgcgtttcgcgtcgggcgggaggttggacgggagtcggcgaggcggttttcgaggtttcgcggtttttgttcgattttcgggggcgaggattgcggtttcggtgttcgcgcgttttttcgtagggttttcgggacgtgttttggtttttgaggataagcggttagttcggcgttagtttttttcggatttcgattcggaggaggataggggcgttcgttgggttttcgcgggagttggcgcggcgg

SEQ ID NO: 33780 - DNA, 688 bp, Artificial Sequence
  chemically treated genomic DNA (Homo sapiens) CpG-island No: 33780
ccgccgcgccaactcccgcgaaaacccaacgaacgcccctatcctcctccgaatcgaaatccgaaaaaaactaacgccgaactaaccgcttatcctcaaaaaccaaaacacgtcccgaaaaccctacgaaaaaacgcgcgaacaccgaaaccgcaatcctcgcccccgaaaatcgaacaaaaaccgcgaaacctcgaaaaccgcctcgccgactcccgtccaacctcccgcccgacgcgaaacgcgcaaaacgacgaaacgcgaacgaaaaacaaaaaaacgaaaccgccgccgccgccactcgcgctattacaaaatttcttcgataacacaattcctacgcgcttcctataaaaacgactactacgccctcgccgccccgtcgcccgccgattcgaaacgacaaaaactaaaaaacgcgaatctaaaaccgaaacgacaacgaaaacccaaaaccgaaaaaaaccgaacgaacacgcctcgaatcccgaacccgaatcccacctaaacgccgcgaaaaaacgctactaacgacgcgacgcgacgataaccgaacgacgaaacgcgcgcgccgacgaaacaaaactaaaccgtcctactcctccctacccgcgccgaccgtaacacgatcgactatatccattaactccacgtcttttactttcacacttaattctttcttattatt

SEQ ID NO: 33781 - DNA, 615 bp, Artificial Sequence
  chemically treated genomic DNA (Homo sapiens) CpG-island No: 33781
gattcggtacggagcgtaggggtattagggaggataggggcgtatttcgagttatttgtgtcggttttcgagttcgcgtgtaatagtttgattttcggtcgttgtttgtcgttattcggtttgcgttgtattatttgtcgtaggagtagtcgtatgcgtcgcgaggtcgggtcgtcgtggttttcgggtgtttcgaggagtagaagtcgggattgtatggcgtcgggggggttgtcggggacggcgagggggttcggggatcgagcggcgtttcgtgtaggtatcgtgaggtagcgcggagaaggggataggaagcggtatttagtcgagttcgtcggaaattttttttttcgcggcgcggtcggtttagtagatttagttcggttttattcggttttgtatggtttagacgggcggaaagagtttgcggagttttagtttaaagagtcggtatcgtttcgggattgttcgtatcgcgggggtgtttcgagttgcggcgttgggttttggtaagcgtttcgtagttcgtgagattgtttgtttatttggatgtattaggtttttattcgtcgtttttttgcgattttatagaattttaggagtttagtaaatgtt

SEQ ID NO: 33782 - DNA, 615 bp, Artificial Sequence
  chemically treated genomic DNA (Homo sapiens) CpG-island No: 33782
aacatttactaaactcctaaaattctataaaatcgcaaaaaaacgacgaataaaaacctaatacatccaaataaacaaacaatctcacgaactacgaaacgcttaccaaaacccaacgccgcaactcgaaacacccccgcgatacgaacaatcccgaaacgataccgactctttaaactaaaactccgcaaactctttccgcccgtctaaaccatacaaaaccgaataaaaccgaactaaatctactaaaccgaccgcgccgcgaaaaaaaaaatttccgacgaactcgactaaataccgcttcctatccccttctccgcgctacctcacgatacctacacgaaacgccgctcgatccccgaaccccctcgccgtccccgacaacccccccgacgccatacaatcccgacttctactcctcgaaacacccgaaaaccacgacgacccgacctcgcgacgcatacgactactcctacgacaaataatacaacgcaaaccgaataacgacaaacaacgaccgaaaatcaaactattacacgcgaactcgaaaaccgacacaaataactcgaaatacgcccctatcctccctaatacccctacgctccgtaccgaatc

SEQ ID NO: 33783 - DNA, 615 bp, Artificial Sequence
  chemically treated genomic DNA (Homo sapiens) CpG-island No: 33783
ggtatttattgaatttttgagattttgtgggatcgtagggaaacggcgggtgaaggtttggtgtatttaggtgaatagatagttttacggattgcgaggcgtttgttagagtttagcgtcgtagttcggagtattttcgcggtgcgggtagtttcgggacggtgtcggttttttgggttggagtttcgtaggtttttttcgttcgtttgggttatgtagggtcgggtagggtcgggttgagtttattgagtcggtcgcgtcgcgggggaaggagttttcggcggattcggttaggtgtcgttttttgttttttttttcgcgttgttttacggtgtttgtacgggacgtcgttcgattttcgagttttttcgtcgttttcgatagttttttcggcgttatgtaatttcggtttttatttttcggggtattcggaggttacggcggttcggtttcgcggcgtatgcggttgtttttgcggtaggtggtgtagcgtaggtcgggtggcgataggtagcggtcggaggttagattgttgtacgcgggttcgggggtcgatataggtaattcggggtgcgtttttgttttttttggtgtttttgcgtttcgtgtcgggtt

SEQ ID NO: 33784 - DNA, 615 bp, Artificial Sequence
  chemically treated genomic DNA (Homo sapiens) CpG-island No: 33784
aacccgacacgaaacgcaaaaacaccaaaaaaaacaaaaacgcaccccgaattacctatatcgacccccgaacccgcgtacaacaatctaacctccgaccgctacctatcgccacccgacctacgctacaccacctaccgcaaaaacaaccgcatacgccgcgaaaccgaaccgccgtaacctccgaataccccgaaaaataaaaaccgaaattacataacgccgaaaaaactatcgaaaacgacgaaaaaactcgaaaatcgaacgacgtcccgtacaaacaccgtaaaacaacgcgaaaaaaaaaacaaaaaacgacacctaaccgaatccgccgaaaactccttcccccgcgacgcgaccgactcaataaactcaacccgaccctacccgaccctacataacccaaacgaacgaaaaaaacctacgaaactccaacccaaaaaaccgacaccgtcccgaaactacccgcaccgcgaaaatactccgaactacgacgctaaactctaacaaacgcctcgcaatccgtaaaactatctattcacctaaatacaccaaaccttcacccgccgtttccctacgatcccacaaaatctcaaaaattcaataaatacc

SEQ ID NO: 33785 - DNA, 902 bp, Artificial Sequence
  chemically treated genomic DNA (Homo sapiens) CpG-island No: 33785
aggaaggcgggagcgtcgcggggtgaatagacgttgaggaaggcgggagcgcggcggggtgaatagacgttaatgtttgttgtagcgcggcggggtgaatagacgttgacgaaggcgggagcgcggcggggtgaatagacgttgacgaaggcgggagcgcggcggggtgaagagacgttgacgaaggcgggagcgcggcggggtgaagagacgttgacgaaggcgggagcgcggcggggtgaagagacgttgacgaaggcgggagcgcggcggggtgaagagacgttgacgaaggcgggagcgcggcggggtgaagagacgttgacgaaggcgggagcgcggcggggtgaagagacgttgacgaaggcgggagcggggcgggtgaatagacgttgacgaaggcgggagcggggcggggtgaatagacgttaaggaaggcgggagcgcggcggggtgaatagacgttaatgaaggcgggagcgcggcggggtgaatagacgttgataaaggcgggagcgcggcggggtgaatagacgttgacgaaggcgggagcgcggcggggtgaatagacgttgacgaaggcgggagcgcggcggggtgaatagacgttgacgaaggcgggagcgcggcggggtgaatagacgttgacgaaggcgggagcgcggcggggtgaatagacgttgacgaaggcgggagcgcggcggggtgaatagacgttgacgaaggcgggagcgcggcggggtgaatagacgttgacgaaggcgggagagcggcggggtgaatagacgtttaggaaggcgggagcgcggcggggtgaagagacgttaacgaaggcgggagcgtggcggggtgaatagatgttgacgaaggcgggagcgcggcggggtgaatagatgtttagg

SEQ ID NO: 33786 - DNA, 902 bp, Artificial Sequence
  chemically treated genomic DNA (Homo sapiens) CpG-island No: 33786
cctaaacatctattcaccccgccgcgctcccgccttcgtcaacatctattcaccccgccacgctcccgccttcgttaacgtctcttcaccccgccgcgctcccgccttcctaaacgtctattcaccccgccgctctcccgccttcgtcaacgtctattcaccccgccgcgctcccgccttcgtcaacgtctattcaccccgccgcgctcccgccttcgtcaacgtctattcaccccgccgcgctcccgccttcgtcaacgtctattcaccccgccgcgctcccgccttcgtcaacgtctattcaccccgccgcgctcccgccttcgtcaacgtctattcaccccgccgcgctcccgccttcgtcaacgtctattcaccccgccgcgctcccgcctttatcaacgtctattcaccccgccgcgctcccgccttcattaacgtctattcaccccgccgcgctcccgccttccttaacgtctattcaccccgccccgctcccgccttcgtcaacgtctattcacccgccccgctcccgccttcgtcaacgtctcttcaccccgccgcgctcccgccttcgtcaacgtctcttcaccccgccgcgctcccgccttcgtcaacgtctcttcaccccgccgcgctcccgccttcgtcaacgtctcttcaccccgccgcgctcccgccttcgtcaacgtctcttcaccccgccgcgctcccgccttcgtcaacgtctcttcaccccgccgcgctcccgccttcgtcaacgtctattcaccccgccgcgctcccgccttcgtcaacgtctattcaccccgccgcgctacaacaaacattaacgtctattcaccccgccgcgctcccgccttcctcaacgtctattcaccccgcgacgctcccgccttcct

SEQ ID NO: 33787 - DNA, 902 bp, Artificial Sequence
  chemically treated genomic DNA (Homo sapiens) CpG-island No: 33787
tttaagtatttgtttatttcgtcgcgttttcgttttcgttagtatttgtttatttcgttacgttttcgttttcgttagcgtttttttatttcgtcgcgttttcgtttttttgagcgtttgtttatttcgtcgttttttcgttttcgttagcgtttgtttatttcgtcgcgttttcgttttcgttagcgtttgtttatttcgtcgcgttttcgttttcgttagcgtttgtttatttcgtcgcgttttcgttttcgttagcgtttgtttatttcgtcgcgttttcgttttcgttagcgtttgtttatttcgtcgcgttttcgttttcgttagcgtttgtttatttcgtcgcgttttcgttttcgttagcgtttgtttatttcgtcgcgttttcgtttttgttagcgtttgtttatttcgtcgcgttttcgtttttattagcgtttgtttatttcgtcgcgttttcgttttttttagcgtttgtttatttcgtttcgttttcgttttcgttagcgtttgtttattcgtttcgttttcgttttcgttagcgtttttttatttcgtcgcgttttcgttttcgttagcgtttttttatttcgtcgcgttttcgttttcgttagcgtttttttatttcgtcgcgttttcgttttcgttagcgtttttttatttcgtcgcgttttcgttttcgttagcgtttttttatttcgtcgcgttttcgttttcgttagcgtttttttatttcgtcgcgttttcgttttcgttagcgtttgtttatttcgtcgcgttttcgttttcgttagcgtttgtttatttcgtcgcgttataataaatattagcgtttgtttatttcgtcgcgttttcgttttttttagcgtttgtttatttcgcggcgttttcgttttttt

SEQ ID NO: 33788 - DNA, 902 bp, Artificial Sequence
  chemically treated genomic DNA (Homo sapiens) CpG-island No: 33788
aaaaaaacgaaaacgccgcgaaataaacaaacgctaaaaaaaacgaaaacgcgacgaaataaacaaacgctaatatttattataacgcgacgaaataaacaaacgctaacgaaaacgaaaacgcgacgaaataaacaaacgctaacgaaaacgaaaacgcgacgaaataaaaaaacgctaacgaaaacgaaaacgcgacgaaataaaaaaacgctaacgaaaacgaaaacgcgacgaaataaaaaaacgctaacgaaaacgaaaacgcgacgaaataaaaaaacgctaacgaaaacgaaaacgcgacgaaataaaaaaacgctaacgaaaacgaaaacgcgacgaaataaaaaaacgctaacgaaaacgaaaacgaaacgaataaacaaacgctaacgaaaacgaaaacgaaacgaaataaacaaacgctaaaaaaaacgaaaacgcgacgaaataaacaaacgctaataaaaacgaaaacgcgacgaaataaacaaacgctaacaaaaacgaaaacgcgacgaaataaacaaacgctaacgaaaacgaaaacgcgacgaaataaacaaacgctaacgaaaacgaaaacgcgacgaaataaacaaacgctaacgaaaacgaaaacgcgacgaaataaacaaacgctaacgaaaacgaaaacgcgacgaaataaacaaacgctaacgaaaacgaaaacgcgacgaaataaacaaacgctaacgaaaacgaaaacgcgacgaaataaacaaacgctaacgaaaacgaaaaaacgacgaaataaacaaacgctcaaaaaaacgaaaacgcgacgaaataaaaaaacgctaacgaaaacgaaaacgtaacgaaataaacaaatactaacgaaaacgaaaacgcgacgaaataaacaaatacttaaa

SEQ ID NO: 33789 - DNA, 524 bp, Artificial Sequence
  chemically treated genomic DNA (Homo sapiens) CpG-island No: 33789
gattgaattagttcggtttgtagagaaaggcgagtagcgtttttatacggagagtagcggtgcgtttataaagtcgcgtatgtttatttcggtttttcgttttatttttaaggtaggcggcgaggtttagtgcgtaagcgttattcgtcggcgtcgatttttttcgttaaggcgggaatacgcggggtttaagatggcggttagtcggtatcggcgtttttttaagttttgtgaggaatggttagtggacgagattaaacggggtcgggatttgggcgtttatttgcgatagcgggtagtataggtttttcgggagggagagaatatttaggtgatcggcggggaggcggttgggacgaggggaggaaaggacgaggtaggggcggggttaacgagcgcgttagtagggggatttgcgtatgcgcgcgttttttttttaggtagtacgtgagcgcggatttttttttttttttagggagttattgatagcgacgttcgttgtatttagcgttttttttcggttg

SEQ ID NO: 33790 - DNA, 524 bp, Artificial Sequence
  chemically treated genomic DNA (Homo sapiens) CpG-island No: 33790
caaccgaaaaaaaacgctaaatacaacgaacgtcgctatcaataactccctaaaaaaaaaaaaaaatccgcgctcacgtactacctaaaaaaaaaacgcgcgcatacgcaaatccccctactaacgcgctcgttaaccccgcccctacctcgtcctttcctcccctcgtcccaaccgcctccccgccgatcacctaaatattctctccctcccgaaaaacctatactacccgctatcgcaaataaacgcccaaatcccgaccccgtttaatctcgtccactaaccattcctcacaaaacttaaaaaaacgccgataccgactaaccgccatcttaaaccccgcgtattcccgccttaacgaaaaaaatcgacgccgacgaataacgcttacgcactaaacctcgccgcctaccttaaaaataaaacgaaaaaccgaaataaacatacgcgactttataaacgcaccgctactctccgtataaaaacgctactcgcctttctctacaaaccgaactaattcaatc

SEQ ID NO: 33791 - DNA, 524 bp, Artificial Sequence
  chemically treated genomic DNA (Homo sapiens) CpG-island No: 33791
tagtcgggggagagcgttgaatataacgggcgtcgttattagtagttttttgggggaaaaagggggttcgcgtttacgtgttgtttggaaagagggcgcgcgtatgcgtagatttttttgttagcgcgttcgttggtttcgtttttgtttcgttttttttttttttcgttttagtcgttttttcgtcggttatttgggtattttttttttttcgaaaggtttgtgttattcgttgtcgtaggtaagcgtttaagtttcggtttcgtttggtttcgtttattggttattttttatagagtttaagaaaacgtcggtatcggttggtcgttattttgggtttcgcgtgttttcgttttagcgggaggagtcggcgtcgacgaatggcgtttgcgtattaagtttcgtcgtttgttttaggagtggagcgggaggtcggagtgggtatgcgcgattttgtaggcgtatcgttatttttcgtgtaggggcgttgttcgtttttttttgtaagtcgagttaatttagtt

SEQ ID NO: 33792 - DNA, 524 bp, Artificial Sequence
  chemically treated genomic DNA (Homo sapiens) CpG-island No: 33792
aactaaattaactcgacttacaaaaaaaaacgaacaacgcccctacacgaaaaataacgatacgcctacaaaatcgcgcatacccactccgacctcccgctccactcctaaaacaaacgacgaaacttaatacgcaaacgccattcgtcgacgccgactcctcccgctaaaacgaaaacacgcgaaacccaaaataacgaccaaccgataccgacgttttcttaaactctataaaaaataaccaataaacgaaaccaaacgaaaccgaaacttaaacgcttacctacgacaacgaataacacaaacctttcgaaaaaaaaaaaatacccaaataaccgacgaaaaaacgactaaaacgaaaaaaaaaaaaaacgaaacaaaaacgaaaccaacgaacgcgctaacaaaaaaatctacgcatacgcgcgccctctttccaaacaacacgtaaacgcgaaccccctttttcccccaaaaaactactaataacgacgcccgttatattcaacgctctcccccgacta

SEQ ID NO: 33793 - DNA, 518 bp, Artificial Sequence
  chemically treated genomic DNA (Homo sapiens) CpG-island No: 33793
gggcgggcggcgggcgcgttaagacgtgggtatttttttattcggatttcgggtttcgtcgagtcgttttttggttttcgtggtcgttagttcgtttcggtcgtatcgagcgtcgggattcgaggtgggagcgtattttttttcgtttttcggacgttttagtttttcgtattgagtttggttacgcgtttttaggcgttttttacgttttgggtttcggagggtcgtagttatgagtgaaatgtttagttttttttatatcggggatatcgtttttttgtacgtcgagggtttcgttaatggttttattagtattttggggtgagtgagtcgagttcgagaggggcgcgggtaaagagggggcgtcgtgggttttggtgttagttgcgtgcgtttagtcgtcgtttttcgatagaggtttggacgtttttttagttttaaggagcgggaacggttcgttttttttttttatagaaaggaagtgaagtgtttgtttaggtaggattcgggttttttat

SEQ ID NO: 33794 - DNA, 518 bp, Artificial Sequence
  chemically treated genomic DNA (Homo sapiens) CpG-island No: 33794
ataaaaaacccgaatcctacctaaacaaacacttcacttcctttctataaaaaaaaaaaacgaaccgttcccgctccttaaaactaaaaaaacgtccaaacctctatcgaaaaacgacgactaaacgcacgcaactaacaccaaaacccacgacgccccctctttacccgcgcccctctcgaactcgactcactcaccccaaaatactaataaaaccattaacgaaaccctcgacgtacaaaaaaacgatatccccgatataaaaaaaactaaacatttcactcataactacgaccctccgaaacccaaaacgtaaaaaacgcctaaaaacgcgtaaccaaactcaatacgaaaaactaaaacgtccgaaaaacgaaaaaaaatacgctcccacctcgaatcccgacgctcgatacgaccgaaacgaactaacgaccacgaaaaccaaaaaacgactcgacgaaacccgaaatccgaataaaaaaatacccacgtcttaacgcgcccgccgcccgccc

SEQ ID NO: 33795 - DNA, 518 bp, Artificial Sequence
  chemically treated genomic DNA (Homo sapiens) CpG-island No: 33795
gtagggagttcgagttttatttgagtaaatattttattttttttttgtaaaagaaggaggcgagtcgttttcgttttttgagattagggggacgtttaggtttttatcggggggcggcggttggacgtacgtagttggtattagggtttacggcgttttttttttattcgcgtttttttcgagttcggtttatttattttaaagtgttgatgaagttattgacggagttttcggcgtatagggagacgatgttttcgatgtgaagaaagttggatattttatttatggttgcggtttttcggggtttagggcgtggggggcgtttaggggcgcgtggttaagtttagtgcggaggattgaggcgttcggggagcggggaggggtacgtttttatttcggatttcgacgttcggtgcggtcggggcgggttggcggttacgggagttaggaggcggttcggcggggttcggggttcgggtgaggaggtgtttacgttttggcgcgttcgtcgttcgttt

SEQ ID NO: 33796 - DNA, 518 bp, Artificial Sequence
  chemically treated genomic DNA (Homo sapiens) CpG-island No: 33796
aaacgaacgacgaacgcgccaaaacgtaaacacctcctcacccgaaccccgaaccccgccgaaccgcctcctaactcccgtaaccgccaacccgccccgaccgcaccgaacgtcgaaatccgaaataaaaacgtacccctccccgctccccgaacgcctcaatcctccgcactaaacttaaccacgcgcccctaaacgccccccacgccctaaaccccgaaaaaccgcaaccataaataaaatatccaactttcttcacatcgaaaacatcgtctccctatacgccgaaaactccgtcaataacttcatcaacactttaaaataaataaaccgaactcgaaaaaaacgcgaataaaaaaaaaacgccgtaaaccctaataccaactacgtacgtccaaccgccgccccccgataaaaacctaaacgtccccctaatctcaaaaaacgaaaacgactcgcctccttcttttacaaaaaaaaaataaaatatttactcaaataaaactcgaactccctac

SEQ ID NO: 33797 - DNA, 634 bp, Artificial Sequence
  chemically treated genomic DNA (Homo sapiens) CpG-island No: 33797
tcgtcgtcgtcgttattttgtatataggggattatcggggcgggtagtttttcggtcggcggggtttttcggaagggcgttggtttcggcgtttttaaatttagtcgcgtttttatgggttttatgacgtcgttcgtttttggatttgttcgggtcgaatcgggtttttttggagatttaattaatttttcgggtcgtggaaggagcgtagggttgtagtttaggttcgtttttttcgaggcgagtcgttttaggttcgataagataacgtagttttattttggagttttcggtttttagttgcggttgtttagggcgaagtgggaggaggatgcgggtttggggtcggtttcggggttacgtcgtttttcggttgaatttgttcgcgacgggggagggtcgggggcggggaggcgcggtcgttgggatatttggaagtcgtgttttcgagtgttcgggtggaatgcggggggcgattttttgtcgttcgcgggttttttgtagtttttattcgtattttcggcggggttcgcgtttgtttcgttttttgagtgtttcgaagtgggggtgtagagttcgcgtttaatttttagagatttttacgtgtataaagtttttttgtttatgaatttgg

SEQ ID NO: 33798 - DNA, 634 bp, Artificial Sequence
  chemically treated genomic DNA (Homo sapiens) CpG-island No: 33798
ccaaattcataaacaaaaaaactttatacacgtaaaaatctctaaaaattaaacgcgaactctacacccccacttcgaaacactcaaaaaacgaaacaaacgcgaaccccgccgaaaatacgaataaaaactacaaaaaacccgcgaacgacaaaaaatcgccccccgcattccacccgaacactcgaaaacacgacttccaaatatcccaacgaccgcgcctccccgcccccgaccctcccccgtcgcgaacaaattcaaccgaaaaacgacgtaaccccgaaaccgaccccaaacccgcatcctcctcccacttcgccctaaacaaccgcaactaaaaaccgaaaactccaaaataaaactacgttatcttatcgaacctaaaacgactcgcctcgaaaaaaacgaacctaaactacaaccctacgctccttccacgacccgaaaaattaattaaatctccaaaaaaacccgattcgacccgaacaaatccaaaaacgaacgacgtcataaaacccataaaaacgcgactaaatttaaaaacgccgaaaccaacgcccttccgaaaaaccccgccgaccgaaaaactacccgccccgataatcccctatatacaaaataacgacgacgacga

SEQ ID NO: 33799 - DNA, 634 bp, Artificial Sequence
  chemically treated genomic DNA (Homo sapiens) CpG-island No: 33799
ttaagtttatgggtaggaagattttgtgtacgtgggggtttttgaaggttgagcgcgagttttgtatttttatttcgaggtatttaagaagcggaatagacgcgagtttcgtcgggggtgcgggtgagggttgtagggagttcgcgaacgatagaaagtcgtttttcgtattttattcgagtattcgggaatacggtttttaggtgttttagcggtcgcgttttttcgttttcggttttttttcgtcgcgggtaggtttaatcgggaggcggcgtggtttcggagtcggttttaggttcgtattttttttttatttcgttttgggtagtcgtagttaaaagtcggaggttttaaagtggaattacgttgttttgtcgagtttggggcgattcgtttcggggagggcgagtttgaattgtagttttgcgttttttttacggttcgaggagttagttaagtttttagaggggttcggttcggttcgagtaagtttaggggcgaacggcgttatggagtttataggggcgcggttaagtttggaggcgtcgggattagcgttttttcgagaggtttcgtcggtcgaggagttgttcgtttcggtggttttttgtgtgtagggtggcggcgacggcgg

SEQ ID NO: 33800 - DNA, 634 bp, Artificial Sequence
  chemically treated genomic DNA (Homo sapiens) CpG-island No: 33800
ccgccgtcgccgccaccctacacacaaaaaaccaccgaaacgaacaactcctcgaccgacgaaacctctcgaaaaaacgctaatcccgacgcctccaaacttaaccgcgcccctataaactccataacgccgttcgcccctaaacttactcgaaccgaaccgaacccctctaaaaacttaactaactcctcgaaccgtaaaaaaaacgcaaaactacaattcaaactcgccctccccgaaacgaatcgccccaaactcgacaaaacaacgtaattccactttaaaacctccgacttttaactacgactacccaaaacgaaataaaaaaaaaatacgaacctaaaaccgactccgaaaccacgccgcctcccgattaaacctacccgcgacgaaaaaaaaccgaaaacgaaaaaacgcgaccgctaaaacacctaaaaaccgtattcccgaatactcgaataaaatacgaaaaacgactttctatcgttcgcgaactccctacaaccctcacccgcacccccgacgaaactcgcgtctattccgcttcttaaatacctcgaaataaaaatacaaaactcgcgctcaaccttcaaaaacccccacgtacacaaaatcttcctacccataaacttaa

SEQ ID NO: 33801 - DNA, 1021 bp, Artificial Sequence
  chemically treated genomic DNA (Homo sapiens) CpG-island No: 33801
ttttcgggtatttttttttatttcggtttcgcgtttagattttgaggcgtttttagggcgttgagtttgaggagttcgcggcggtttgggggtttgtttggaggaatttttacggagaggtcgcgggtcggtatttttcggatgtattaggaattatcgttttttcgcgttttcgggttttacgtcgcgttttttttgttttcgttttttttaggtaagaaatgtatttatggtattaagtgtaagttttattattcggagaggtcgtattacgcgtaattggcggtggtcgacgagtttcgcgttaagataggggttcggtttggcgcgggcgtcgaggagtagcggttatcgagagtttcgggcggtttcgtaggagttcgggcggtttttcgggaattatttgcgtatagtttttcgtcggcgcgggggttttcggatttggtcgttttgcgagggagtttttttcggttggtttttagcgacgatttggggtttttggggtcgtttttttcggttttcgtttgtagttttacgtttcgattgggcgggttcgattgggtgttcgcgggcggtcgggtgttaggttcgtttagtttttttagttcggagagttagtttttttcgggcgatttttcgttttcgttcggtttgtagttttagtcgcggggcgaatatcgttttagggatttgtacggcgatttgtttttttcgcgtaggttattcgacgattcgtgggttcgtttatttcgtttcgatcgtttttttgggcgtttcgtttgggcggagtcggtttggggcgacggcgttattgggggatttttagtgtacgcgatcgaggacgacgagggggacgcgcgcgttcgggttcgtatcgcgttttatagcgttttttcgcgtgattaggtggatcgcgtgatggtcgcgttttcggagtttttagatttcgttaggtttatttttttggtatagagatgttagagcgcgggggcgtttttgggtaagttttaagggattaata

SEQ ID NO: 33802 - DNA, 1021 bp, Artificial Sequence
  chemically treated genomic DNA (Homo sapiens) CpG-island No: 33802
tattaatcccttaaaacttacccaaaaacgcccccgcgctctaacatctctataccaaaaaaataaacctaacgaaatctaaaaactccgaaaacgcgaccatcacgcgatccacctaatcacgcgaaaaaacgctataaaacgcgatacgaacccgaacgcgcgcgtccccctcgtcgtcctcgatcgcgtacactaaaaatcccccaataacgccgtcgccccaaaccgactccgcccaaacgaaacgcccaaaaaaacgatcgaaacgaaataaacgaacccacgaatcgtcgaataacctacgcgaaaaaaacaaatcgccgtacaaatccctaaaacgatattcgccccgcgactaaaactacaaaccgaacgaaaacgaaaaatcgcccgaaaaaaactaactctccgaactaaaaaaactaaacgaacctaacacccgaccgcccgcgaacacccaatcgaacccgcccaatcgaaacgtaaaactacaaacgaaaaccgaaaaaaacgaccccaaaaaccccaaatcgtcgctaaaaaccaaccgaaaaaaactccctcgcaaaacgaccaaatccgaaaacccccgcgccgacgaaaaactatacgcaaataattcccgaaaaaccgcccgaactcctacgaaaccgcccgaaactctcgataaccgctactcctcgacgcccgcgccaaaccgaacccctatcttaacgcgaaactcgtcgaccaccgccaattacgcgtaatacgacctctccgaataataaaacttacacttaataccataaatacatttcttacctaaaaaaaacgaaaacaaaaaaaacgcgacgtaaaacccgaaaacgcgaaaaaacgataattcctaatacatccgaaaaataccgacccgcgacctctccgtaaaaattcctccaaacaaacccccaaaccgccgcgaactcctcaaactcaacgccctaaaaacgcctcaaaatctaaacgcgaaaccgaaataaaaaaaaatacccgaaaa

SEQ ID NO: 33803 - DNA, 1021 bp, Artificial Sequence
  chemically treated genomic DNA (Homo sapiens) CpG-island No: 33803
tgttggttttttagggtttgtttaggggcgttttcgcgttttggtatttttgtattaggaggatgagtttggcgaggtttgagagtttcgggaacgcggttattacgcggtttatttggttacgcgggaagacgttgtagagcgcgatgcgagttcgggcgcgcgcgtttttttcgtcgttttcggtcgcgtatattgaaagttttttagtggcgtcgtcgttttaggtcggtttcgtttagacggagcgtttagggaagcggtcggagcggggtggacgggtttacgggtcgtcgggtggtttgcgcggggaaagtaagtcgtcgtgtaggtttttagggcggtgttcgtttcgcggttggagttgtaggtcgggcggaggcgggaggtcgttcggggagaattggtttttcgggttagggaggttgagcgggtttggtattcggtcgttcgcggatatttagtcgggttcgtttagtcggggcgtgaggttgtaggcggggatcgggagaggcggttttaggggttttaggtcgtcgttgaaggttagtcgagagaagttttttcgtagggcggttaggttcggggattttcgcgtcggcgggaggttgtgcgtaaatggttttcggggggtcgttcgggtttttgcggagtcgttcggggttttcggtggtcgttgtttttcggcgttcgcgttaggtcgggtttttgttttggcgcggagttcgtcggttatcgttagttgcgcgtggtgcggttttttcgggtggtagaatttgtatttgatgttataggtgtattttttgtttgaaaggggcgggggtagagagggcgcggcgtgaggttcgggggcgcggaggggcggtggtttttggtgtattcggggagtgtcggttcgcggttttttcgtggagatttttttaagtaggtttttaggtcgtcgcggattttttagatttagcgttttggaaacgttttaagatttgggcgcggggtcgaggtggggagaagtgttcgggag

SEQ ID NO: 33804 - DNA, 1021 bp, Artificial Sequence
  chemically treated genomic DNA (Homo sapiens) CpG-island No: 33804
ctcccgaacacttctccccacctcgaccccgcgcccaaatcttaaaacgtttccaaaacgctaaatctaaaaaatccgcgacgacctaaaaacctacttaaaaaaatctccacgaaaaaaccgcgaaccgacactccccgaatacaccaaaaaccaccgcccctccgcgcccccgaacctcacgccgcgccctctctacccccgcccctttcaaacaaaaaatacacctataacatcaaatacaaattctaccacccgaaaaaaccgcaccacgcgcaactaacgataaccgacgaactccgcgccaaaacaaaaacccgacctaacgcgaacgccgaaaaacaacgaccaccgaaaaccccgaacgactccgcaaaaacccgaacgaccccccgaaaaccatttacgcacaacctcccgccgacgcgaaaatccccgaacctaaccgccctacgaaaaaacttctctcgactaaccttcaacgacgacctaaaacccctaaaaccgcctctcccgatccccgcctacaacctcacgccccgactaaacgaacccgactaaatatccgcgaacgaccgaataccaaacccgctcaacctccctaacccgaaaaaccaattctccccgaacgacctcccgcctccgcccgacctacaactccaaccgcgaaacgaacaccgccctaaaaacctacacgacgacttactttccccgcgcaaaccacccgacgacccgtaaacccgtccaccccgctccgaccgcttccctaaacgctccgtctaaacgaaaccgacctaaaacgacgacgccactaaaaaactttcaatatacgcgaccgaaaacgacgaaaaaaacgcgcgcgcccgaactcgcatcgcgctctacaacgtcttcccgcgtaaccaaataaaccgcgtaataaccgcgttcccgaaactctcaaacctcgccaaactcatcctcctaatacaaaaataccaaaacgcgaaaacgcccctaaacaaaccctaaaaaaccaaca

SEQ ID NO: 33805 - DNA, 661 bp, Artificial Sequence
  chemically treated genomic DNA (Homo sapiens) CpG-island No: 33805
gggagcgcgcggttttgggagataagtacgtagggtcgaggcgaggggttgttttttttatttttgggtttcgcgttttagggaaggtgggggatggggatagcgtttggggaagaaattgttttttgttcggtttaggaattttttcggcgtatcggagaggggtatttttttgttttggcgggtatggaggtcgggtagtcgtcgggggatgtgagtgggcggcgaagtgcgggggaaaggtcggcgttttagggcggggaggatttgggagtggagttcggagataaaatcggggttaggtagaggagttagagggaaagttagtaaacgcgagttcgggtgagagttatcggaatgcgggaacgtagtttagtcgggaatagggttttcgataggggtcgttcgtggttaggacgcggtcgttgaatagaggtcgcgcggcggtttttgttcgagggatttcgtgggcgggggttatacggaggtcgcgtacggttttcggggttggcgggggtaggtgggaggatttttttcgggttcgcgaatttgatttggtagcggttaggtgtttggaagcgtttttaaatgatagggttataaagatatgttggttaggtttgtagttagcgtagtaacgtggtttgtaggagcgtagaat

SEQ ID NO: 33806 - DNA, 661 bp, Artificial Sequence
  chemically treated genomic DNA (Homo sapiens) CpG-island No: 33806
attctacgctcctacaaaccacgttactacgctaactacaaacctaaccaacatatctttataaccctatcatttaaaaacgcttccaaacacctaaccgctaccaaatcaaattcgcgaacccgaaaaaaatcctcccacctacccccgccaaccccgaaaaccgtacgcgacctccgtataacccccgcccacgaaatccctcgaacaaaaaccgccgcgcgacctctattcaacgaccgcgtcctaaccacgaacgacccctatcgaaaaccctattcccgactaaactacgttcccgcattccgataactctcacccgaactcgcgtttactaactttccctctaactcctctacctaaccccgattttatctccgaactccactcccaaatcctccccgccctaaaacgccgacctttcccccgcacttcgccgcccactcacatcccccgacgactacccgacctccatacccgccaaaacaaaaaaatacccctctccgatacgccgaaaaaattcctaaaccgaacaaaaaacaatttcttccccaaacgctatccccatcccccaccttccctaaaacgcgaaacccaaaaataaaaaaaacaacccctcgcctcgaccctacgtacttatctcccaaaaccgcgcgctccc

SEQ ID NO: 33807 - DNA, 661 bp, Artificial Sequence
  chemically treated genomic DNA (Homo sapiens) CpG-island No: 33807
gttttgcgtttttgtaaattacgttgttgcgttaattataaatttggttaatatgtttttgtaattttattatttaaaaacgtttttaggtatttggtcgttgttagattaggttcgcgggttcggaggaggtttttttatttgttttcgttagtttcggggatcgtgcgcggttttcgtgtggttttcgtttacgaggtttttcgggtaggaatcgtcgcgcgatttttgtttagcggtcgcgttttggttacgggcgatttttgtcgggaattttgttttcggttaagttgcgttttcgtatttcggtggtttttattcgagttcgcgtttgttggttttttttttggtttttttgtttgatttcgattttgttttcgaattttatttttagatttttttcgttttggaacgtcgatttttttttcgtatttcgtcgtttatttatatttttcggcgattgttcggtttttatgttcgttaagataagaagatgttttttttcgatgcgtcgagagggtttttaagtcgagtaagggataattttttttttaaacgttgtttttattttttattttttttagagcgcgaaatttaaaagtaaggaaggtaatttttcgtttcgattttacgtgtttgttttttagagtcgcgcgttttt

SEQ ID NO: 33808 - DNA, 661 bp, Artificial Sequence
  chemically treated genomic DNA (Homo sapiens) CpG-island No: 33808
aaaaacgcgcgactctaaaaaacaaacacgtaaaatcgaaacgaaaaattaccttccttacttttaaatttcgcgctctaaaaaaaataaaaaataaaaacaacgtttaaaaaaaaaattatcccttactcgacttaaaaaccctctcgacgcatcgaaaaaaaacatcttcttatcttaacgaacataaaaaccgaacaatcgccgaaaaatataaataaacgacgaaatacgaaaaaaaaatcgacgttccaaaacgaaaaaaatctaaaaataaaattcgaaaacaaaatcgaaatcaaacaaaaaaaccaaaaaaaaaaccaacaaacgcgaactcgaataaaaaccaccgaaatacgaaaacgcaacttaaccgaaaacaaaattcccgacaaaaatcgcccgtaaccaaaacgcgaccgctaaacaaaaatcgcgcgacgattcctacccgaaaaacctcgtaaacgaaaaccacacgaaaaccgcgcacgatccccgaaactaacgaaaacaaataaaaaaacctcctccgaacccgcgaacctaatctaacaacgaccaaatacctaaaaacgtttttaaataataaaattacaaaaacatattaaccaaatttataattaacgcaacaacgtaatttacaaaaacgcaaaac

SEQ ID NO: 33809 - DNA, 880 bp, Artificial Sequence
  chemically treated genomic DNA (Homo sapiens) CpG-island No: 33809
ttatgtgtcgaagggcgattaatattcgttcgataaaattttgtttcgggttatttgggagttgtacgcgtttatattcggggtttagttcggtgcgtttttacgcgtagtttttttgtttatgcggttagtagggagaggggcggagaggtagcgaattttttaatgtgtagtaggtcgcgagggttatataaagttcgggtttcggatttattggaattggttaagattgttcgcgagttggtagcggtttttcgtttagttttgcggcgttatggagaacgcgggaggcgtagagggtatagagagtggagttgcggcgtgcgcggttatcgacggttttacgcggcgcgcgggcgcggatttcgggtaggttttttcgcgttgttttgcgttttttagtttttttcgttttttttttttgcgtttttttagttttttttttttaattttttattttttattgttcggtgttagcgttcggtttcggtggattttttcgggtttgggtttacgttttttttgcgcgttttgtgtttttttatttcgtagatacgtaggtttttggagattttgggtggacgtcggaggtaagaaagaagaggagacgtcgaattacgtcgcggaggcggtgagtgagttacgcgttttaggtcgcgttttttacgggtgtagaagatcgattagggttttcgggacgtagggtttgagagagatatgcgagatatcgggttttgtttttcgtttaatatttcgtttgtcggtggttataaaggtgtcgacgcggcggatgtgttttttggagcgatgggttataggtatttagtcgggagcgaggttgttgagagttttggggttatatttttagcgggtacgagga

SEQ ID NO: 33810 - DNA, 880 bp, Artificial Sequence
  chemically treated genomic DNA (Homo sapiens) CpG-island No: 33810
tcctcgtacccgctaaaaatataaccccaaaactctcaacaacctcgctcccgactaaatacctataacccatcgctccaaaaaacacatccgccgcgtcgacacctttataaccaccgacaaacgaaatattaaacgaaaaacaaaacccgatatctcgcatatctctctcaaaccctacgtcccgaaaaccctaatcgatcttctacacccgtaaaaaacgcgacctaaaacgcgtaactcactcaccgcctccgcgacgtaattcgacgtctcctcttctttcttacctccgacgtccacccaaaatctccaaaaacctacgtatctacgaaataaaaaaacacaaaacgcgcaaaaaaaacgtaaacccaaacccgaaaaaatccaccgaaaccgaacgctaacaccgaacaataaaaaataaaaaattaaaaaaaaaaaactaaaaaaacgcaaaaaaaaaaaacgaaaaaaactaaaaaacgcaaaacaacgcgaaaaaacctacccgaaatccgcgcccgcgcgccgcgtaaaaccgtcgataaccgcgcacgccgcaactccactctctataccctctacgcctcccgcgttctccataacgccgcaaaactaaacgaaaaaccgctaccaactcgcgaacaatcttaaccaattccaataaatccgaaacccgaactttatataaccctcgcgacctactacacattaaaaaattcgctacctctccgcccctctccctactaaccgcataaacaaaaaaactacgcgtaaaaacgcaccgaactaaaccccgaatataaacgcgtacaactcccaaataacccgaaacaaaattttatcgaacgaatattaatcgcccttcgacacataa

SEQ ID NO: 33811 - DNA, 880 bp, Artificial Sequence
  chemically treated genomic DNA (Homo sapiens) CpG-island No: 33811
ttttcgtgttcgttgggaatgtaattttagggtttttagtagtttcgttttcggttgggtgtttgtggtttatcgttttagaggatatattcgtcgcgtcggtatttttatggttatcggtaggcgggatgttaagcgagaggtaggattcggtgtttcgtatgttttttttaggttttgcgtttcgagagttttggtcgattttttgtattcgtgggaggcgcggtttgagacgcgtggtttatttatcgttttcgcggcgtggttcggcgttttttttttttttttgttttcggcgtttatttagggtttttagaagtttgcgtatttgcgggataggggagtataaggcgcgtagaggagacgtgagtttagattcgggagaatttatcgaagtcgagcgttggtatcgggtagtgggggatggagagttggagggaaggagttggggaggcgtaggagggaaagacgggggaagttgggaggcgtagagtagcgcggggaagtttattcggagttcgcgttcgcgcgtcgcgtagggtcgtcggtggtcgcgtacgtcgtagttttattttttgtattttttgcgtttttcgcgttttttatgacgtcgtagagttgggcggaaggtcgttgttagttcgcgggtaattttgattagttttagtaggttcgagattcgagttttatatagttttcgcggtttgttgtatattgagaggttcgttgttttttcgtttttttttttgttagtcgtataaataaaaaggttgcgcgtgaaggcgtatcgggttgagtttcgggtgtgaacgcgtgtaatttttaaatggttcgggatagggttttgtcgagcgaatgttaatcgtttttcgatatatgg

SEQ ID NO: 33812 - DNA, 880 bp, Artificial Sequence
  chemically treated genomic DNA (Homo sapiens) CpG-island No: 33812
ccatatatcgaaaaacgattaacattcgctcgacaaaaccctatcccgaaccatttaaaaattacacgcgttcacacccgaaactcaacccgatacgccttcacgcgcaacctttttatttatacgactaacaaaaaaaaaaacgaaaaaacaacgaacctctcaatatacaacaaaccgcgaaaactatataaaactcgaatctcgaacctactaaaactaatcaaaattacccgcgaactaacaacgaccttccgcccaactctacgacgtcataaaaaacgcgaaaaacgcaaaaaatacaaaaaataaaactacgacgtacgcgaccaccgacgaccctacgcgacgcgcgaacgcgaactccgaataaacttccccgcgctactctacgcctcccaacttcccccgtctttccctcctacgcctccccaactccttccctccaactctccatcccccactacccgataccaacgctcgacttcgataaattctcccgaatctaaactcacgtctcctctacgcgccttatactcccctatcccgcaaatacgcaaacttctaaaaaccctaaataaacgccgaaaacaaaaaaaaaaaaaaaacgccgaaccacgccgcgaaaacgataaataaaccacgcgtctcaaaccgcgcctcccacgaatacaaaaaatcgaccaaaactctcgaaacgcaaaacctaaaaaaaacatacgaaacaccgaatcctacctctcgcttaacatcccgcctaccgataaccataaaaataccgacgcgacgaatatatcctctaaaacgataaaccacaaacacccaaccgaaaacgaaactactaaaaaccctaaaattacattcccaacgaacacgaaaa

SEQ ID NO: 33813 - DNA, 558 bp, Artificial Sequence
  chemically treated genomic DNA (Homo sapiens) CpG-island No: 33813
cgggatcgggacgtcggagagggtcgtttttttttaggttttttttcgtcgcggcgtttacgtgatcgagagtaggtttttattagttcgtttttttcggtcgttgttgtttatttttcgttcggggtaagtaaatcgtcgtttttcgtatcgttttaatttcgttttttttttttttttttgtttttattttttcgggttttttcgcgttattttttttatttttatattttttttatcgggttttttgtacgtgttcggcgtcgtgtaagcgcgttcggtacgtgatttcgtcgaacgtggtattgtgttattacgtgatttaggtgcgtacgcgacggagcggggtgtgaagatggcggacgaagaggtcgagtaggagaggttgagttgcggcgaaggcggttgcgtcgcggagttgtagcgtttgggcgagcggttttaggagttggagttatagttgcgggagagtcgggtatcggtcgtggaagcggttatcgattattgttagtagttgtgttaggtgagggcgttcggtggtttttttttttttttttt

SEQ ID NO: 33814 - DNA, 558 bp, Artificial Sequence
  chemically treated genomic DNA (Homo sapiens) CpG-island No: 33814
aaaaaaaaaaaaaaaaaaccaccgaacgccctcacctaacacaactactaacaataatcgataaccgcttccacgaccgatacccgactctcccgcaactataactccaactcctaaaaccgctcgcccaaacgctacaactccgcgacgcaaccgccttcgccgcaactcaacctctcctactcgacctcttcgtccgccatcttcacaccccgctccgtcgcgtacgcacctaaatcacgtaataacacaataccacgttcgacgaaatcacgtaccgaacgcgcttacacgacgccgaacacgtacaaaaaacccgataaaaaaaatataaaaataaaaaaaataacgcgaaaaaacccgaaaaaataaaaacaaaaaaaaaaaaaaaaaacgaaattaaaacgatacgaaaaacgacgatttacttaccccgaacgaaaaataaacaacaacgaccgaaaaaaacgaactaataaaaacctactctcgatcacgtaaacgccgcgacgaaaaaaaacctaaaaaaaaacgaccctctccgacgtcccgatcccg

SEQ ID NO: 33815 - DNA, 558 bp, Artificial Sequence
  chemically treated genomic DNA (Homo sapiens) CpG-island No: 33815
ggggaaagggggaggggattatcgggcgtttttatttggtatagttgttgatagtagtcggtggtcgtttttacggtcggtattcggttttttcgtagttgtagttttagtttttggagtcgttcgtttaggcgttgtagtttcgcgacgtagtcgttttcgtcgtaatttaattttttttgttcggttttttcgttcgttatttttatatttcgtttcgtcgcgtacgtatttgggttacgtgataatataatgttacgttcggcggggttacgtgtcgggcgcgtttgtacggcgtcgagtacgtataaagggttcgatggggaagatatgggggtggggagagtggcgcgagagagttcgaggaggtgaaggtaaggggaaaggagaagggcggggttggggcggtgcggaaaacggcggtttatttatttcgagcgggaagtgggtagtagcggtcgaaaggggcgggttggtgaaggtttgttttcggttacgtgggcgtcgcgacgggaaaaagtttagggaggggcgatttttttcggcgtttcgatttcg

SEQ ID NO: 33816 - DNA, 558 bp, Artificial Sequence
  chemically treated genomic DNA (Homo sapiens) CpG-island No: 33816
cgaaatcgaaacgccgaaaaaaatcgcccctccctaaactttttcccgtcgcgacgcccacgtaaccgaaaacaaaccttcaccaacccgcccctttcgaccgctactacccacttcccgctcgaaataaataaaccgccgttttccgcaccgccccaaccccgcccttctcctttccccttaccttcacctcctcgaactctctcgcgccactctccccacccccatatcttccccatcgaaccctttatacgtactcgacgccgtacaaacgcgcccgacacgtaaccccgccgaacgtaacattatattatcacgtaacccaaatacgtacgcgacgaaacgaaatataaaaataacgaacgaaaaaaccgaacaaaaaaaattaaattacgacgaaaacgactacgtcgcgaaactacaacgcctaaacgaacgactccaaaaactaaaactacaactacgaaaaaaccgaataccgaccgtaaaaacgaccaccgactactatcaacaactataccaaataaaaacgcccgataatcccctccccctttcccc

SEQ ID NO: 33817 - DNA, 580 bp, Artificial Sequence
  chemically treated genomic DNA (Homo sapiens) CpG-island No: 33817
gcgggtatcgggatgtttcgttagttattttttgtgggcgtttggcgtattttcggtttcggtttattttagttgcgcgtttttgggcgggtgtcgggcgttgtaggcgggcgggggcgatataggggatttagattttagggtcgttgttgacgcgggtcgggttcgcggaggtcgaggagtagtaaagcggagagaggtaggtcggtttttttttgtagggcgtaggatgaaacgtgtttggtttgggtaagttgtggcgaggcgggtcgattggcgtcgttttagggttttttagatttcggattacggacgatttaggatattttatttttttttcgttttttttttttcgcgattttttttcggttttttttttcggtgtttcggtttttttggtaattgggcgggatcgcgagcgtttagatcgtagcgttaaaatgcgtttagttaattcggtagttggcgtagatacgtggttcgggggcgcgtttcgttgttggttttggatgttaattttaggaaggttttttaaagagaaattagattcgtttttattcggttgttggtttggttttta

SEQ ID NO: 33818 - DNA, 580 bp, Artificial Sequence
  chemically treated genomic DNA (Homo sapiens) CpG-island No: 33818
taaaaaccaaaccaacaaccgaataaaaacgaatctaatttctctttaaaaaaccttcctaaaattaacatccaaaaccaacaacgaaacgcgcccccgaaccacgtatctacgccaactaccgaattaactaaacgcattttaacgctacgatctaaacgctcgcgatcccgcccaattaccaaaaaaaccgaaacaccgaaaaaaaaaaccgaaaaaaaatcgcgaaaaaaaaaaaacgaaaaaaaaataaaatatcctaaatcgtccgtaatccgaaatctaaaaaaccctaaaacgacgccaatcgacccgcctcgccacaacttacccaaaccaaacacgtttcatcctacgccctacaaaaaaaaaccgacctacctctctccgctttactactcctcgacctccgcgaacccgacccgcgtcaacaacgaccctaaaatctaaatcccctatatcgcccccgcccgcctacaacgcccgacacccgcccaaaaacgcgcaactaaaataaaccgaaaccgaaaatacgccaaacgcccacaaaaaataactaacgaaacatcccgatacccgc

SEQ ID NO: 33819 - DNA, 580 bp, Artificial Sequence
  chemically treated genomic DNA (Homo sapiens) CpG-island No: 33819
tgagggttagattaataatcgggtaggagcgaatttggtttttttttgaaaagtttttttagggttagtatttagggttagtaacggagcgcgttttcgaattacgtgtttgcgttagttgtcggattggttgagcgtattttagcgttgcggtttagacgttcgcggtttcgtttagttgttagaggagtcgggatatcgagggaagaggtcggagggagatcgcggaggggagggggcgggaggggggtggggtattttgagtcgttcgtggttcggagtttggaaggttttagagcggcgttagtcgattcgtttcgttataatttgtttagattagatacgttttattttgcgttttgtaagaaggagtcggtttgttttttttcgttttgttgtttttcggttttcgcgggttcggttcgcgttagtagcgattttggggtttgggttttttgtgtcgttttcgttcgtttgtagcgttcggtattcgtttaggagcgcgtagttggggtgagtcgagatcggggatgcgttaggcgtttataggaggtggttgacggggtatttcgatattcgt

SEQ ID NO: 33820 - DNA, 580 bp, Artificial Sequence
  chemically treated genomic DNA (Homo sapiens) CpG-island No: 33820
acgaatatcgaaataccccgtcaaccacctcctataaacgcctaacgcatccccgatctcgactcaccccaactacgcgctcctaaacgaataccgaacgctacaaacgaacgaaaacgacacaaaaaacccaaaccccaaaatcgctactaacgcgaaccgaacccgcgaaaaccgaaaaacaacaaaacgaaaaaaaacaaaccgactccttcttacaaaacgcaaaataaaacgtatctaatctaaacaaattataacgaaacgaatcgactaacgccgctctaaaaccttccaaactccgaaccacgaacgactcaaaataccccacccccctcccgccccctcccctccgcgatctccctccgacctcttccctcgatatcccgactcctctaacaactaaacgaaaccgcgaacgtctaaaccgcaacgctaaaatacgctcaaccaatccgacaactaacgcaaacacgtaattcgaaaacgcgctccgttactaaccctaaatactaaccctaaaaaaacttttcaaaaaaaaaccaaattcgctcctacccgattattaatctaaccctca

SEQ ID NO: 33821 - DNA, 792 bp, Artificial Sequence
  chemically treated genomic DNA (Homo sapiens) CpG-island No: 33821
tttcggaggtttcggtttcgttggagagaaagagattgcgtaggcgtcgagtagtcgacgtggtcgtagggatcgtgtttgggggggtttgcgcggggtcgttgattcgcgaggttttttgtcgtttgtcgttttcgttttttttttttttttttagagtgttacggtgatttttgggttcgaaggggacggacgtttttttacgtattatttagaaggttagagtgggtagaatttagtttgagtaggtcggtgatgaattcgttggtaagacgcgcgcgtgggtatttacgtgatttaggttgcggcggcggcgtgttgcgggttttgtggcgggagcgaggtcgacgggcggggtcgcgcggtcgcgtgacgcgaagcgttcgagagcgcgcgtcgtggaacgttttggttgttacggtaagcgcgcgcgcgaggttttgggaatttcgggatcggttttcggcgagcgtagcggcgtttagtgtaagggagtgggagttggttcgtgtcgcggcggtcgcgtagggagttttcgaggtaacgtcggggcgttcgaggtttggaaggcgtaggtggggcgcgggggagtttatttttgcgcggttttttgggtgggcggggtgggcgttttaggtttcgcggattcggttgggaggttgagcgggcgacggttacgggataagggtggagggggtggggattttattcgagttttagagatggaattttcgaggaagggagcgatttcgagagagaatagtttgagaagttgtttttagtttttttttt

SEQ ID NO: 33822 - DNA, 792 bp, Artificial Sequence
  chemically treated genomic DNA (Homo sapiens) CpG-island No: 33822
aaaaaaaaaactaaaaacaacttctcaaactattctctctcgaaatcgctcccttcctcgaaaattccatctctaaaactcgaataaaatccccaccccctccacccttatcccgtaaccgtcgcccgctcaacctcccaaccgaatccgcgaaacctaaaacgcccaccccgcccacccaaaaaaccgcgcaaaaataaactcccccgcgccccacctacgccttccaaacctcgaacgccccgacgttacctcgaaaactccctacgcgaccgccgcgacacgaaccaactcccactcccttacactaaacgccgctacgctcgccgaaaaccgatcccgaaattcccaaaacctcgcgcgcgcgcttaccgtaacaaccaaaacgttccacgacgcgcgctctcgaacgcttcgcgtcacgcgaccgcgcgaccccgcccgtcgacctcgctcccgccacaaaacccgcaacacgccgccgccgcaacctaaatcacgtaaatacccacgcgcgcgtcttaccaacgaattcatcaccgacctactcaaactaaattctacccactctaaccttctaaataatacgtaaaaaaacgtccgtccccttcgaacccaaaaatcaccgtaacactctaaaaaaaaaaaaaaaaaacgaaaacgacaaacgacaaaaaacctcgcgaatcaacgaccccgcgcaaacccccccaaacacgatccctacgaccacgtcgactactcgacgcctacgcaatctctttctctccaacgaaaccgaaacctccgaaa

SEQ ID NO: 33823 - DNA, 792 bp, Artificial Sequence
  chemically treated genomic DNA (Homo sapiens) CpG-island No: 33823
agagaagggattgagaataattttttaaattattttttttcgaaatcgttttttttttcgaaaattttatttttgagattcggatgaggtttttattttttttatttttgtttcgtgatcgtcgttcgtttagttttttagtcgagttcgcggggtttggggcgtttatttcgtttatttaagggatcgcgtaggggtgaattttttcgcgttttatttgcgttttttagatttcgggcgtttcggcgttgtttcgagagttttttgcgcggtcgtcgcggtacggattagtttttatttttttatattgggcgtcgttgcgttcgtcgggggtcggtttcgaggtttttaaggtttcgcgcgcgcgtttgtcgtggtaattaagacgttttacgacgcgcgttttcgaacgtttcgcgttacgcggtcgcgcggtttcgttcgtcggtttcgttttcgttatagagttcgtagtacgtcgtcgtcgtagtttaggttacgtgagtatttacgcgcgcgttttgttagcggatttattatcggtttgtttagattaggttttgtttattttgattttttaaatggtacgtgggaggacgttcgtttttttcggatttaagagttatcgtaatattttagaaggggagaaaaggagcgagggcggtaggcgatagagaatttcgcgagttagcggtttcgcgtagatttttttaggtacggtttttgcggttacgtcggttgttcggcgtttgcgtaatttttttttttttagcgaaatcgaggttttcggag

SEQ ID NO: 33824 - DNA, 792 bp, Artificial Sequence
  chemically treated genomic DNA (Homo sapiens) CpG-island No: 33824
ctccgaaaacctcgatttcgctaaaaaaaaaaaaattacgcaaacgccgaacaaccgacgtaaccgcaaaaaccgtacctaaaaaaatctacgcgaaaccgctaactcgcgaaattctctatcgcctaccgccctcgctccttttctccccttctaaaatattacgataactcttaaatccgaaaaaaacgaacgtcctcccacgtaccatttaaaaaatcaaaataaacaaaacctaatctaaacaaaccgataataaatccgctaacaaaacgcgcgcgtaaatactcacgtaacctaaactacgacgacgacgtactacgaactctataacgaaaacgaaaccgacgaacgaaaccgcgcgaccgcgtaacgcgaaacgttcgaaaacgcgcgtcgtaaaacgtcttaattaccacgacaaacgcgcgcgcgaaaccttaaaaacctcgaaaccgacccccgacgaacgcaacgacgcccaatataaaaaaataaaaactaatccgtaccgcgacgaccgcgcaaaaaactctcgaaacaacgccgaaacgcccgaaatctaaaaaacgcaaataaaacgcgaaaaaattcacccctacgcgatcccttaaataaacgaaataaacgccccaaaccccgcgaactcgactaaaaaactaaacgaacgacgatcacgaaacaaaaataaaaaaaataaaaacctcatccgaatctcaaaaataaaattttcgaaaaaaaaaacgatttcgaaaaaaaataatttaaaaaattattctcaatcccttctct

SEQ ID NO: 33825 - DNA, 989 bp, Artificial Sequence
  chemically treated genomic DNA (Homo sapiens) CpG-island No: 33825
tcgcggcgtagtcgttttttttattttataggatgaatttaaaggcgcgtagaggcgtttttttacggcgcgtgatattagagaagggggataaattggcgagttggtatttttttcgtttttattgacggattcgcgagcggagtgagcggtgatttagttcgtttcggttcggtttcgttttttcgtttttcgtttcggcgttttcgtttcggttttggtttttttatttttttcgtttcggttttggtttttagtttttcgttgtttttttcggttttttgattttcgaattttagtttttcgttttttcgttcgggttttacgttttcggttcgttttttagttttttgttcggttttgtattttcgtttttttagtttcggaacgtattagggttgtacgcgtagggagtagttttcgggacgggtttgcgggtttcgcgtcgttcggttattttattttcgtttttgtttaggattttgtagtataggttttgtagtagaacgttcggcgatttttggttcggggtcgttattttcgttcggagtcgtgtacggtggttcgggtagagtcgttattgtcgtcgtacgcgtagggatcgcggttcgcgttttttttgcgtttcgtaagttttttgtttttgataggttaaggcgcgggcgtcgtcggttattagggcgttattttaacggaattcgtcgaaagcgcgggcgttttttataatgtttcgttttttttttgcgtcgcggtcgcgcgtgcggttgtttaagcgttttcggttttgtttggtgtattttttttgttgttgttcggtcggtcgagaaagtttcgggcgataggtggttcgaggttttcgagttgcgcggatagagcggtttcggagtcgcgagcgtgacgggtttgtttggagggtatttggtggtcggtagtattataaaggttataatttggtgtgtgggtgtgggggtgtgtgtgttaacggtatt

SEQ ID NO: 33826 - DNA, 989 bp, Artificial Sequence
  chemically treated genomic DNA (Homo sapiens) CpG-island No: 33826
aataccgttaacacacacacccccacacccacacaccaaattataacctttataatactaccgaccaccaaataccctccaaacaaacccgtcacgctcgcgactccgaaaccgctctatccgcgcaactcgaaaacctcgaaccacctatcgcccgaaactttctcgaccgaccgaacaacaacaaaaaaaatacaccaaacaaaaccgaaaacgcttaaacaaccgcacgcgcgaccgcgacgcaaaaaaaaaacgaaacattataaaaaacgcccgcgctttcgacgaattccgttaaaataacgccctaataaccgacgacgcccgcgccttaacctatcaaaaacaaaaaacttacgaaacgcaaaaaaaacgcgaaccgcgatccctacgcgtacgacgacaataacgactctacccgaaccaccgtacacgactccgaacgaaaataacgaccccgaaccaaaaatcgccgaacgttctactacaaaacctatactacaaaatcctaaacaaaaacgaaaataaaataaccgaacgacgcgaaacccgcaaacccgtcccgaaaactactccctacgcgtacaaccctaatacgttccgaaactaaaaaaacgaaaatacaaaaccgaacaaaaaactaaaaaacgaaccgaaaacgtaaaacccgaacgaaaaaacgaaaaactaaaattcgaaaatcaaaaaaccgaaaaaaacaacgaaaaactaaaaaccaaaaccgaaacgaaaaaaataaaaaaaccaaaaccgaaacgaaaacgccgaaacgaaaaacgaaaaaacgaaaccgaaccgaaacgaactaaatcaccgctcactccgctcgcgaatccgtcaataaaaacgaaaaaaataccaactcgccaatttatcccccttctctaatatcacgcgccgtaaaaaaacgcctctacgcgcctttaaattcatcctataaaataaaaaaaacgactacgccgcga

SEQ ID NO: 33827 - DNA, 989 bp, Artificial Sequence
  chemically treated genomic DNA (Homo sapiens) CpG-island No: 33827
aatgtcgttaatatatatatttttatatttatatattaaattatggtttttatggtgttatcggttattaagtgttttttaagtaagttcgttacgttcgcgatttcggggtcgttttgttcgcgtagttcgagggtttcgggttatttgtcgttcggaattttttcggtcgatcgggtagtagtagggggaatgtattagatagggtcgggaacgtttaggtagtcgtacgcgcggtcgcggcgtagggaagaagcggggtattgtgggaagcgttcgcgttttcggcgggtttcgttaaaatggcgttttggtggtcggcggcgttcgcgttttagtttgttaggagtagggagtttgcggggcgtaggaagggcgcgggtcgcggtttttgcgcgtgcggcggtagtggcggttttgttcggattatcgtgtacggtttcgggcgaggatggcgatttcggattagaagtcgtcgaacgttttgttgtagaatttgtgttgtaggattttgggtaggagcgaaggtagagtggtcgggcgacgcgaagttcgtagattcgtttcgggggttgttttttgcgcgtgtagttttaatacgtttcggggttggaggaacgaggatgtagggtcgggtagagggttgggggacgggtcgaggacgtggggttcggacgagggagcggagggttggggttcgagggttagggagtcggggaggatagcggagggttgggggttaggatcggggcggagggagtggagaggttaaggtcggggcgagaacgtcggggcgggaggcgggagggcggagtcgagtcggagcgggttgagttatcgtttatttcgttcgcgggttcgttagtgaggacgggaggaatgttagttcgttaatttattttttttttttggtgttacgcgtcgtgggagggcgtttttgcgcgtttttgggtttattttgtggggtggagagagcggttgcgtcgcgg

SEQ ID NO: 33828 - DNA, 989 bp, Artificial Sequence
  chemically treated genomic DNA (Homo sapiens) CpG-island No: 33828
ccgcgacgcaaccgctctctccaccccacaaaataaacccaaaaacgcgcaaaaacgccctcccacgacgcgtaacaccaaaaaaaaaaaataaattaacgaactaacattcctcccgtcctcactaacgaacccgcgaacgaaataaacgataactcaacccgctccgactcgactccgccctcccgcctcccgccccgacgttctcgccccgaccttaacctctccactccctccgccccgatcctaacccccaaccctccgctatcctccccgactccctaaccctcgaaccccaaccctccgctccctcgtccgaaccccacgtcctcgacccgtcccccaaccctctacccgaccctacatcctcgttcctccaaccccgaaacgtattaaaactacacgcgcaaaaaacaacccccgaaacgaatctacgaacttcgcgtcgcccgaccactctaccttcgctcctacccaaaatcctacaacacaaattctacaacaaaacgttcgacgacttctaatccgaaatcgccatcctcgcccgaaaccgtacacgataatccgaacaaaaccgccactaccgccgcacgcgcaaaaaccgcgacccgcgcccttcctacgccccgcaaactccctactcctaacaaactaaaacgcgaacgccgccgaccaccaaaacgccattttaacgaaacccgccgaaaacgcgaacgcttcccacaataccccgcttcttccctacgccgcgaccgcgcgtacgactacctaaacgttcccgaccctatctaatacattccccctactactacccgatcgaccgaaaaaattccgaacgacaaataacccgaaaccctcgaactacgcgaacaaaacgaccccgaaatcgcgaacgtaacgaacttacttaaaaaacacttaataaccgataacaccataaaaaccataatttaatatataaatataaaaatatatatattaacgacatt

SEQ ID NO: 33829 - DNA, 633 bp, Artificial Sequence
  chemically treated genomic DNA (Homo sapiens) CpG-island No: 33829
aaataaggcgaggttgtttttttgttatatcgtcggttgtcgaatttattcgcgagttcggtttattggggaggtaacgcggttaggttataggggacgatttttagtttaaaaatttcgttaaaggttttcgcgcgtttcggagcgcgtgaatttatcggtagcgttaggttcgaagtggtttacggatcgagcggcgcgtttgggcgtagagcgggttttttagaggattttggttagggatttgtttcgcggtttttttttttcgtagttttattttgtttcgagcggcggttgttcgttcgtttcgataaaggtaggcgtagtagcgggtttgcgttttaatatcgtagagtcgttggagtggcgtaagacgttttttttttcgttaggtgcggacggagttttatacggaggttttatttttttttaagatacgaagaacgtgtagagttgcgaggtgtgtgttggtatcgttcgttttttgcgttataacggcgggcggttgtagtttttttttcgtttggtttcggcgcgtcgatagtttttttgtttttttattggcggtaatattgcgggttcggttgttgagtttaagtttggtgaaaaagttcgcggttagggttttttttg

SEQ ID NO: 33830 - DNA, 633 bp, Artificial Sequence
  chemically treated genomic DNA (Homo sapiens) CpG-island No: 33830
caaaaaaaaccctaaccgcgaactttttcaccaaacttaaactcaacaaccgaacccgcaatattaccgccaataaaaaaacaaaaaaactatcgacgcgccgaaaccaaacgaaaaaaaaactacaaccgcccgccgttataacgcaaaaaacgaacgataccaacacacacctcgcaactctacacgttcttcgtatcttaaaaaaaaataaaacctccgtataaaactccgtccgcacctaacgaaaaaaaaaacgtcttacgccactccaacgactctacgatattaaaacgcaaacccgctactacgcctacctttatcgaaacgaacgaacaaccgccgctcgaaacaaaataaaactacgaaaaaaaaaaaccgcgaaacaaatccctaaccaaaatcctctaaaaaacccgctctacgcccaaacgcgccgctcgatccgtaaaccacttcgaacctaacgctaccgataaattcacgcgctccgaaacgcgcgaaaacctttaacgaaatttttaaactaaaaatcgtcccctataacctaaccgcgttacctccccaataaaccgaactcgcgaataaattcgacaaccgacgatataacaaaaaaacaacctcgccttattt

SEQ ID NO: 33831 - DNA, 633 bp, Artificial Sequence
  chemically treated genomic DNA (Homo sapiens) CpG-island No: 33831
tagggaaagttttggtcgcgagtttttttattaggtttgagtttagtagtcgggttcgtagtgttgtcgttagtggggaggtagggaggttgtcggcgcgtcggagttaggcgggaaagggattatagtcgttcgtcgttgtagcgtaggaagcgggcggtgttaatatatatttcgtagttttgtacgtttttcgtgttttggaggagagtagagttttcgtgtgaagtttcgttcgtatttgacgaagaggagggcgttttgcgttattttagcgattttgcgatgttaagacgtagattcgttgttgcgtttgtttttgtcggggcgggcgggtagtcgtcgttcggagtaaggtggggttgcggggagggagagtcgcggggtagatttttggttaaggttttttagaaagttcgttttgcgtttaaacgcgtcgttcggttcgtgggttatttcggatttgacgttgtcggtgaatttacgcgtttcgggacgcgcggggatttttgacgaggtttttgaattggggatcgttttttgtaatttggtcgcgttatttttttagtgagtcggattcgcgggtgggttcggtagtcggcgatgtggtaaaaaggtaatttcgttttattt

SEQ ID NO: 33832 - DNA, 633 bp, Artificial Sequence
  chemically treated genomic DNA (Homo sapiens) CpG-island No: 33832
aaataaaacgaaattacctttttaccacatcgccgactaccgaacccacccgcgaatccgactcactaaaaaaataacgcgaccaaattacaaaaaacgatccccaattcaaaaacctcgtcaaaaatccccgcgcgtcccgaaacgcgtaaattcaccgacaacgtcaaatccgaaataacccacgaaccgaacgacgcgtttaaacgcaaaacgaactttctaaaaaaccttaaccaaaaatctaccccgcgactctccctccccgcaaccccaccttactccgaacgacgactacccgcccgccccgacaaaaacaaacgcaacaacgaatctacgtcttaacatcgcaaaatcgctaaaataacgcaaaacgccctcctcttcgtcaaatacgaacgaaacttcacacgaaaactctactctcctccaaaacacgaaaaacgtacaaaactacgaaatatatattaacaccgcccgcttcctacgctacaacgacgaacgactataatccctttcccgcctaactccgacgcgccgacaacctccctacctccccactaacgacaacactacgaacccgactactaaactcaaacctaataaaaaaactcgcgaccaaaactttcccta

SEQ ID NO: 33833 - DNA, 555 bp, Artificial Sequence
  chemically treated genomic DNA (Homo sapiens) CpG-island No: 33833
tttggattgcgggcggggtggtaaggttgagtgcgggcgaggcgttcgtttcgcgatggcgtcgttttttttattgcgttttcgtttttttgagtgtttggtaggtatcggcgtcggtcggggcggcgttgaatcgggcgttcgggttggaggttagttttttcgggtagtcgtaggtttagttttgtcgcggtcgttcggtttgcgttattcgttttcgttcgggatttgtgaagttgttttgacgtggtagtagtttcgtggcggtcggttattatttagtcgtcgttcgttcggtgaagtcggtttgggaaggtgtaggagcgagcggcgttttcgttttttcgtttcggttttgttcgttgtaggcgaggttcgggattttcgggttttcgagagttcggagggggcgtcgggtttcggttgtaaagttgttcgtagtcggttgttcgcgcgcggtttcgtagggtttgggaaaggttttgtttttagatttagttgttgttgcgaggggcgggggttaagtgaggagggggaaagttagtgataaggaaa

SEQ ID NO: 33834 - DNA, 555 bp, Artificial Sequence
  chemically treated genomic DNA (Homo sapiens) CpG-island No: 33834
tttccttatcactaactttccccctcctcacttaacccccgcccctcgcaacaacaactaaatctaaaaacaaaacctttcccaaaccctacgaaaccgcgcgcgaacaaccgactacgaacaactttacaaccgaaacccgacgccccctccgaactctcgaaaacccgaaaatcccgaacctcgcctacaacgaacaaaaccgaaacgaaaaaacgaaaacgccgctcgctcctacaccttcccaaaccgacttcaccgaacgaacgacgactaaataataaccgaccgccacgaaactactaccacgtcaaaacaacttcacaaatcccgaacgaaaacgaataacgcaaaccgaacgaccgcgacaaaactaaacctacgactacccgaaaaaactaacctccaacccgaacgcccgattcaacgccgccccgaccgacgccgatacctaccaaacactcaaaaaaacgaaaacgcaataaaaaaaacgacgccatcgcgaaacgaacgcctcgcccgcactcaaccttaccaccccgcccgcaatccaaa

SEQ ID NO: 33835 - DNA, 555 bp, Artificial Sequence
  chemically treated genomic DNA (Homo sapiens) CpG-island No: 33835
tttttttgttattggttttttttttttttatttaattttcgtttttcgtaatagtaattgaatttaaaaataaagttttttttagattttgcgggatcgcgcgcgggtagtcggttgcggatagttttgtagtcggagttcggcgtttttttcgagttttcgagggttcgggggtttcggatttcgtttatagcgggtagggtcgggacgagaggacgaggacgtcgttcgtttttgtatttttttaagtcggttttatcgggcgggcggcggttgggtagtgatcgatcgttacgaagttattgttacgttagggtaattttataaatttcggacgagggcgggtgacgtaagtcgggcggtcgcggtagggttgggtttgcgattattcgaggaggttgatttttagttcgggcgttcggtttagcgtcgtttcggtcggcgtcggtgtttgttaggtatttagggaggcgggggcgtagtggaggaggcggcgttatcgcgaagcgagcgtttcgttcgtatttagttttgttatttcgttcgtagtttagg

SEQ ID NO: 33836 - DNA, 555 bp, Artificial Sequence
  chemically treated genomic DNA (Homo sapiens) CpG-island No: 33836
cctaaactacgaacgaaataacaaaactaaatacgaacgaaacgctcgcttcgcgataacgccgcctcctccactacgcccccgcctccctaaatacctaacaaacaccgacgccgaccgaaacgacgctaaaccgaacgcccgaactaaaaatcaacctcctcgaataatcgcaaacccaaccctaccgcgaccgcccgacttacgtcacccgccctcgtccgaaatttataaaattaccctaacgtaacaataacttcgtaacgatcgatcactacccaaccgccgcccgcccgataaaaccgacttaaaaaaatacaaaaacgaacgacgtcctcgtcctctcgtcccgaccctacccgctataaacgaaatccgaaacccccgaaccctcgaaaactcgaaaaaaacgccgaactccgactacaaaactatccgcaaccgactacccgcgcgcgatcccgcaaaatctaaaaaaaactttatttttaaattcaattactattacgaaaaacgaaaattaaataaaaaaaaaaaaaaccaataacaaaaaaa

SEQ ID NO: 33837 - DNA, 618 bp, Artificial Sequence
  chemically treated genomic DNA (Homo sapiens) CpG-island No: 33837
gaggcgcgatttttttttttatttttaggagggtaaaaaagcgggaataatggtttttaggacggagggatataaatatttaatgtcgtagcgattgggagggtcgcgatgtaggaggacgaaatgggagaagggggataagggggatttcggtttttttgcgggcgggagttaggtcgttggaaagttcgttcgtttttcgtcggtaagggatgacgttttgggttttttgtattattcgttacggaaaatggttatacgtttttgtttttaagtcgaatattattagaaatacggggtttttggaagtcgttattttggttattggcggtggcgtatttattttcgtgttattgcgcgtgcgcggcgttgcgatatatttcgattttatttcgcgtttttagggggcggtgggaagcggaagtgtttcgttgattcgggagggcggtttttagtttatattggttgttgttagcggtttttgaggttttaggtttttggcggtgaagtaagagggacgcggaggtggtgatggttttgatgggggcgggggttgacggggtcgtggggttatggggttatgggtgaacgtttttgtgggtgatagggtggttttat

SEQ ID NO: 33838 - DNA, 618 bp, Artificial Sequence
  chemically treated genomic DNA (Homo sapiens) CpG-island No: 33838
ataaaaccaccctatcacccacaaaaacgttcacccataaccccataaccccacgaccccgtcaacccccgcccccatcaaaaccatcaccacctccgcgtccctcttacttcaccgccaaaaacctaaaacctcaaaaaccgctaacaacaaccaatataaactaaaaaccgccctcccgaatcaacgaaacacttccgcttcccaccgccccctaaaaacgcgaaataaaatcgaaatatatcgcaacgccgcgcacgcgcaataacacgaaaataaatacgccaccgccaataaccaaaataacgacttccaaaaaccccgtatttctaataatattcgacttaaaaacaaaaacgtataaccattttccgtaacgaataatacaaaaaacccaaaacgtcatcccttaccgacgaaaaacgaacgaactttccaacgacctaactcccgcccgcaaaaaaaccgaaatcccccttatcccccttctcccatttcgtcctcctacatcgcgaccctcccaatcgctacgacattaaatatttatatccctccgtcctaaaaaccattattcccgcttttttaccctcctaaaaataaaaaaaaaaatcgcgcctc

SEQ ID NO: 33839 - DNA, 618 bp, Artificial Sequence
  chemically treated genomic DNA (Homo sapiens) CpG-island No: 33839
gtagagttattttgttatttataaaggcgtttatttatggttttatgattttacgatttcgttaattttcgtttttattaaaattattattattttcgcgttttttttattttatcgttaagagtttgaaattttagaggtcgttgataatagttagtgtgaattagggatcgttttttcgggttagcggagtattttcgttttttatcgttttttgggaacgcgggatggggtcggagtgtgtcgtagcgtcgcgtacgcgtagtagtacgggggtgggtgcgttatcgttaatggttaagatggcggtttttagggatttcgtgtttttgatagtgttcggtttgaggataaaagcgtgtgattatttttcgtggcgagtggtataaaaggtttagggcgttattttttgtcggcgagaggcgagcggattttttagcggtttagttttcgttcgtagggaggtcgaagttttttttgtttttttttttttatttcgtttttttgtatcgcgatttttttagtcgttgcggtattgggtgtttgtgttttttcgttttgaaagttattgttttcgtttttttatttttttgggaataggaaaaagagtcgcgtttt

SEQ ID NO: 33840 - DNA, 618 bp, Artificial Sequence
  chemically treated genomic DNA (Homo sapiens) CpG-island No: 33840
aaaacgcgactctttttcctattcccaaaaaaataaaaaaacgaaaacaataactttcaaaacgaaaaaacacaaacacccaataccgcaacgactaaaaaaatcgcgatacaaaaaaacgaaataaaaaaaaaaaaacaaaaaaaacttcgacctccctacgaacgaaaactaaaccgctaaaaaatccgctcgcctctcgccgacaaaaaataacgccctaaaccttttataccactcgccacgaaaaataatcacacgcttttatcctcaaaccgaacactatcaaaaacacgaaatccctaaaaaccgccatcttaaccattaacgataacgcacccacccccgtactactacgcgtacgcgacgctacgacacactccgaccccatcccgcgttcccaaaaaacgataaaaaacgaaaatactccgctaacccgaaaaaacgatccctaattcacactaactattatcaacgacctctaaaatttcaaactcttaacgataaaataaaaaaaacgcgaaaataataataattttaataaaaacgaaaattaacgaaatcgtaaaatcataaaaccataaataaacgcctttataaataacaaaataactctac

SEQ ID NO: 33841 - DNA, 663 bp, Artificial Sequence
  chemically treated genomic DNA (Homo sapiens) CpG-island No: 33841
ttttcgaataattggacggtttaagttttgagcgtttggttattcgggtaatcgtatggtttttcgatatatatttcgcgtttgcgtattgtttttgtagcgggggtggggggattcggttcggagattttatttcggggtttaaattcgagtttaaaagattgggtttcgttgtgtcgttttcgggtcgcgcgacgttgtgggtcgttttttttttttcggagtgatttaatataggataacgaaatttgtattgtttcgagcgtttttttttcggttcgtcgcgtttgcgaggcgaggtcgggaggcgagggttttgcgtacgcgcggcgtaggcgtattgggcgtcggtgttgttgtttttaggtgattacggattcgttatcgtgagttttaggtgggcgcgcggggtttacgtagggtaggaggttagtttcggggggatcgggttcgggattttgcggaatttggaggtcgaagttcgcgcgtacgtagggtttttgttgtttttttaacgtttgttgcgtggtcgtaggattcgtcgttttttcggttgggtcgtttagtttcgggtcgggcgcgtgtatttagagttttcgcgtttttagttcggtttttttgttggattgtagcgtcggttgggtattaggagtataaagcgaa

SEQ ID NO: 33842 - DNA, 663 bp, Artificial Sequence
  chemically treated genomic DNA (Homo sapiens) CpG-island No: 33842
ttcgctttatactcctaatacccaaccgacgctacaatccaacaaaaaaaccgaactaaaaacgcgaaaactctaaatacacgcgcccgacccgaaactaaacgacccaaccgaaaaaacgacgaatcctacgaccacgcaacaaacgttaaaaaaacaacaaaaaccctacgtacgcgcgaacttcgacctccaaattccgcaaaatcccgaacccgatccccccgaaactaacctcctaccctacgtaaaccccgcgcgcccacctaaaactcacgataacgaatccgtaatcacctaaaaacaacaacaccgacgcccaatacgcctacgccgcgcgtacgcaaaaccctcgcctcccgacctcgcctcgcaaacgcgacgaaccgaaaaaaaaacgctcgaaacaatacaaatttcgttatcctatattaaatcactccgaaaaaaaaaaaacgacccacaacgtcgcgcgacccgaaaacgacacaacgaaacccaatcttttaaactcgaatttaaaccccgaaataaaatctccgaaccgaatccccccacccccgctacaaaaacaatacgcaaacgcgaaatatatatcgaaaaaccatacgattacccgaataaccaaacgctcaaaacttaaaccgtccaattattcgaaaa

SEQ ID NO: 33843 - DNA, 663 bp, Artificial Sequence
  chemically treated genomic DNA (Homo sapiens) CpG-island No: 33843
ttcgttttgtatttttggtgtttagtcggcgttgtaatttagtagaggagtcggattagaaacgcggaagttttgggtgtacgcgttcggttcgggattgggcggtttaatcgggagggcggcgggttttgcggttacgtaataggcgttggggaagtagtagagattttgcgtgcgcgcgggtttcggtttttagatttcgtagagtttcgggttcgattttttcggggttggttttttgttttacgtgggtttcgcgcgtttatttggaatttacgatggcgaattcgtggttatttgaaggtaatagtatcggcgtttagtgcgtttgcgtcgcgcgtgcgtagagttttcgtttttcggtttcgtttcgtagacgcgacgggtcggggaggaagcgttcggagtagtgtaggtttcgttattttgtgttaggttatttcggagaggggaaagcggtttatagcgtcgcgcgattcggaaacgatataacgaggtttaattttttagattcgagtttaggtttcggggtggagttttcggatcgggtttttttattttcgttataggggtagtgcgtaggcgcgaggtatgtatcgagagattatgcggttgttcgggtaattagacgtttaggatttggatcgtttagttgttcggagg

SEQ ID NO: 33844 - DNA, 663 bp, Artificial Sequence
  chemically treated genomic DNA (Homo sapiens) CpG-island No: 33844
cctccgaacaactaaacgatccaaatcctaaacgtctaattacccgaacaaccgcataatctctcgatacatacctcgcgcctacgcactacccctataacgaaaataaaaaaacccgatccgaaaactccaccccgaaacctaaactcgaatctaaaaaattaaacctcgttatatcgtttccgaatcgcgcgacgctataaaccgctttcccctctccgaaataacctaacacaaaataacgaaacctacactactccgaacgcttcctccccgacccgtcgcgtctacgaaacgaaaccgaaaaacgaaaactctacgcacgcgcgacgcaaacgcactaaacgccgatactattaccttcaaataaccacgaattcgccatcgtaaattccaaataaacgcgcgaaacccacgtaaaacaaaaaaccaaccccgaaaaaatcgaacccgaaactctacgaaatctaaaaaccgaaacccgcgcgcacgcaaaatctctactacttccccaacgcctattacgtaaccgcaaaacccgccgccctcccgattaaaccgcccaatcccgaaccgaacgcgtacacccaaaacttccgcgtttctaatccgactcctctactaaattacaacgccgactaaacaccaaaaatacaaaacgaa

SEQ ID NO: 33845 - DNA, 673 bp, Artificial Sequence
  chemically treated genomic DNA (Homo sapiens) CpG-island No: 33845
tttacgcgcggggtggggtgggtcgtttatttttttcgcgtttttaatttatagggaaacgggttgcgcgttcgggtcgtttcgtagagtttagatgtttaaattttttttagtttgtttttttatttgcggtttgtacgttcgtcgtagttatatttaacgtcgggacgcgtaaaaatatttgtcgggtttattttttttcgggtattatttatagtcgtttttaggttttttcggaaaatattttttgtcggaaatataattttaggtttttagagcgtagggggtttagcgtcggatttacgcggagtttacgagtcggatagtcgtcgtagagtaggttggggtcgcgcggcgtacgtcgggagggcgcgcgatagtacgtgaacgcggcgtgtcgtacggttcgggaagggcggggtgcgcgttgatcggttcgtgcgtcgtaggtagtagttaattcgcgcggattatttttaggtttcgttttcgtcggtttcgttacgttttcgtcgggttcgtagttgttttcggggttcgggatttagttggtttaggcgttcgaggtgtatttgggaggaagtaggcgcggggtgtaatggagggtggaggcgcgtatcgtgtttagagcggggttttcgggagttgatgtttcgtttggtttttttatttt

SEQ ID NO: 33846 - DNA, 673 bp, Artificial Sequence
  chemically treated genomic DNA (Homo sapiens) CpG-island No: 33846
aaaataaaaaaaccaaacgaaacatcaactcccgaaaaccccgctctaaacacgatacgcgcctccaccctccattacaccccgcgcctacttcctcccaaatacacctcgaacgcctaaaccaactaaatcccgaaccccgaaaacaactacgaacccgacgaaaacgtaacgaaaccgacgaaaacgaaacctaaaaataatccgcgcgaattaactactacctacgacgcacgaaccgatcaacgcgcaccccgcccttcccgaaccgtacgacacgccgcgttcacgtactatcgcgcgccctcccgacgtacgccgcgcgaccccaacctactctacgacgactatccgactcgtaaactccgcgtaaatccgacgctaaaccccctacgctctaaaaacctaaaattatatttccgacaaaaaatattttccgaaaaaacctaaaaacgactataaataatacccgaaaaaaaataaacccgacaaatatttttacgcgtcccgacgttaaatataactacgacgaacgtacaaaccgcaaataaaaaaacaaactaaaaaaaatttaaacatctaaactctacgaaacgacccgaacgcgcaacccgtttccctataaattaaaaacgcgaaaaaaataaacgacccaccccaccccgcgcgtaaa

SEQ ID NO: 33847 - DNA, 673 bp, Artificial Sequence
  chemically treated genomic DNA (Homo sapiens) CpG-island No: 33847
gaggtaggggggttagacgggatattagttttcgggagtttcgttttgggtacggtgcgcgtttttattttttattgtatttcgcgtttgtttttttttaggtgtatttcgggcgtttaagttagttgggtttcgggtttcgggagtagttgcgggttcgacgggggcgtggcgggatcggcgggggcggggtttgggggtggttcgcgcggattggttgttgtttgcggcgtacgagtcggttagcgcgtatttcgtttttttcgggtcgtgcggtacgtcgcgtttacgtgttgtcgcgcgttttttcggcgtgcgtcgcgcggttttagtttgttttgcggcgattgttcggttcgtgagtttcgcgtggattcggcgttgggttttttacgttttggggatttggggttgtgttttcggtaaaggatgtttttcgagaaggtttgggagcggttgtaaataatattcgagaggaaataggttcggtaggtgtttttgcgcgtttcggcgttgggtgtggttgcggcgggcgtgtaggtcgtagatgaggaaatagattaggagggatttaggtatttggattttgcggggcggttcgggcgcgtagttcgtttttttgtgggttgagggcgcgggagaagtgggcggtttattttatttcgcgcgtgga

SEQ ID NO: 33848 - DNA, 673 bp, Artificial Sequence
  chemically treated genomic DNA (Homo sapiens) CpG-island No: 33848
tccacgcgcgaaataaaataaaccgcccacttctcccgcgccctcaacccacaaaaaaacgaactacgcgcccgaaccgccccgcaaaatccaaatacctaaatccctcctaatctatttcctcatctacgacctacacgcccgccgcaaccacacccaacgccgaaacgcgcaaaaacacctaccgaacctatttcctctcgaatattatttacaaccgctcccaaaccttctcgaaaaacatcctttaccgaaaacacaaccccaaatccccaaaacgtaaaaaacccaacgccgaatccacgcgaaactcacgaaccgaacaatcgccgcaaaacaaactaaaaccgcgcgacgcacgccgaaaaaacgcgcgacaacacgtaaacgcgacgtaccgcacgacccgaaaaaaacgaaatacgcgctaaccgactcgtacgccgcaaacaacaaccaatccgcgcgaaccacccccaaaccccgcccccgccgatcccgccacgcccccgtcgaacccgcaactactcccgaaacccgaaacccaactaacttaaacgcccgaaatacacctaaaaaaaaacaaacgcgaaatacaataaaaaataaaaacgcgcaccgtacccaaaacgaaactcccgaaaactaatatcccgtctaacccccctacctc

SEQ ID NO: 33849 - DNA, 632 bp, Artificial Sequence
  chemically treated genomic DNA (Homo sapiens) CpG-island No: 33849
tatcgggtcgtagtcgcgtggagagattagcgttcgtcgcggggattgagattttcggaggtttcggttgcgttggttcggttttcgtttttcgcgacgggtttaaagtcgcgggtttgcgtttagcgtttttcgggaaggcgcgttcgttttaggtttcgttaggttatttattcggggtcgtcggggcgttatttattcggttcgttcggtcgattttgtttatgagtcgcgtcggcggtagagcggagtcgggcggtatttcgcggaaattcgttagcggtaggaggtttcggcggcgtttatttttcgttgagtttttagggcgttcggcggcgcggggttagggagcgcgggttgtcgggagagcgcgttcgcgtttgcgtttcgtttgcgtttgcgtttgtttcggtttttgcgtttgcgtcgagggcgttttgtcgtattgttttttgttcgcgggaggatcgtattgtacgttttttttcgtcggcgtttttttattattaagaggtgtcgttttggcgtatattttcgaaattttataaggtttggggagcgcggtagcgtttttagatggtgaggaggagaagtggttcgaggtcgggttttttgataggggaggtggggga

SEQ ID NO: 33850 - DNA, 632 bp, Artificial Sequence
  chemically treated genomic DNA (Homo sapiens) CpG-island No: 33850
tcccccacctcccctatcaaaaaacccgacctcgaaccacttctcctcctcaccatctaaaaacgctaccgcgctccccaaaccttataaaatttcgaaaatatacgccaaaacgacacctcttaataataaaaaaacgccgacgaaaaaaaacgtacaatacgatcctcccgcgaacaaaaaacaatacgacaaaacgccctcgacgcaaacgcaaaaaccgaaacaaacgcaaacgcaaacgaaacgcaaacgcgaacgcgctctcccgacaacccgcgctccctaaccccgcgccgccgaacgccctaaaaactcaacgaaaaataaacgccgccgaaacctcctaccgctaacgaatttccgcgaaataccgcccgactccgctctaccgccgacgcgactcataaacaaaatcgaccgaacgaaccgaataaataacgccccgacgaccccgaataaataacctaacgaaacctaaaacgaacgcgccttcccgaaaaacgctaaacgcaaacccgcgactttaaacccgtcgcgaaaaacgaaaaccgaaccaacgcaaccgaaacctccgaaaatctcaatccccgcgacgaacgctaatctctccacgcgactacgacccgata

SEQ ID NO: 33851 - DNA, 632 bp, Artificial Sequence
  chemically treated genomic DNA (Homo sapiens) CpG-island No: 33851
ttttttattttttttattagaaagttcggtttcggattattttttttttttattatttgggggcgttgtcgcgttttttaagttttgtggaatttcgaaaatgtgcgttagggcgatattttttgatggtaagaagacgtcggcggaggggagcgtgtagtgcggttttttcgcgggtagggggtagtgcggtaaggcgttttcggcgtaggcgtagaggtcgaagtaggcgtaggcgtaggcggggcgtaggcgcgggcgcgttttttcggtagttcgcgttttttgatttcgcgtcgtcgagcgttttgaggatttagcgaagggtgggcgtcgtcgaggttttttgtcgttggcgggttttcgcggagtgtcgttcggtttcgttttgtcgtcggcgcggtttatgggtagagtcggtcgggcgggtcgggtaagtggcgtttcggcggtttcgggtgggtggtttggcgggatttgaggcgggcgcgttttttcgggaggcgttagacgtaagttcgcggttttaggttcgtcgcgaggggcggaggtcgggttagcgtagtcggagttttcgagggttttagttttcgcggcgggcgttggtttttttacgcggttgcggttcggta

SEQ ID NO: 33852 - DNA, 632 bp, Artificial Sequence
  chemically treated genomic DNA (Homo sapiens) CpG-island No: 33852
taccgaaccgcaaccgcgtaaaaaaaccaacgcccgccgcgaaaactaaaaccctcgaaaactccgactacgctaacccgacctccgcccctcgcgacgaacctaaaaccgcgaacttacgtctaacgcctcccgaaaaaacgcgcccgcctcaaatcccgccaaaccacccacccgaaaccgccgaaacgccacttacccgacccgcccgaccgactctacccataaaccgcgccgacgacaaaacgaaaccgaacgacactccgcgaaaacccgccaacgacaaaaaacctcgacgacgcccacccttcgctaaatcctcaaaacgctcgacgacgcgaaatcaaaaaacgcgaactaccgaaaaaacgcgcccgcgcctacgccccgcctacgcctacgcctacttcgacctctacgcctacgccgaaaacgccttaccgcactaccccctacccgcgaaaaaaccgcactacacgctcccctccgccgacgtcttcttaccatcaaaaaatatcgccctaacgcacattttcgaaattccacaaaacttaaaaaacgcgacaacgcccccaaataataaaaaaaaaaaataatccgaaaccgaactttctaataaaaaaaataaaaaa

SEQ ID NO: 33853 - DNA, 699 bp, Artificial Sequence
  chemically treated genomic DNA (Homo sapiens) CpG-island No: 33853
  unsure (661)
gtttttttttgtttcgtggagtttataagataggcggtagttttaaggtcggtaagtttcgcgtttggggggttgcgggtcgtttttgcgggatcggggggatttgggcgggatagggcggttcggtttacgtttcggttttttttagtagttcgagggcgttcggagtttacggttggcgtcgtttcgcgttttttgtttcgtcgcggattttttttcgcgtcgtgacgcgttaggttttgattaaatatgttttttttttttttttcgttcgtttcgtcgttcgtaggcgtttcgagtcgcggggttgtcgtttggacgtcgttttgtttgggtgtcgcgggtcggtttcgcggggagcgttttcggcgcgatgttttttaggaaaggtaggagtttcggtgacgcggtttacgtttttagcgcgcgcggggatttgagcggtcgtttgtgggtattcgagttttgggttttcgttaggcgcggaagtattgtgtattcgggttgcggcggtgtcgttcggggttaagcgagacgcgtttcgttttgtttttttcgttttgcgttgcgtttcggattcgcgtgtttttttagattcgtattgtttttttcggttttgcgtgtttttttcggtttacgcgtattttttcggtttagcgtnttttttttagtttcgcgtttttttttcggttcgcgttt

SEQ ID NO: 33854 - DNA, 699 bp, Artificial Sequence
  chemically treated genomic DNA (Homo sapiens) CpG-island No: 33854
  unsure (39)
aaacgcgaaccgaaaaaaaaacgcgaaactaaaaaaaanacgctaaaccgaaaaaatacgcgtaaaccgaaaaaaacacgcaaaaccgaaaaaaacaatacgaatctaaaaaaacacgcgaatccgaaacgcaacgcaaaacgaaaaaaacaaaacgaaacgcgtctcgcttaaccccgaacgacaccgccgcaacccgaatacacaatacttccgcgcctaacgaaaacccaaaactcgaatacccacaaacgaccgctcaaatccccgcgcgcgctaaaaacgtaaaccgcgtcaccgaaactcctacctttcctaaaaaacatcgcgccgaaaacgctccccgcgaaaccgacccgcgacacccaaacaaaacgacgtccaaacgacaaccccgcgactcgaaacgcctacgaacgacgaaacgaacgaaaaaaaaaaaaaaaacatatttaatcaaaacctaacgcgtcacgacgcgaaaaaaaatccgcgacgaaacaaaaaacgcgaaacgacgccaaccgtaaactccgaacgccctcgaactactaaaaaaaaccgaaacgtaaaccgaaccgccctatcccgcccaaatccccccgatcccgcaaaaacgacccgcaaccccccaaacgcgaaacttaccgaccttaaaactaccgcctatcttataaactccacgaaacaaaaaaaaac

SEQ ID NO: 33855 - DNA, 699 bp, Artificial Sequence
  chemically treated genomic DNA (Homo sapiens) CpG-island No: 33855
  unsure (39)
agacgcgggtcggaaaggagacgcgaggttggaaagganacgttaggtcgaaggggtacgcgtgggtcggaggggatacgtaggatcggaggagatagtgcggatttggagggatacgcgggttcggggcgtagcgtagggcggaggggataaggcggagcgcgtttcgtttggtttcgggcggtatcgtcgtagttcgggtgtatagtgttttcgcgtttggcgaggatttaaggttcgggtatttataggcggtcgtttaggttttcgcgcgcgttgggggcgtgggtcgcgttatcgggatttttattttttttgaagggtatcgcgtcgggggcgtttttcgcggggtcggttcgcgatatttagataggacgacgtttaagcggtagtttcgcgattcggggcgtttgcgggcggcggggcgggcgagggaggggaaagggatatatttggttaaagtttggcgcgttacggcgcggaggaggattcgcggcgaggtaggaagcgcggggcggcgttagtcgtgagtttcgggcgttttcgggttgttgggggaagtcggggcgtgggtcgggtcgttttgtttcgtttagattttttcggtttcgtaggggcggttcgtagttttttagacgcggaatttgtcggttttgaagttgtcgtttgttttgtggattttacgggataggggaaaat

SEQ ID NO: 33856 - DNA, 699 bp, Artificial Sequence
  chemically treated genomic DNA (Homo sapiens) CpG-island No: 33856
  unsure (661)
attttcccctatcccgtaaaatccacaaaacaaacgacaacttcaaaaccgacaaattccgcgtctaaaaaactacgaaccgcccctacgaaaccgaaaaaatctaaacgaaacaaaacgacccgacccacgccccgacttcccccaacaacccgaaaacgcccgaaactcacgactaacgccgccccgcgcttcctacctcgccgcgaatcctcctccgcgccgtaacgcgccaaactttaaccaaatatatccctttcccctccctcgcccgccccgccgcccgcaaacgccccgaatcgcgaaactaccgcttaaacgtcgtcctatctaaatatcgcgaaccgaccccgcgaaaaacgcccccgacgcgatacccttcaaaaaaaataaaaatcccgataacgcgacccacgcccccaacgcgcgcgaaaacctaaacgaccgcctataaatacccgaaccttaaatcctcgccaaacgcgaaaacactatacacccgaactacgacgataccgcccgaaaccaaacgaaacgcgctccgccttatcccctccgccctacgctacgccccgaacccgcgtatccctccaaatccgcactatctcctccgatcctacgtatcccctccgacccacgcgtaccccttcgacctaacgtntcctttccaacctcgcgtctcctttccgacccgcgtct

SEQ ID NO: 33857 - DNA, 572 bp, Artificial Sequence
  chemically treated genomic DNA (Homo sapiens) CpG-island No: 33857
ttcgttttttcgttttttttcgttttttcgttttttttttttcgttttttcgttttttcgttttttttttttcgttttttttcgttttttttttcgttttttttttcgttttttcgttttttcgttttcgttttttttttttcgttttttttttttttttcgttttttcgttttttttttttcgttttttttttttcgttttttttttttcgtttttttttttttttttttttttgttttttttttttcgttttttttttcgttttttttcgttttttcgttttttttttttttttcgttttttcgttttttcgttttttttcgttttttttcgttttttcgttttttttttcgttttcgttttcgttttttcgttttcgttttttttcgttttttttttttcgttttttcgttttttttttttcgttttttttttttcgttttttttttttttttttttttcgttttttttttttcgttttttttttcgttttttttttttcgttttttttttcgttttttttcgtggaggattttggtatgtgttttttgggtagtttggttggttggga

SEQ ID NO: 33858 - DNA, 572 bp, Artificial Sequence
  chemically treated genomic DNA (Homo sapiens) CpG-island No: 33858
tcccaaccaaccaaactacccaaaaaacacataccaaaatcctccacgaaaaaaaacgaaaaaaaaaacgaaaaaaaaaaaacgaaaaaaaaaacgaaaaaaaaaaaacgaaaaaaaaaaaaaaaaaaaaaacgaaaaaaaaaaaacgaaaaaaaaaaaacgaaaaaacgaaaaaaaaaaaacgaaaaaaaacgaaaacgaaaaaacgaaaacgaaaacgaaaaaaaaaacgaaaaaacgaaaaaaaacgaaaaaaaacgaaaaaacgaaaaaacgaaaaaaaaaaaaaaaacgaaaaaacgaaaaaaaacgaaaaaaaaaacgaaaaaaaaaaaacaaaaaaaaaaaaaaaaaaaaaaacgaaaaaaaaaaaacgaaaaaaaaaaaacgaaaaaaaaaaaacgaaaaaacgaaaaaaaaaaaaaaaacgaaaaaaaaaaaacgaaaacgaaaaaacgaaaaaacgaaaaaaaaaacgaaaaaaaaaacgaaaaaaaacgaaaaaaaaaaaacgaaaaaacgaaaaaacgaaaaaaaaaaaacgaaaaaacgaaaaaaaacgaaaaaacgaa

SEQ ID NO: 33859 - DNA, 572 bp, Artificial Sequence
  chemically treated genomic DNA (Homo sapiens) CpG-island No: 33859
ttttaattaattaaattatttagagggtatatgttaaaattttttacgagagagagcgagagagagagcgagagagagagagcgagagagagagcgagagagagagagcgagagagagagagagagagagagcgagagagagagagcgagagagagagagcgagagagcgagagagagagagcgagagagagcgagagcgagagagcgagagcgagagcgagagagagagcgagagagcgagagagagcgagagagagcgagagagcgagagagcgagagagagagagagagcgagagagcgagagagagcgagagagagagcgagagagagagagtaagagagagagagagagagagagcgagagagagagagcgagagagagagagcgagagagagagagcgagagagcgagagagagagagagagcgagagagagagagcgagagcgagagagcgagagagcgagagagagagcgagagagagagcgagagagagcgagagagagagagcgagagagcgagagagcgagagagagagagcgagagagcgagagagagcgagagagcgag

SEQ ID NO: 33860 - DNA, 572 bp, Artificial Sequence
  chemically treated genomic DNA (Homo sapiens) CpG-island No: 33860
ctcgctctctcgctctctctcgctctctcgctctctctctctcgctctctcgctctctcgctctctctctctcgctctctctcgctctctctctcgctctctctctcgctctctcgctctctcgctctcgctctctctctctcgctctctctctctctctcgctctctcgctctctctctctcgctctctctctctcgctctctctctctcgctctctctctctctctctctcttactctctctctctcgctctctctctcgctctctctcgctctctcgctctctctctctctctcgctctctcgctctctcgctctctctcgctctctctcgctctctcgctctctctctcgctctcgctctcgctctctcgctctcgctctctctcgctctctctctctcgctctctcgctctctctctctcgctctctctctctcgctctctctctctctctctctctcgctctctctctctcgctctctctctcgctctctctctctcgctctctctctcgctctctctcgtaaaaaattttaacatataccctctaaataatttaattaattaaaa

SEQ ID NO: 33861 - DNA, 513 bp, Artificial Sequence
  chemically treated genomic DNA (Homo sapiens) CpG-island No: 33861
cgcgattttcgtcgatcggttcgtttttgtttcggtttttttgcgcgttttgttttttataattttttgtcgtcgtttttcggtcggttttttttgcggttttttagtcgtcggttttgtttttcggcgcggtttagcgggtttttattttagtcggattttcggttcggttcgcgggcgatttcggttttgatttcgttaggtatcgcgcgtcgttttcgtcgtcgttatcgttatcgttatttttgtcgttttttcgtcgttttttttcggttgttttttttttttttattgatttttgttcgggagtcgatttttgttttttattttttgttcgtttagttatcgtgttcgcgtttcgtgtttttgtttacgggtgtaggtttatttttttgcgtttatcggtattatttcggcgttcgtagttgcggtttattttttttttattttttttttgattttattttttaaatatttgttgcggtttttttcgtggtgttagtttttttaatt

SEQ ID NO: 33862 - DNA, 513 bp, Artificial Sequence
  chemically treated genomic DNA (Homo sapiens) CpG-island No: 33862
aattaaaaaaactaacaccacgaaaaaaaccgcaacaaatatttaaaaaataaaatcaaaaaaaaaataaaaaaaaaataaaccgcaactacgaacgccgaaataataccgataaacgcaaaaaaataaacctacacccgtaaacaaaaacacgaaacgcgaacacgataactaaacgaacaaaaaataaaaaacaaaaatcgactcccgaacaaaaatcaataaaaaaaaaaaaaacaaccgaaaaaaaacgacgaaaaaacgacaaaaataacgataacgataacgacgacgaaaacgacgcgcgatacctaacgaaatcaaaaccgaaatcgcccgcgaaccgaaccgaaaatccgactaaaataaaaacccgctaaaccgcgccgaaaaacaaaaccgacgactaaaaaaccgcaaaaaaaaccgaccgaaaaacgacgacaaaaaattataaaaaacaaaacgcgcaaaaaaaccgaaacaaaaacgaaccgatcgacgaaaatcgcg

SEQ ID NO: 33863 - DNA, 513 bp, Artificial Sequence
  chemically treated genomic DNA (Homo sapiens) CpG-island No: 33863
agttaaaagaattgatattacgaaggaggtcgtaataaatgtttgaaaaataagattagaagagaggtggagagagggtgagtcgtagttgcgggcgtcggggtaatgtcggtggacgtaaagaggtaaatttgtattcgtgggtaggggtacggggcgcgggtacggtggttgggcgggtagggggtaggaaataaaggtcggttttcgagtagaagttaataaaagggggaaaagtagtcgaggaaaagcggcgaaaaggcggtaggggtggcggtggcggtggcggcggcggggacggcgcgcggtgtttggcggggttagggtcggggtcgttcgcgggtcgggtcggggattcggttgagatgggaattcgttaggtcgcgtcgaggggtagggtcggcgattgaggggtcgtagaggggatcggtcgaggagcgacggtaaagggttgtggggggtagggcgcgtagggaggtcgggataggggcgggtcggtcggcgggagtcgcg

SEQ ID NO: 33864 - DNA, 513 bp, Artificial Sequence
  chemically treated genomic DNA (Homo sapiens) CpG-island No: 33864
cgcgactcccgccgaccgacccgcccctatcccgacctccctacgcgccctaccccccacaaccctttaccgtcgctcctcgaccgatcccctctacgacccctcaatcgccgaccctacccctcgacgcgacctaacgaattcccatctcaaccgaatccccgacccgacccgcgaacgaccccgaccctaaccccgccaaacaccgcgcgccgtccccgccgccgccaccgccaccgccacccctaccgccttttcgccgcttttcctcgactacttttcccccttttattaacttctactcgaaaaccgacctttatttcctaccccctacccgcccaaccaccgtacccgcgccccgtacccctacccacgaatacaaatttacctctttacgtccaccgacattaccccgacgcccgcaactacgactcaccctctctccacctctcttctaatcttatttttcaaacatttattacgacctccttcgtaatatcaattcttttaact

SEQ ID NO: 33865 - DNA, 529 bp, Artificial Sequence
  chemically treated genomic DNA (Homo sapiens) CpG-island No: 33865
ttttcgggagggtttcgcgttcgtttggaggagtcggcggtttttcgcgatttttttagaaggagcggatcggcgttcgggtttcgcgggttcggggttttcgagtcgtatttatttagattcgcggataggttgcgtagtcggtcgcgggtacgaaatcgggcgtcgcgtagtagcgtattttcgcgtcgttttcgtcgttttttattatttttttttagtttaggggtcgttgtcggcgttacggtttagttcggagtttttgttgcgagttgtggttttattttcggttttcgttcgggtgtcgtcggtaaatgttttcgtcggtttttatataatttgtttttcgttttcgttttcggagtgggaattttgttcgttttttcgagtatgcgtagaagtcgttgttagtgagttttcgcgacggtggttcggacggaaaagatatttcggcggcgtgggttcggttttttgttttaggatttagggattttggttttttattttttttcgagtattaggatttttt

SEQ ID NO: 33866 - DNA, 529 bp, Artificial Sequence
  chemically treated genomic DNA (Homo sapiens) CpG-island No: 33866
aaaaaatcctaatactcgaaaaaaaataaaaaaccaaaatccctaaatcctaaaacaaaaaaccgaacccacgccgccgaaatatcttttccgtccgaaccaccgtcgcgaaaactcactaacaacgacttctacgcatactcgaaaaaacgaacaaaattcccactccgaaaacgaaaacgaaaaacaaattatataaaaaccgacgaaaacatttaccgacgacacccgaacgaaaaccgaaaataaaaccacaactcgcaacaaaaactccgaactaaaccgtaacgccgacaacgacccctaaactaaaaaaaaataataaaaaacgacgaaaacgacgcgaaaatacgctactacgcgacgcccgatttcgtacccgcgaccgactacgcaacctatccgcgaatctaaataaatacgactcgaaaaccccgaacccgcgaaacccgaacgccgatccgctccttctaaaaaaatcgcgaaaaaccgccgactcctccaaacgaacgcgaaaccctcccgaaaa

SEQ ID NO: 33867 - DNA, 529 bp, Artificial Sequence
  chemically treated genomic DNA (Homo sapiens) CpG-island No: 33867
agggagttttggtgttcggaggagggtggaaggttaagatttttaggttttggagtagggagtcgggtttacgtcgtcgaggtatttttttcgttcgggttatcgtcgcgggggtttattggtagcggtttttgcgtatgttcggaagagcgggtagggtttttatttcgggagcggagacggagaataggttatgtgggagtcggcgggggtatttgtcggcgatattcgagcgggggtcggaagtggggttatagttcgtagtaggagtttcgggttagatcgtggcgtcggtagcggtttttgggttggaggaggatgatgaggagcgacggaagcgacgcgggggtacgttgttgcgcggcgttcggtttcgtgttcgcggtcgattgcgtagtttgttcgcgagtttgagtaagtgcggttcggggatttcgagttcgcggggttcgagcgtcggttcgttttttttaggagggtcgcggggagtcgtcggtttttttaggcgggcgcgaaattttttcgggag

SEQ ID NO: 33868 - DNA, 529 bp, Artificial Sequence
  chemically treated genomic DNA (Homo sapiens) CpG-island No: 33868
ctcccgaaaaaatttcgcgcccgcctaaaaaaaccgacgactccccgcgaccctcctaaaaaaaacgaaccgacgctcgaaccccgcgaactcgaaatccccgaaccgcacttactcaaactcgcgaacaaactacgcaatcgaccgcgaacacgaaaccgaacgccgcgcaacaacgtacccccgcgtcgcttccgtcgctcctcatcatcctcctccaacccaaaaaccgctaccgacgccacgatctaacccgaaactcctactacgaactataaccccacttccgacccccgctcgaatatcgccgacaaatacccccgccgactcccacataacctattctccgtctccgctcccgaaataaaaaccctacccgctcttccgaacatacgcaaaaaccgctaccaataaacccccgcgacgataacccgaacgaaaaaaatacctcgacgacgtaaacccgactccctactccaaaacctaaaaatcttaaccttccaccctcctccgaacaccaaaactccct

SEQ ID NO: 33869 - DNA, 842 bp, Artificial Sequence
  chemically treated genomic DNA (Homo sapiens) CpG-island No: 33869
tggggcggggcggttttttcgttaattgttcggattgggtaagatagaatttgattgggcggggtttggatgggcgttttttgggggcggggtttggcgggaggggcggggcggatttttagttaacggtttcggcgggtgggcgtgttttcgcgggcggcgtttgtagggtcgggagtgggtcgggagcgcgtagttttcgttttcgtttgtttttcggtcgtcgcggttttttttagcgtttttttttcggcgcgggttgttgcgtacgggattgcgttatgcggatttcgttttttcggttcgcgcggggtttgtggacgcggtagggtcggtcgtgatcgggcgtcggcgttaggggcgggcgttaggggcgtttgtcgcgtcgcgatgtgggagaggtaacgcgggtggaggtcgcgcgggcgttgggcgggcgggtggtagtcgtagttcgattgagcgtttttttgttttttataggtgggtttcggtgatcgtgtttttcggttgcgtgggttgtaggatcgtcgcggcgttggcgttttggatcgtgcgcgatgtgaaggaacgtattttcgcggagattggtttttcggtgtcggagtagcggttgtggcgcggcggtcgcgaggtaggcggtggtcgggggcgttgggttgggtttcgttacgcggaggaacggcgggcgtcgagggttcggggtgggcgacgtaggttttcgcgggcggcgcgaatgatttcggtagcgtggtcgtttgtgtttgttttgagttgtggttttttattatttgtttttttcgtttgtattttttatttcgaattttatttattattttatt

SEQ ID NO: 33870 - DNA, 842 bp, Artificial Sequence
  chemically treated genomic DNA (Homo sapiens) CpG-island No: 33870
aataaaataataaataaaattcgaaataaaaaatacaaacgaaaaaaacaaataataaaaaaccacaactcaaaacaaacacaaacgaccacgctaccgaaatcattcgcgccgcccgcgaaaacctacgtcgcccaccccgaaccctcgacgcccgccgttcctccgcgtaacgaaacccaacccaacgcccccgaccaccgcctacctcgcgaccgccgcgccacaaccgctactccgacaccgaaaaaccaatctccgcgaaaatacgttccttcacatcgcgcacgatccaaaacgccaacgccgcgacgatcctacaacccacgcaaccgaaaaacacgatcaccgaaacccacctataaaaaacaaaaaaacgctcaatcgaactacgactaccacccgcccgcccaacgcccgcgcgacctccacccgcgttacctctcccacatcgcgacgcgacaaacgcccctaacgcccgcccctaacgccgacgcccgatcacgaccgaccctaccgcgtccacaaaccccgcgcgaaccgaaaaaacgaaatccgcataacgcaatcccgtacgcaacaacccgcgccgaaaaaaaaacgctaaaaaaaaccgcgacgaccgaaaaacaaacgaaaacgaaaactacgcgctcccgacccactcccgaccctacaaacgccgcccgcgaaaacacgcccacccgccgaaaccgttaactaaaaatccgccccgcccctcccgccaaaccccgcccccaaaaaacgcccatccaaaccccgcccaatcaaattctatcttacccaatccgaacaattaacgaaaaaaccgccccgcccca

SEQ ID NO: 33871 - DNA, 842 bp, Artificial Sequence
  chemically treated genomic DNA (Homo sapiens) CpG-island No: 33871
gatgaaatgatgggtggggttcggggtgggggatgtaaacggaaaaggtaagtgatgaaaagttataatttaggataagtataggcggttacgttgtcggagttattcgcgtcgttcgcggaaatttgcgtcgtttatttcgggttttcgacgttcgtcgttttttcgcgtggcggagtttagtttagcgttttcggttatcgtttatttcgcggtcgtcgcgttatagtcgttgtttcgatatcgggaagttagttttcgcgaagatacgtttttttatatcgcgtacggtttaggacgttagcgtcgcgacggttttgtagtttacgtagtcggggagtacggttatcgggatttatttgtggaaagtagagggacgtttagtcgggttgcggttgttattcgttcgtttagcgttcgcgcggtttttattcgcgttattttttttatatcgcggcgcggtaggcgtttttagcgttcgtttttgacgtcggcgttcgattacggtcggttttatcgcgtttataggtttcgcgcgggtcgggagggcgggattcgtatggcgtagtttcgtacgtagtagttcgcgtcgaggaggaaacgttagaggaagtcgcggcggtcgaggagtaggcgggggcggggattgcgcgttttcggtttattttcggttttgtaggcgtcgttcgcggggatacgtttattcgtcgggatcgttagttggggattcgtttcgtttttttcgttaggtttcgtttttagggaacgtttatttaggtttcgtttagttaagttttgttttgtttaattcggatagttagcgaaggagtcgtttcgtttta

SEQ ID NO: 33872 - DNA, 842 bp, Artificial Sequence
  chemically treated genomic DNA (Homo sapiens) CpG-island No: 33872
taaaacgaaacgactccttcgctaactatccgaattaaacaaaacaaaacttaactaaacgaaacctaaataaacgttccctaaaaacgaaacctaacgaaaaaaacgaaacgaatccccaactaacgatcccgacgaataaacgtatccccgcgaacgacgcctacaaaaccgaaaataaaccgaaaacgcgcaatccccgcccccgcctactcctcgaccgccgcgacttcctctaacgtttcctcctcgacgcgaactactacgtacgaaactacgccatacgaatcccgccctcccgacccgcgcgaaacctataaacgcgataaaaccgaccgtaatcgaacgccgacgtcaaaaacgaacgctaaaaacgcctaccgcgccgcgatataaaaaaaataacgcgaataaaaaccgcgcgaacgctaaacgaacgaataacaaccgcaacccgactaaacgtccctctactttccacaaataaatcccgataaccgtactccccgactacgtaaactacaaaaccgtcgcgacgctaacgtcctaaaccgtacgcgatataaaaaaacgtatcttcgcgaaaactaacttcccgatatcgaaacaacgactataacgcgacgaccgcgaaataaacgataaccgaaaacgctaaactaaactccgccacgcgaaaaaacgacgaacgtcgaaaacccgaaataaacgacgcaaatttccgcgaacgacgcgaataactccgacaacgtaaccgcctatacttatcctaaattataacttttcatcacttaccttttccgtttacatcccccaccccgaaccccacccatcatttcatc

SEQ ID NO: 33873 - DNA, 976 bp, Artificial Sequence
  chemically treated genomic DNA (Homo sapiens) CpG-island No: 33873
gggagtaacgaatcgattatgggtgtgaggaagattggttagagttgatcgcgtttcggaatggagtggtggttgggatgcggaaaggtttcgagtggagtaattttgggtgaggcggaaacgggggttgattttttagtcgttcgcgtgttattgaggcggcggttattttggtatttttttttagtttcgttagttcgcgcgtatagttttgggatgtggcgggttgggagatttacgttttcggcgtgttttgcggttcggttcgcgtattcggggggcgtggtttgcgcgcgcgtgcgtcgtagtcgaacgttgtggcggggtaggcgaggcggtcgtttcgagcgcgttagttagttttttgaagggagtgacggcggttgggtgttcgcggttatttttgttttttcgggtaagtgcggcggtggcggttggcgtcgtcggttgacgggcggttttttgggagacggggagagtattcggtaggttcgtttgagacgtttgaggttcgcgggcgttattttttaggggcgtttggttcgagtcgggaggcgtttcgttaagttcggtgttcgcgggtattagtcggtgggggtttcgttcgttttgtcgggtaggagggcggaatgtggggttggtacgggcggggagagtcggacggggttaatttggattacgttagttagtttcgggtgattggttcgaagtagtttcggagttgagaggggtcgatcggggtagttcgcggcgtagtttcggtagcgcgtatttgcggagagaacggatttcgtgtttcgagcgtcgtcgagtttcgtacgttcgtgagattcgttttgaattttttttttatgtttgttggggttgttgattcgatttttcgtaagattcggatttaacgtttttgtttgttttacgatagttagtttaatgttgtggacgtaatagggtacgaacgtttgtaattgaaagttga

SEQ ID NO: 33874 - DNA, 976 bp, Artificial Sequence
  chemically treated genomic DNA (Homo sapiens) CpG-island No: 33874
tcaactttcaattacaaacgttcgtaccctattacgtccacaacattaaactaactatcgtaaaacaaacaaaaacgttaaatccgaatcttacgaaaaatcgaatcaacaaccccaacaaacataaaaaaaaaattcaaaacgaatctcacgaacgtacgaaactcgacgacgctcgaaacacgaaatccgttctctccgcaaatacgcgctaccgaaactacgccgcgaactaccccgatcgacccctctcaactccgaaactacttcgaaccaatcacccgaaactaactaacgtaatccaaattaaccccgtccgactctccccgcccgtaccaaccccacattccgccctcctacccgacaaaacgaacgaaacccccaccgactaatacccgcgaacaccgaacttaacgaaacgcctcccgactcgaaccaaacgcccctaaaaaataacgcccgcgaacctcaaacgtctcaaacgaacctaccgaatactctccccgtctcccaaaaaaccgcccgtcaaccgacgacgccaaccgccaccgccgcacttacccgaaaaaacaaaaataaccgcgaacacccaaccgccgtcactcccttcaaaaaactaactaacgcgctcgaaacgaccgcctcgcctaccccgccacaacgttcgactacgacgcacgcgcgcgcaaaccacgccccccgaatacgcgaaccgaaccgcaaaacacgccgaaaacgtaaatctcccaacccgccacatcccaaaactatacgcgcgaactaacgaaactaaaaaaaaataccaaaataaccgccgcctcaataacacgcgaacgactaaaaaatcaacccccgtttccgcctcacccaaaattactccactcgaaacctttccgcatcccaaccaccactccattccgaaacgcgatcaactctaaccaatcttcctcacacccataatcgattcgttactccc

SEQ ID NO: 33875 - DNA, 976 bp, Artificial Sequence
  chemically treated genomic DNA (Homo sapiens) CpG-island No: 33875
ttaatttttagttataaacgttcgtgttttgttacgtttatagtattaagttggttgtcgtggggtaaataaaaacgttgagttcgagttttacggggggtcgggttaataattttagtaaatatggagagaaaatttaaagcgggttttacgggcgtgcggggttcggcggcgttcggggtacgggattcgtttttttcgtaaatgcgcgttgtcggggttgcgtcgcgggttgtttcggtcgattttttttaatttcgaggttatttcgagttagttattcgggattggttgacgtggtttaggttggtttcgttcggtttttttcgttcgtattaattttatatttcgtttttttattcggtaaagcggacgaagtttttatcggttggtgttcgcgggtatcgaatttagcggaacgtttttcggttcggattagacgtttttgaggagtgacgttcgcgagttttaaacgttttaggcgggtttgtcgggtgtttttttcgttttttaggaagtcgttcgttagtcggcggcgttaatcgttatcgtcgtatttattcgggaaggtaaaagtggtcgcgggtatttaatcgtcgttattttttttagggagttgattagcgcgttcgaagcgatcgtttcgtttgtttcgttatagcgttcggttacgacgtacgcgcgcgtaggttacgtttttcgggtgcgcgggtcgggtcgtagagtacgtcgggagcgtgggttttttagttcgttatattttagggttgtacgcgcggattagcggagttaggggaaggtgttagggtggtcgtcgttttagtagtacgcggacggttggaaagttagttttcgttttcgttttatttaggattgttttattcggggttttttcgtattttagttattattttatttcgaggcgcgattagttttgattagttttttttatatttatagtcgattcgttattttt

SEQ ID NO: 33876 - DNA, 976 bp, Artificial Sequence
  chemically treated genomic DNA (Homo sapiens) CpG-island No: 33876
aaaaataacgaatcgactataaatataaaaaaaactaatcaaaactaatcgcgcctcgaaataaaataataactaaaatacgaaaaaaccccgaataaaacaatcctaaataaaacgaaaacgaaaactaactttccaaccgtccgcgtactactaaaacgacgaccaccctaacaccttcccctaactccgctaatccgcgcgtacaaccctaaaatataacgaactaaaaaacccacgctcccgacgtactctacgacccgacccgcgcacccgaaaaacgtaacctacgcgcgcgtacgtcgtaaccgaacgctataacgaaacaaacgaaacgatcgcttcgaacgcgctaatcaactccctaaaaaaaataacgacgattaaatacccgcgaccacttttaccttcccgaataaatacgacgataacgattaacgccgccgactaacgaacgacttcctaaaaaacgaaaaaaacacccgacaaacccgcctaaaacgtttaaaactcgcgaacgtcactcctcaaaaacgtctaatccgaaccgaaaaacgttccgctaaattcgatacccgcgaacaccaaccgataaaaacttcgtccgctttaccgaataaaaaaacgaaatataaaattaatacgaacgaaaaaaaccgaacgaaaccaacctaaaccacgtcaaccaatcccgaataactaactcgaaataacctcgaaattaaaaaaaatcgaccgaaacaacccgcgacgcaaccccgacaacgcgcatttacgaaaaaaacgaatcccgtaccccgaacgccgccgaaccccgcacgcccgtaaaacccgctttaaattttctctccatatttactaaaattattaacccgaccccccgtaaaactcgaactcaacgtttttatttaccccacgacaaccaacttaatactataaacgtaacaaaacacgaacgtttataactaaaaattaa

SEQ ID NO: 33877 - DNA, 754 bp, Artificial Sequence
  chemically treated genomic DNA (Homo sapiens) CpG-island No: 33877
gaattagaagcgtacgtattttagtttgagcgtgtttaacgggttcgtgtacgtcgcgggcggtcgtaacgtagaaggaagtttggtttcgttggagtgttacgtgttttttattaattagtggtagtcgaagacgtttttggaggtggcgcgttgttgttacgttagcgcggtcgtcgacggtcgcgtgttggtgatcggaggttatatagttaacgtttattcgcgttttgtgtgcgtttacgattcggttagcgattcgtggtaggagttgtcgaattttagtatatttcggggttggtattgcgcggttacgttgagcgatagagtgtacgtgatgggcggtagttagttggggtcgcgcggggagcgcgtggacgtgtttatcgtggagtgttatagtttcgcgatcggttagtggagttacgcggcgtcgttgtaggtgggagtgagtattgcgggcgtttcggcgttgtatggtcgcgtttatttggtggggggttggaacgagggcgagaagaagtataagaagtgtatttagtgttttagtttcgagtttaacgagtggacggaggacgacgagttattcgaggttattgtcggcgtgttttgttgtattttttcgatgtttaataacgtgattcgggaatttcgggttagttcggtattttttgtgttagttagtatttgagtttaggtagatgtagggacgtaggaagaatacgttatttattcgtagagttacgtggttaat

SEQ ID NO: 33878 - DNA, 754 bp, Artificial Sequence
  chemically treated genomic DNA (Homo sapiens) CpG-island No: 33878
attaaccacgtaactctacgaataaataacgtattcttcctacgtccctacatctacctaaactcaaatactaactaacacaaaaaataccgaactaacccgaaattcccgaatcacgttattaaacatcgaaaaaatacaacaaaacacgccgacaataacctcgaataactcgtcgtcctccgtccactcgttaaactcgaaactaaaacactaaatacacttcttatacttcttctcgccctcgttccaaccccccaccaaataaacgcgaccatacaacgccgaaacgcccgcaatactcactcccacctacaacgacgccgcgtaactccactaaccgatcgcgaaactataacactccacgataaacacgtccacgcgctccccgcgcgaccccaactaactaccgcccatcacgtacactctatcgctcaacgtaaccgcgcaataccaaccccgaaatatactaaaattcgacaactcctaccacgaatcgctaaccgaatcgtaaacgcacacaaaacgcgaataaacgttaactatataacctccgatcaccaacacgcgaccgtcgacgaccgcgctaacgtaacaacaacgcgccacctccaaaaacgtcttcgactaccactaattaataaaaaacacgtaacactccaacgaaaccaaacttccttctacgttacgaccgcccgcgacgtacacgaacccgttaaacacgctcaaactaaaatacgtacgcttctaattc

SEQ ID NO: 33879 - DNA, 754 bp, Artificial Sequence
  chemically treated genomic DNA (Homo sapiens) CpG-island No: 33879
gttaattacgtggttttacgaataaataacgtgttttttttgcgtttttgtatttatttgggtttagatattgattggtatagaagatatcgaattggttcgggattttcgagttacgttgttgggtatcgagagggtgtagtaggatacgtcgatagtggtttcgggtagttcgtcgtttttcgtttattcgttgagttcggggttgaagtattggatgtattttttgtattttttttcgttttcgttttagttttttattaggtaggcgcggttatgtagcgtcgagacgttcgtagtgtttatttttatttgtagcggcgtcgcgtagttttattggtcggtcgcggggttgtagtattttacggtgagtacgtttacgcgtttttcgcgcggttttagttggttgtcgtttattacgtatattttgtcgtttagcgtgatcgcgtagtgttagtttcggggtgtgttgaggttcggtagtttttgttacgagtcgttggtcgggtcgtaggcgtatatagagcgcgagtaggcgttggttatgtagttttcggttattagtacgcggtcgtcggcgatcgcgttagcgtggtagtagcgcgttatttttaggggcgttttcggttgttattgattggtggagggtacgtagtattttagcgaggttaggtttttttttgcgttgcggtcgttcgcggcgtatacgagttcgttgaatacgtttaggttgaagtgcgtgcgtttttggttt

SEQ ID NO: 33880 - DNA, 754 bp, Artificial Sequence
  chemically treated genomic DNA (Homo sapiens) CpG-island No: 33880
aaaccaaaaacgcacgcacttcaacctaaacgtattcaacgaactcgtatacgccgcgaacgaccgcaacgcaaaaaaaaacctaacctcgctaaaatactacgtaccctccaccaatcaataacaaccgaaaacgcccctaaaaataacgcgctactaccacgctaacgcgatcgccgacgaccgcgtactaataaccgaaaactacataaccaacgcctactcgcgctctatatacgcctacgacccgaccaacgactcgtaacaaaaactaccgaacctcaacacaccccgaaactaacactacgcgatcacgctaaacgacaaaatatacgtaataaacgacaaccaactaaaaccgcgcgaaaaacgcgtaaacgtactcaccgtaaaatactacaaccccgcgaccgaccaataaaactacgcgacgccgctacaaataaaaataaacactacgaacgtctcgacgctacataaccgcgcctacctaataaaaaactaaaacgaaaacgaaaaaaaatacaaaaaatacatccaatacttcaaccccgaactcaacgaataaacgaaaaacgacgaactacccgaaaccactatcgacgtatcctactacaccctctcgatacccaacaacgtaactcgaaaatcccgaaccaattcgatatcttctataccaatcaatatctaaacccaaataaatacaaaaacgcaaaaaaaacacgttatttattcgtaaaaccacgtaattaac

SEQ ID NO: 33881 - DNA, 988 bp, Artificial Sequence
  chemically treated genomic DNA (Homo sapiens) CpG-island No: 33881
ttttttaattgcgatttaattatttttgtatacgttttttgagttttcgcggtttttatcgggttttaggttacgttttcgtcgttgtatcgtttttttttttcgttttcgttcgtagtttataaaatttggagcgtaggatcgcgtttaggagcggcgagttagcggacgtaaagattgggtatgtttcgcggcggcgtaggttttggttataagtaggaagaagttagtgtattagatcggtaaagagaagcgggagtcgtcgcggtagcgcggtcgtggggttcgtcgtcgtcgtatcggagcgggaggaggagtagcggggagggcgaggtcgtcgggtcgagagtcgtttcgtttgttttcggttttttgttttcgttttcgcgcggtgcgtcggatttagggtttgttatttgggcgttaggggtcgtcgtcggggagtcggagcgggtaggatttttttttcgtcgattgcggttcgagagcgttttcgcggggtggagcggtagtcgttttttgcgggcggttgagtgttcgtttcgcgttcggagcgggcgatcgtcgttagttcggaggaggaggagggggcggttatggggttgttgttttagggttcgtcgttgagttgggaggaaattaagcgttatgtcgattacgtgcggcggtacgggattttttagtttttgtatatttattacgtcgttaaggatcggtataaggacgtttttaagtggggcgatgaggtgagcgttcgcggttttcgttttcgtcgggtattcgtgtttggtcgttcgcgttgtttttgttttgttttacgttttcggttttatcgcggttcgcgttttttattgcgttcgggggttttcgagcgtttttcggtttcgggagtatcgtttttgttttcgtttagttcgcgtttagggttatttttttgattagattttttttttgtttatttatttttttgggtttttttttttatttt

SEQ ID NO: 33882 - DNA, 988 bp, Artificial Sequence
  chemically treated genomic DNA (Homo sapiens) CpG-island No: 33882
aaaataaaaaaaaaaacccaaaaaaataaataaacaaaaaaaaaatctaatcaaaaaaataaccctaaacgcgaactaaacgaaaacaaaaacgatactcccgaaaccgaaaaacgctcgaaaacccccgaacgcaataaaaaacgcgaaccgcgataaaaccgaaaacgtaaaacaaaacaaaaacaacgcgaacgaccaaacacgaatacccgacgaaaacgaaaaccgcgaacgctcacctcatcgccccacttaaaaacgtccttataccgatccttaacgacgtaataaatatacaaaaactaaaaaatcccgtaccgccgcacgtaatcgacataacgcttaatttcctcccaactcaacgacgaaccctaaaacaacaaccccataaccgccccctcctcctcctccgaactaacgacgatcgcccgctccgaacgcgaaacgaacactcaaccgcccgcaaaaaacgactaccgctccaccccgcgaaaacgctctcgaaccgcaatcgacgaaaaaaaaatcctacccgctccgactccccgacgacgacccctaacgcccaaataacaaaccctaaatccgacgcaccgcgcgaaaacgaaaacaaaaaaccgaaaacaaacgaaacgactctcgacccgacgacctcgccctccccgctactcctcctcccgctccgatacgacgacgacgaaccccacgaccgcgctaccgcgacgactcccgcttctctttaccgatctaatacactaacttcttcctacttataaccaaaacctacgccgccgcgaaacatacccaatctttacgtccgctaactcgccgctcctaaacgcgatcctacgctccaaattttataaactacgaacgaaaacgaaaaaaaaaaacgatacaacgacgaaaacgtaacctaaaacccgataaaaaccgcgaaaactcaaaaaacgtatacaaaaataattaaatcgcaattaaaaaa

SEQ ID NO: 33883 - DNA, 988 bp, Artificial Sequence
  chemically treated genomic DNA (Homo sapiens) CpG-island No: 33883
ggaatgaaggggaaaatttaaaagaatgaatgaataagaaaggagtttagttaggaggatggttttggacgcggattaggcgaaagtagggacgatgttttcggggtcgggaggcgttcgaggattttcgggcgtagtggagaacgcggatcgcgatagggtcgggggcgtagggtaagataaaggtagcgcgggcggttagatacgggtgttcggcggggacggggatcgcgggcgtttattttatcgttttatttgagaacgtttttgtgtcggtttttgacggcgtggtagatgtgtaggaattggaggatttcgtgtcgtcgtacgtggtcggtatggcgtttggtttttttttagtttagcggcgagttttgggatagtagttttatggtcgttttttttttttttttcgggttgacggcggtcgttcgtttcgggcgcgagacggatatttagtcgttcgtagaaggcggttgtcgttttatttcgcgggggcgttttcgggtcgtagtcggcggagggagggttttgttcgtttcggtttttcggcggcggtttttggcgtttaggtgatagattttgggttcgacgtatcgcgcggaggcgaaggtagaagatcgagagtaggcgggacggttttcggttcggcggtttcgtttttttcgttgttttttttttcgtttcgatgcggcggcggcggattttacggtcgcgttgtcgcggcggttttcgtttttttttgtcggtttggtgtattggtttttttttatttgtgattaaaatttgcgtcgtcgcggagtatgtttagtttttgcgttcgttagttcgtcgtttttgggcgcgattttgcgttttaggttttatagattacgggcgaaggcggggagaggaggcggtgtagcggcggaggcgtggtttgaagttcggtgggaatcgcgggggtttaggaggcgtgtgtaagggtgattgggtcgtagttgagggg

SEQ ID NO: 33884 - DNA, 988 bp, Artificial Sequence
  chemically treated genomic DNA (Homo sapiens) CpG-island No: 33884
cccctcaactacgacccaatcacccttacacacgcctcctaaacccccgcgattcccaccgaacttcaaaccacgcctccgccgctacaccgcctcctctccccgccttcgcccgtaatctataaaacctaaaacgcaaaatcgcgcccaaaaacgacgaactaacgaacgcaaaaactaaacatactccgcgacgacgcaaattttaatcacaaataaaaaaaaaccaatacaccaaaccgacaaaaaaaaacgaaaaccgccgcgacaacgcgaccgtaaaatccgccgccgccgcatcgaaacgaaaaaaaaaacaacgaaaaaaacgaaaccgccgaaccgaaaaccgtcccgcctactctcgatcttctaccttcgcctccgcgcgatacgtcgaacccaaaatctatcacctaaacgccaaaaaccgccgccgaaaaaccgaaacgaacaaaaccctccctccgccgactacgacccgaaaacgcccccgcgaaataaaacgacaaccgccttctacgaacgactaaatatccgtctcgcgcccgaaacgaacgaccgccgtcaacccgaaaaaaaaaaaaaaaacgaccataaaactactatcccaaaactcgccgctaaactaaaaaaaaaccaaacgccataccgaccacgtacgacgacacgaaatcctccaattcctacacatctaccacgccgtcaaaaaccgacacaaaaacgttctcaaataaaacgataaaataaacgcccgcgatccccgtccccgccgaacacccgtatctaaccgcccgcgctacctttatcttaccctacgcccccgaccctatcgcgatccgcgttctccactacgcccgaaaatcctcgaacgcctcccgaccccgaaaacatcgtccctactttcgcctaatccgcgtccaaaaccatcctcctaactaaactcctttcttattcattcattcttttaaattttccccttcattcc

SEQ ID NO: 33885 - DNA, 798 bp, Artificial Sequence
  chemically treated genomic DNA (Homo sapiens) CpG-island No: 33885
cggttgcgtaaattaagttagggtatagagaggtttggtcggttgttttttcgcgttagtgcgttttgttcgcggtgcgttattatttatacgaagatttcgaagagtagggttcgtatttcgattttaatggttagttttcgtatggtgcggtcggagtagttttcgcggcgatagttggtgtttttcgcggttttcgtagttcggtcggcgtcggttcgttagattttgggaggcgagggaggcgcgttttaggtcgcgagcgggggcggaggcgggtttcgggcgggggtaggcgtcggggagggtttagtttaaatttcgcgtttcgggtttcggggtttcgggaagtcgcgtcggtcgttggcgatattgcggatttcgttttttagtgcggagtcggggtcgttttagggattttcggatttttttttttaggagtcgttttcgttttttgggttcgcgtcgggtattcgcggttcggggaggggaagttcggggaagttttatcgtcgtcgtcgtttttttgcgcgtttttcgtttttttcgttagtgggcggtttttgggtttcgcgttagggtagcgcgttcgttggggttttgttcgcggtttttttgtagtttttggttttgttttcgattttcgttgttcgggttttcgttttttggtatacgtacgtacgtgggtatgtagtggacgatcgttttggggattttttagggtttagggtagttttggttaattttgttttcgtgttcggttttttttatatcgttcgaatttgaaatttttttttt

SEQ ID NO: 33886 - DNA, 798 bp, Artificial Sequence
  chemically treated genomic DNA (Homo sapiens) CpG-island No: 33886
aaaaaaaaaatttcaaattcgaacgatataaaaaaaaccgaacacgaaaacaaaattaaccaaaactaccctaaaccctaaaaaatccccaaaacgatcgtccactacatacccacgtacgtacgtataccaaaaaacgaaaacccgaacaacgaaaatcgaaaacaaaaccaaaaactacaaaaaaaccgcgaacaaaaccccaacgaacgcgctaccctaacgcgaaacccaaaaaccgcccactaacgaaaaaaacgaaaaacgcgcaaaaaaacgacgacgacgataaaacttccccgaacttcccctccccgaaccgcgaatacccgacgcgaacccaaaaaacgaaaacgactcctaaaaaaaaaaatccgaaaatccctaaaacgaccccgactccgcactaaaaaacgaaatccgcaatatcgccaacgaccgacgcgacttcccgaaaccccgaaacccgaaacgcgaaatttaaactaaaccctccccgacgcctacccccgcccgaaacccgcctccgcccccgctcgcgacctaaaacgcgcctccctcgcctcccaaaatctaacgaaccgacgccgaccgaactacgaaaaccgcgaaaaacaccaactatcgccgcgaaaactactccgaccgcaccatacgaaaactaaccattaaaatcgaaatacgaaccctactcttcgaaatcttcgtataaataataacgcaccgcgaacaaaacgcactaacgcgaaaaaacaaccgaccaaacctctctataccctaacttaatttacgcaaccg

SEQ ID NO: 33887 - DNA, 798 bp, Artificial Sequence
  chemically treated genomic DNA (Homo sapiens) CpG-island No: 33887
aaagaaagaattttaggttcgaacggtgtagggagggtcgaatacgggagtaaggttggttagggttgttttgagttttggagaatttttagagcgatcgtttattatatgtttacgtgcgtgcgtgtgttagggagcgagagttcggatagcgggagtcggaggtaggattaggagttgtagaggggtcgcgggtagagttttagcgagcgcgttgttttggcgcggagtttaggggtcgtttattggcgggggaggcggggagcgcgtagggaggcggcggcggcggtggggttttttcgggtttttttttttcgggtcgcgggtgttcggcgcgggtttaggaggcggaggcggtttttggggagagggattcgggagtttttgaggcggtttcggtttcgtattaggaggcggggttcgtagtatcgttagcggtcggcgcggtttttcggagtttcggagttcgaggcgcgaggtttaggttgagtttttttcggcgtttgttttcgttcggagttcgttttcgttttcgttcgcggtttggagcgcgtttttttcgttttttagggtttggcgagtcggcgtcggtcgagttgcgggagtcgcggagagtattagttgtcgtcgcgggagttgtttcggtcgtattatgcgggagttggttattgagatcggggtgcgagttttgtttttcggagttttcgtgtaagtagtggcgtatcgcgggtagggcgtattgacgcgggggaataatcgattaagtttttttgtgttttaatttagtttgcgtagtcg

SEQ ID NO: 33888 - DNA, 798 bp, Artificial Sequence
  chemically treated genomic DNA (Homo sapiens) CpG-island No: 33888
cgactacgcaaactaaattaaaacacaaaaaaacttaatcgattattcccccgcgtcaatacgccctacccgcgatacgccactacttacacgaaaactccgaaaaacaaaactcgcaccccgatctcaataaccaactcccgcataatacgaccgaaacaactcccgcgacgacaactaatactctccgcgactcccgcaactcgaccgacgccgactcgccaaaccctaaaaaacgaaaaaaacgcgctccaaaccgcgaacgaaaacgaaaacgaactccgaacgaaaacaaacgccgaaaaaaactcaacctaaacctcgcgcctcgaactccgaaactccgaaaaaccgcgccgaccgctaacgatactacgaaccccgcctcctaatacgaaaccgaaaccgcctcaaaaactcccgaatccctctccccaaaaaccgcctccgcctcctaaacccgcgccgaacacccgcgacccgaaaaaaaaaaacccgaaaaaaccccaccgccgccgccgcctccctacgcgctccccgcctcccccgccaataaacgacccctaaactccgcgccaaaacaacgcgctcgctaaaactctacccgcgacccctctacaactcctaatcctacctccgactcccgctatccgaactctcgctccctaacacacgcacgcacgtaaacatataataaacgatcgctctaaaaattctccaaaactcaaaacaaccctaaccaaccttactcccgtattcgaccctccctacaccgttcgaacctaaaattctttcttt

SEQ ID NO: 33889 - DNA, 1017 bp, Artificial Sequence
  chemically treated genomic DNA (Homo sapiens) CpG-island No: 33889
tttttcgtcgttttttttcggttttattttattgttggattgtggcgttttatttttgttggcggtcggtagggggcggagttcgagtttggattttttttttcggggtttttttcgggaggtcgtttcggcgtgggggaggggaggacggggcgggaggacgcggttcggtcggttgtagcgttatttttggttcggggtcggtagggaggtcgcggttatcgtattatagttgacgtgaggattacgtggggtcgttgtcggtttcgggttgttgggcggcggcgtcgttgttgagcggcggtcgggttcgtcgtttttattttttcgcgttcgtaattagtgacgaggttcgttacgtaaatttttttgcggcgggtaagtggtgcgtcggtttcggtttcgagatttagtagcgggcgacgcggcgtatgaggtggaggtggaggtaggaggcggagcggagtcgggtgcggtggagtagtagaggtcgagcggagtcgtgggcggcgggtcgggatttcggggtcgggttaaggattggcggggtagtcgcgagtttatttgacgcggtttttcgttcggcgttttcgaggtcgcgggttcgtcgttttacgttcgtttcgtgcgtttagttgtttcgggattcgtttgttttttcgcgaatttgggacgagttggaaaattttttttgagagagtcgtgcggtttaggggagcggtttaattcggaaaaggaaaaggaatttagaagtaaggatttcggatttgagtgtttttagcgtttttgttttattttacgagcgtagtttagacgaaagcggacgtagttcgtttttttttaaaatttgggtcggagggtttcgtagttgagttattcggtttcgggcgcgggtagttttcggagtgggaagggtagagtcgcgatcgttttcggaaggcgtatttttttttttgtttgagttttgtttttttagggttatttggtaaggtttttagagtttgttgaatttgggga

SEQ ID NO: 33890 - DNA, 1017 bp, Artificial Sequence
  chemically treated genomic DNA (Homo sapiens) CpG-island No: 33890
tccccaaattcaacaaactctaaaaaccttaccaaataaccctaaaaaaacaaaactcaaacaaaaaaaaaaatacgccttccgaaaacgatcgcgactctacccttcccactccgaaaactacccgcgcccgaaaccgaataactcaactacgaaaccctccgacccaaattttaaaaaaaaacgaactacgtccgctttcgtctaaactacgctcgtaaaataaaacaaaaacgctaaaaacactcaaatccgaaatccttacttctaaattccttttccttttccgaattaaaccgctcccctaaaccgcacgactctctcaaaaaaaattttccaactcgtcccaaattcgcgaaaaaacaaacgaatcccgaaacaactaaacgcacgaaacgaacgtaaaacgacgaacccgcgacctcgaaaacgccgaacgaaaaaccgcgtcaaataaactcgcgactaccccgccaatccttaacccgaccccgaaatcccgacccgccgcccacgactccgctcgacctctactactccaccgcacccgactccgctccgcctcctacctccacctccacctcatacgccgcgtcgcccgctactaaatctcgaaaccgaaaccgacgcaccacttacccgccgcaaaaaaatttacgtaacgaacctcgtcactaattacgaacgcgaaaaaataaaaacgacgaacccgaccgccgctcaacaacgacgccgccgcccaacaacccgaaaccgacaacgaccccacgtaatcctcacgtcaactataatacgataaccgcgacctccctaccgaccccgaaccaaaaataacgctacaaccgaccgaaccgcgtcctcccgccccgtcctcccctcccccacgccgaaacgacctcccgaaaaaaaccccgaaaaaaaaaatccaaactcgaactccgccccctaccgaccgccaacaaaaataaaacgccacaatccaacaataaaataaaaccgaaaaaaaacgacgaaaaa

SEQ ID NO: 33891 - DNA, 1017 bp, Artificial Sequence
  chemically treated genomic DNA (Homo sapiens) CpG-island No: 33891
tttttagatttaataggttttggaaattttattagatggttttaaaaaggtaagatttaggtagaagggaaaatgcgtttttcgagagcggtcgcggttttgttttttttatttcggagattgttcgcgttcgggatcgaatgatttagttgcgaggtttttcggtttaggttttgggggaaaacgggttgcgttcgttttcgtttaaattgcgttcgtaaagtggggtagaggcgttgggggtatttaaattcgaggtttttatttttggatttttttttttttttcgagttaaatcgtttttttgagtcgtacggtttttttagggaggattttttaattcgttttaagttcgcgaggaggtaggcgggtttcggggtagttgagcgtacgaagcgggcgtggggcggcgagttcgcggtttcgggggcgtcgagcgaggggtcgcgttaggtgaattcgcggttgtttcgttagtttttggttcggtttcggggtttcggttcgtcgtttacggtttcgttcggtttttgttgttttatcgtattcggtttcgtttcgttttttgtttttatttttattttatgcgtcgcgtcgttcgttgttgggtttcggggtcggagtcgacgtattatttattcgtcgtaaagggatttacgtagcggatttcgttattgattacggacgcgaggaggtggagacggcgagttcgatcgtcgtttagtagcggcgtcgtcgtttagtaattcggagtcggtagcggttttacgtagtttttacgttagttgtgatgcggtagtcgcggtttttttgtcgatttcggattaaaagtagcgttgtagtcgatcgaatcgcgttttttcgtttcgttttttttttttttacgtcgggacggtttttcgggggaggtttcgaggaaaaaaatttaggttcgaatttcgttttttgtcggtcgttagtaggagtgaagcgttataatttaataatgaaatggaatcggggaggggcggcgggaag

SEQ ID NO: 33892 - DNA, 1017 bp, Artificial Sequence
  chemically treated genomic DNA (Homo sapiens) CpG-island No: 33892
cttcccgccgcccctccccgattccatttcattattaaattataacgcttcactcctactaacgaccgacaaaaaacgaaattcgaacctaaatttttttcctcgaaacctcccccgaaaaaccgtcccgacgtaaaaaaaaaaaaaacgaaacgaaaaaacgcgattcgatcgactacaacgctacttttaatccgaaatcgacaaaaaaaccgcgactaccgcatcacaactaacgtaaaaactacgtaaaaccgctaccgactccgaattactaaacgacgacgccgctactaaacgacgatcgaactcgccgtctccacctcctcgcgtccgtaatcaataacgaaatccgctacgtaaatccctttacgacgaataaataatacgtcgactccgaccccgaaacccaacaacgaacgacgcgacgcataaaataaaaataaaaacaaaaaacgaaacgaaaccgaatacgataaaacaacaaaaaccgaacgaaaccgtaaacgacgaaccgaaaccccgaaaccgaaccaaaaactaacgaaacaaccgcgaattcacctaacgcgacccctcgctcgacgcccccgaaaccgcgaactcgccgccccacgcccgcttcgtacgctcaactaccccgaaacccgcctacctcctcgcgaacttaaaacgaattaaaaaatcctccctaaaaaaaccgtacgactcaaaaaaacgatttaactcgaaaaaaaaaaaaaaatccaaaaataaaaacctcgaatttaaatacccccaacgcctctaccccactttacgaacgcaatttaaacgaaaacgaacgcaacccgttttcccccaaaacctaaaccgaaaaacctcgcaactaaatcattcgatcccgaacgcgaacaatctccgaaataaaaaaaacaaaaccgcgaccgctctcgaaaaacgcattttcccttctacctaaatcttacctttttaaaaccatctaataaaatttccaaaacctattaaatctaaaaa

SEQ ID NO: 33893 - DNA, 533 bp, Artificial Sequence
  chemically treated genomic DNA (Homo sapiens) CpG-island No: 33893
cgggtttcggcgtgggcggtcgagtttcggttgtacgcggttttcggggcggcggtcgttcggttgtttaagtcggggttgtaggtgtgcgtgttttgtcggaataataaggaggcgatggcgggttatattatttatatttttaagggtttcgacgggcgagtgttgtgtttcgtgttgcgtcgttatacgtgttttttgtgcggcgttagcggcgataacgcgtatattattaagtattgttcgttttttaaagtgtcgtcgtcgttcgttcgttcgtttttttttagcgttagggacggttcgtttggtaagaaaatgcgatgaaggttcgggttttcggtcgtttagggtcgtcgtcgtttttcgtatcgataggtatgcgtattatttcgttttcgtcgtggggaggcgtgcggtttagcggtcggttcgatatgggacgtcgttttggtggtttttgaaaaatagtcgatcgtgtggagtattttcgtgttgaacgattgggattagacgttgaaatttttatttgt

SEQ ID NO: 33894 - DNA, 533 bp, Artificial Sequence
  chemically treated genomic DNA (Homo sapiens) CpG-island No: 33894
acaaataaaaatttcaacgtctaatcccaatcgttcaacacgaaaatactccacacgatcgactatttttcaaaaaccaccaaaacgacgtcccatatcgaaccgaccgctaaaccgcacgcctccccacgacgaaaacgaaataatacgcatacctatcgatacgaaaaacgacgacgaccctaaacgaccgaaaacccgaaccttcatcgcattttcttaccaaacgaaccgtccctaacgctaaaaaaaaacgaacgaacgaacgacgacgacactttaaaaaacgaacaatacttaataatatacgcgttatcgccgctaacgccgcacaaaaaacacgtataacgacgcaacacgaaacacaacactcgcccgtcgaaacccttaaaaatataaataatataacccgccatcgcctccttattattccgacaaaacacgcacacctacaaccccgacttaaacaaccgaacgaccgccgccccgaaaaccgcgtacaaccgaaactcgaccgcccacgccgaaacccg

SEQ ID NO: 33895 - DNA, 533 bp, Artificial Sequence
  chemically treated genomic DNA (Homo sapiens) CpG-island No: 33895
ataaatggggattttagcgtttagttttaatcgtttagtacggaaatattttatacggtcggttgttttttaaaaattattaggacgacgttttatgtcgagtcgatcgttgagtcgtacgtttttttacggcgggggcgagatggtgcgtatatttatcggtgcgaggggcggcggcgattttgggcggtcgggagttcgggtttttatcgtatttttttgttaggcgggtcgtttttggcgttgagggggggcgggcgggcgggcggcggcggtattttggagagcgggtagtatttgatggtgtgcgcgttgtcgtcgttggcgtcgtataggggatacgtgtagcggcgtagtacgggatatagtattcgttcgtcggggtttttgaggatatgggtggtgtagttcgttatcgtttttttgttgtttcggtagaatacgtatatttgtagtttcggtttaagtagtcgggcggtcgtcgtttcggaggtcgcgtgtagtcggggttcggtcgtttacgtcggggttcg

SEQ ID NO: 33896 - DNA, 533 bp, Artificial Sequence
  chemically treated genomic DNA (Homo sapiens) CpG-island No: 33896
cgaaccccgacgtaaacgaccgaaccccgactacacgcgacctccgaaacgacgaccgcccgactacttaaaccgaaactacaaatatacgtattctaccgaaacaacaaaaaaacgataacgaactacaccacccatatcctcaaaaaccccgacgaacgaatactatatcccgtactacgccgctacacgtatcccctatacgacgccaacgacgacaacgcgcacaccatcaaatactacccgctctccaaaataccgccgccgcccgcccgcccgccccccctcaacgccaaaaacgacccgcctaacaaaaaaatacgataaaaacccgaactcccgaccgcccaaaatcgccgccgcccctcgcaccgataaatatacgcaccatctcgcccccgccgtaaaaaaacgtacgactcaacgatcgactcgacataaaacgtcgtcctaataatttttaaaaaacaaccgaccgtataaaatatttccgtactaaacgattaaaactaaacgctaaaatccccatttat

SEQ ID NO: 33897 - DNA, 710 bp, Artificial Sequence
  chemically treated genomic DNA (Homo sapiens) CpG-island No: 33897
acgcggttacgtattatagacgggtatacgcgtttagtatagttatagtcgcgtgtaattaggagtgtatatcgtatttatattatatcgtatgtatagacgtacgggtgtgagattatatatttcggttatttacgtttatacgttttttacgcgttcgtatacgcgttcgtacgcgtatttttcgcgtatcgtcgcgcgtatacgcgggtttcgtcggacggcgaggggcggggcgggcgcgggcgtaggcgcgggtgtttagtcgggcgcggtcgggagagggcgcggcgcggggttcgcggttggcgtttgagttgtttgtcggttttcgggtcgttagacgttcggagggagttcggtcggttcggattgggcggtcgggagggagggcgtttcgggttacgacggcgttcgtaagtcgagcgcggtcgggacgtgtattatggatttaaaggcgggcggcggcggcgaggaggacgattgcgtggattcgggcgtcgagatcggagggtgagtcgcgtcgggtcgggtcgcgggcggggggcgtttttcgagttgcgcggcggttttttttcggacggggatttttttgattcgtgcgacgggatcggggcgcggggtttttttttttgtcggatttttcgtttttttttgggcgggtcgcgttgttttgggtagggcgggtattattcggggggaggaaagtg

SEQ ID NO: 33898 - DNA, 710 bp, Artificial Sequence
  chemically treated genomic DNA (Homo sapiens) CpG-island No: 33898
cactttcctccccccgaataatacccgccctacccaaaacaacgcgacccgcccaaaaaaaaacgaaaaatccgacaaaaaaaaaaaccccgcgccccgatcccgtcgcacgaatcaaaaaaatccccgtccgaaaaaaaaccgccgcgcaactcgaaaaacgccccccgcccgcgacccgacccgacgcgactcaccctccgatctcgacgcccgaatccacgcaatcgtcctcctcgccgccgccgcccgcctttaaatccataatacacgtcccgaccgcgctcgacttacgaacgccgtcgtaacccgaaacgccctccctcccgaccgcccaatccgaaccgaccgaactccctccgaacgtctaacgacccgaaaaccgacaaacaactcaaacgccaaccgcgaaccccgcgccgcgccctctcccgaccgcgcccgactaaacacccgcgcctacgcccgcgcccgccccgcccctcgccgtccgacgaaacccgcgtatacgcgcgacgatacgcgaaaaatacgcgtacgaacgcgtatacgaacgcgtaaaaaacgtataaacgtaaataaccgaaatatataatctcacacccgtacgtctatacatacgatataatataaatacgatatacactcctaattacacgcgactataactatactaaacgcgtatacccgtctataatacgtaaccgcgt

SEQ ID NO: 33899 - DNA, 710 bp, Artificial Sequence
  chemically treated genomic DNA (Homo sapiens) CpG-island No: 33899
tattttttttttttcgggtggtgttcgttttgtttagggtagcgcggttcgtttaggagagagcgggggattcggtaggaggagaagtttcgcgtttcggtttcgtcgtacggattaggagggttttcgttcggggaggagtcgtcgcgtaattcggagagcgtttttcgttcgcggttcggttcggcgcggtttatttttcggtttcggcgttcgagtttacgtagtcgtttttttcgtcgtcgtcgttcgtttttgggtttatggtgtacgtttcggtcgcgttcggtttgcgggcgtcgtcgtgattcggggcgttttttttttcggtcgtttagttcgagtcggtcgggtttttttcgagcgtttggcggttcgggagtcggtaaataatttaagcgttagtcgcgaatttcgcgtcgcgttttttttcgatcgcgttcggttgggtattcgcgtttgcgttcgcgttcgtttcgtttttcgtcgttcggcgggattcgcgtgtgcgcgcggcggtgcgcggggagtgcgcgtgcgagcgcgtgtgcgagcgcgtggggggcgtgtgagcgtgagtggtcgaggtgtgtggttttatattcgtgcgtttgtgtatgcggtgtgatgtgggtgcggtgtgtatttttggttgtacgcgattgtggttgtgttgagcgcgtgtgttcgtttgtggtgcgtgatcgcgt

SEQ ID NO: 33900 - DNA, 710 bp, Artificial Sequence
  chemically treated genomic DNA (Homo sapiens) CpG-island No: 33900
acgcgatcacgcaccacaaacgaacacacgcgctcaacacaaccacaatcgcgtacaaccaaaaatacacaccgcacccacatcacaccgcatacacaaacgcacgaatataaaaccacacacctcgaccactcacgctcacacgccccccacgcgctcgcacacgcgctcgcacgcgcactccccgcgcaccgccgcgcgcacacgcgaatcccgccgaacgacgaaaaacgaaacgaacgcgaacgcaaacgcgaatacccaaccgaacgcgatcgaaaaaaaacgcgacgcgaaattcgcgactaacgcttaaattatttaccgactcccgaaccgccaaacgctcgaaaaaaacccgaccgactcgaactaaacgaccgaaaaaaaaaacgccccgaatcacgacgacgcccgcaaaccgaacgcgaccgaaacgtacaccataaacccaaaaacgaacgacgacgacgaaaaaaacgactacgtaaactcgaacgccgaaaccgaaaaataaaccgcgccgaaccgaaccgcgaacgaaaaacgctctccgaattacgcgacgactcctccccgaacgaaaaccctcctaatccgtacgacgaaaccgaaacgcgaaacttctcctcctaccgaatcccccgctctctcctaaacgaaccgcgctaccctaaacaaaacgaacaccacccgaaaaaaaaaaaata

SEQ ID NO: 33901 - DNA, 683 bp, Artificial Sequence
  chemically treated genomic DNA (Homo sapiens) CpG-island No: 33901
attcgtcgttgtcgtagtcgattatttttttataggagatttggttgtatagatagtacgtgggttcgttggggtcgatggggaggtcggtaggggacgtttttcgtttcgttttggttttggagcgttttttttttttggaggttttggtttttttttttttgggtgtgttcgaggcgtcgtcgtcgtggtcgtggttgttggacgcgtttttacggttttcgttgttgcgttgtcgtcgtgagcgtttgttgttgggtttgttagtttgcgttgtcgtttcgtttttgggtttgttcgcgttagttttgtcgttgttgttcgttgtgtcgtttagtttttgttgcgtttcgaatagttttacgtggttgtttatttgtcgcgtgcggttttttattagttttattatttggtttacgatttggattttttcgtcgtttagtttttggttgcggattagcgcgcgttgtatatagtgtagtatttttcgtttttgcgtttcgtttgtttcgcgattgaagcgttcgtagtattcgtttagtttttttatgatttttgggggtaagaaggataggcgttattcgcgagtaggatatcgggataatttatacggtttcggacgggtttacggagagggttggtagggagtttaggggttagcgtacggtttgtttagaataaag

SEQ ID NO: 33902 - DNA, 683 bp, Artificial Sequence
  chemically treated genomic DNA (Homo sapiens) CpG-island No: 33902
ctttattctaaacaaaccgtacgctaacccctaaactccctaccaaccctctccgtaaacccgtccgaaaccgtataaattatcccgatatcctactcgcgaataacgcctatccttcttacccccaaaaatcataaaaaaactaaacgaatactacgaacgcttcaatcgcgaaacaaacgaaacgcaaaaacgaaaaatactacactatatacaacgcgcgctaatccgcaaccaaaaactaaacgacgaaaaaatccaaatcgtaaaccaaataataaaactaataaaaaaccgcacgcgacaaataaacaaccacgtaaaactattcgaaacgcaacaaaaactaaacgacacaacgaacaacaacgacaaaactaacgcgaacaaacccaaaaacgaaacgacaacgcaaactaacaaacccaacaacaaacgctcacgacgacaacgcaacaacgaaaaccgtaaaaacgcgtccaacaaccacgaccacgacgacgacgcctcgaacacacccaaaaaaaaaaaaaccaaaacctccaaaaaaaaaaaacgctccaaaaccaaaacgaaacgaaaaacgtcccctaccgacctccccatcgaccccaacgaacccacgtactatctatacaaccaaatctcctataaaaaaataatcgactacgacaacgacgaat

SEQ ID NO: 33903 - DNA, 683 bp, Artificial Sequence
  chemically treated genomic DNA (Homo sapiens) CpG-island No: 33903
ttttgttttgggtaagtcgtgcgttggtttttaggttttttgttagtttttttcgtagattcgttcggggtcgtgtgggttgtttcggtgttttgttcgcgagtgacgtttgttttttttgtttttagagattatgaaggagttagacgagtgttacgagcgttttagtcgcgagatagacggggcgtagaagcgggggatgttgtattgtgtgtagcgcgcgttgattcgtagttaggagttgggcgacgagaagatttagatcgtgagttagatggtggagttggtggagaatcgtacgcggtaggtggatagttacgtggagttgttcgaggcgtagtaggagttgggcgatatagcgggtaatagcggtaaggttggcgcggataggtttaaaggcgaggcggtagcgtaggttgataagtttaatagtaagcgtttacggcggtagcgtaataacgagaatcgtgagaacgcgtttagtaattacgattacgacgacggcgtttcgggtatatttaaggagaagaaggttaagatttttaagaagaagaagcgttttaaggttaaggcggagcgagaggcgttttttgtcgatttttttatcgattttaacgaatttacgtattgtttgtgtaattaggttttttatggggagatgatcggttgcgataacgacgagt

SEQ ID NO: 33904 - DNA, 683 bp, Artificial Sequence
  chemically treated genomic DNA (Homo sapiens) CpG-island No: 33904
actcgtcgttatcgcaaccgatcatctccccataaaaaacctaattacacaaacaatacgtaaattcgttaaaatcgataaaaaaatcgacaaaaaacgcctctcgctccgccttaaccttaaaacgcttcttcttcttaaaaatcttaaccttcttctccttaaatatacccgaaacgccgtcgtcgtaatcgtaattactaaacgcgttctcacgattctcgttattacgctaccgccgtaaacgcttactattaaacttatcaacctacgctaccgcctcgcctttaaacctatccgcgccaaccttaccgctattacccgctatatcgcccaactcctactacgcctcgaacaactccacgtaactatccacctaccgcgtacgattctccaccaactccaccatctaactcacgatctaaatcttctcgtcgcccaactcctaactacgaatcaacgcgcgctacacacaatacaacatcccccgcttctacgccccgtctatctcgcgactaaaacgctcgtaacactcgtctaactccttcataatctctaaaaacaaaaaaaacaaacgtcactcgcgaacaaaacaccgaaacaacccacacgaccccgaacgaatctacgaaaaaaactaacaaaaaacctaaaaaccaacgcacgacttacccaaaacaaaa

SEQ ID NO: 33905 - DNA, 970 bp, Artificial Sequence
  chemically treated genomic DNA (Homo sapiens) CpG-island No: 33905
ggcggatacgaattcgttatttttttttgatattcggggcggttaggtttgtagagaacgacgtataggtttttttatttgttatagttttttttaagttagcgatttgttcgcgttttttcgagcgtagcgtagatgggcgtttttttcgttttcgtttttttttttttttttttttttttacggtatatagagaaaagttttcgtttttcgtaaattataatcggcggcgtcgtttttcgtagtcggtttttattcggtgtttagttttaagtgagggtcggagggggttgggcgggggcggtcgatttatttcgagcggagtattattcggtattttatgtaatatttagattcgggattgagtggggggcgattaagaagggttagaggaacggcgttgttcgggatcgaggtatcgggttcgcggaaatttcggtttatagtcgttttttttttgtagtttcgtttcggcgttttatagttttaggcgtcggtatatttttttatttcgcgtcgtaatatgtatttttttttagaggacgcggtttggattcgtcgttttttttttcgtagtattcgttttattattttattataaagagcgttttggtcgcgtagttttgtagcgagatttttcgcgttttttttttttttcgtgtttcgggttttgtatataaggattttggcgaattaaaggcgttttagattttttgtttttgtttttgtcgagggtcgtcgttgcggagtcggtcgtttttttcggtttacggtaggatcggttcggtttcgcggcgcgttcggattcgtcgggaaggaggcggtcgttttcgtttatttattattcggtcgtattttggtatttcgcgtcgatttttcgtattagcgagatatttttttgtaagtcgaaaggtagggattcgatggagtttaggtagttttttatatagtttattaggtggagttgttt

SEQ ID NO: 33906 - DNA, 970 bp, Artificial Sequence
  chemically treated genomic DNA (Homo sapiens) CpG-island No: 33906
aaacaactccacctaataaactatataaaaaactacctaaactccatcgaatccctacctttcgacttacaaaaaaatatctcgctaatacgaaaaatcgacgcgaaataccaaaatacgaccgaataataaataaacgaaaacgaccgcctccttcccgacgaatccgaacgcgccgcgaaaccgaaccgatcctaccgtaaaccgaaaaaaacgaccgactccgcaacgacgaccctcgacaaaaacaaaaacaaaaaatctaaaacgcctttaattcgccaaaatccttatatacaaaacccgaaacacgaaaaaaaaaaaaaacgcgaaaaatctcgctacaaaactacgcgaccaaaacgctctttataataaaataataaaacgaatactacgaaaaaaaaaacgacgaatccaaaccgcgtcctctaaaaaaaaatacatattacgacgcgaaataaaaaaatataccgacgcctaaaactataaaacgccgaaacgaaactacaaaaaaaaaacgactataaaccgaaatttccgcgaacccgatacctcgatcccgaacaacgccgttcctctaacccttcttaatcgccccccactcaatcccgaatctaaatattacataaaataccgaataatactccgctcgaaataaatcgaccgcccccgcccaaccccctccgaccctcacttaaaactaaacaccgaataaaaaccgactacgaaaaacgacgccgccgattataatttacgaaaaacgaaaacttttctctatataccgtaaaaaaaaaaaaaaaaaaaaaaaaacgaaaacgaaaaaaacgcccatctacgctacgctcgaaaaaacgcgaacaaatcgctaacttaaaaaaaactataacaaataaaaaaacctatacgtcgttctctacaaacctaaccgccccgaatatcaaaaaaaaataacgaattcgtatccgcc

SEQ ID NO: 33907 - DNA, 970 bp, Artificial Sequence
  chemically treated genomic DNA (Homo sapiens) CpG-island No: 33907
gagtagttttatttggtgaattatgtggaggattatttggattttatcgagtttttgtttttcgatttgtagagaaatgtttcgttgatgcgggagatcgacgcgaaatattaaggtacggtcgggtgatggatgggcgggggcggtcgtttttttttcggcgggttcgggcgcgtcgcggagtcgggtcggttttgtcgtggatcggaggaagcggtcggtttcgtagcggcggttttcggtaggggtaggaataaaaggtttggagcgtttttgattcgttaaggtttttgtgtgtaaagttcgggatacggaggaggaaggaggcgcgagaggtttcgttgtaaggttgcgcgattaaagcgttttttgtagtgaagtgatgaggcgggtgttgcgggggagggggcggcgggtttaagtcgcgttttttaggagggggtgtatattacggcgcgagatggagggatgtgtcggcgtttggggttatagggcgtcgagacggggttgtaggagaagggcggttgtgggtcggggttttcgcggattcggtgtttcggtttcgggtaacgtcgtttttttggttttttttagtcgttttttatttagtttcgaatttgagtgttatataaagtatcgggtagtatttcgttcggggtaggtcggtcgttttcgtttagtttttttcggtttttatttggagttggatatcgagtaggggtcgattgcgaggggcgacgtcgtcggttgtagtttgcggaggacgagggtttttttttgtgtgtcgtagggaagggaagggaaggggaggagcggaggcggggaaggcgtttatttgcgttgcgttcgggggggcgcgggtagatcgttggtttggagaggattgtggtaggtgagaggatttgtgcgtcgttttttgtagatttggtcgtttcgggtgttagagagaggtggcgagttcgtgttcgtt

SEQ ID NO: 33908 - DNA, 970 bp, Artificial Sequence
  chemically treated genomic DNA (Homo sapiens) CpG-island No: 33908
aacgaacacgaactcgccacctctctctaacacccgaaacgaccaaatctacaaaaaacgacgcacaaatcctctcacctaccacaatcctctccaaaccaacgatctacccgcgcccccccgaacgcaacgcaaataaacgccttccccgcctccgctcctccccttcccttcccttccctacgacacacaaaaaaaaaccctcgtcctccgcaaactacaaccgacgacgtcgcccctcgcaatcgacccctactcgatatccaactccaaataaaaaccgaaaaaaactaaacgaaaacgaccgacctaccccgaacgaaatactacccgatactttatataacactcaaattcgaaactaaataaaaaacgactaaaaaaaaccaaaaaaacgacgttacccgaaaccgaaacaccgaatccgcgaaaaccccgacccacaaccgcccttctcctacaaccccgtctcgacgccctataaccccaaacgccgacacatccctccatctcgcgccgtaatatacaccccctcctaaaaaacgcgacttaaacccgccgccccctcccccgcaacacccgcctcatcacttcactacaaaaaacgctttaatcgcgcaaccttacaacgaaacctctcgcgcctccttcctcctccgtatcccgaactttacacacaaaaaccttaacgaatcaaaaacgctccaaaccttttattcctacccctaccgaaaaccgccgctacgaaaccgaccgcttcctccgatccacgacaaaaccgacccgactccgcgacgcgcccgaacccgccgaaaaaaaaacgaccgcccccgcccatccatcacccgaccgtaccttaatatttcgcgtcgatctcccgcatcaacgaaacatttctctacaaatcgaaaaacaaaaactcgataaaatccaaataatcctccacataattcaccaaataaaactactc

SEQ ID NO: 33909 - DNA, 812 bp, Artificial Sequence
  chemically treated genomic DNA (Homo sapiens) CpG-island No: 33909
ttgtaaacgtttttttcgcgcggcggatatagttttaggttggtatcgcgcgtatacggacgtttcgtaggatttgggttaataaggagaggagatcggtacggtatcgtttttttttacggtttttcggcgcggtatcgtttttttttttttatttcgggtttttttcgttttaattttttcgggttttggttttttatttttgtcgcgggcgattcgagttaggttaaagggaggcgttatttgaggattgttttcgggagtgggcgtggttttaagggcgtgggcggggcggggcggggtcgtgttgtttttgagcgatcggtagcgtattcggcgtggttttcgttttcgtttagtcgtaggcgttggtcgttgatatgttgaggattacgcgcggtttaagtttgggtttttcgttgttttaggtcgcgttgggttttgggcgggttgggtggtattggtttgcgggtcgggcggcgagcggggggcgcgggcgggtttggttgtagtttacgggtcgggagacgggtgtgtaggtgtataatagttttatcgggaggaaggaatttttaatcgtggcgtacgtcgaagtcgttttttggtgggtcgcgcgggattggggtacgggcgggggtcgatcgtggcggagattttttacggttgaacgggatttgggttcggggagggcgtttaggaagttgtatggagggcgtcgttttagaagttgggggtgcgcggtgtttttgtaggtttgggtgtgaattgagtaagtatgaaaatttcggttatttattttttagaagtgatta

SEQ ID NO: 33910 - DNA, 812 bp, Artificial Sequence
  chemically treated genomic DNA (Homo sapiens) CpG-island No: 33910
taatcacttctaaaaaataaataaccgaaattttcatacttactcaattcacacccaaacctacaaaaacaccgcgcacccccaacttctaaaacgacgccctccatacaacttcctaaacgccctccccgaacccaaatcccgttcaaccgtaaaaaatctccgccacgatcgacccccgcccgtaccccaatcccgcgcgacccaccaaaaaacgacttcgacgtacgccacgattaaaaattccttcctcccgataaaactattatacacctacacacccgtctcccgacccgtaaactacaaccaaacccgcccgcgccccccgctcgccgcccgacccgcaaaccaataccacccaacccgcccaaaacccaacgcgacctaaaacaacgaaaaacccaaacttaaaccgcgcgtaatcctcaacatatcaacgaccaacgcctacgactaaacgaaaacgaaaaccacgccgaatacgctaccgatcgctcaaaaacaacacgaccccgccccgccccgcccacgcccttaaaaccacgcccactcccgaaaacaatcctcaaataacgcctccctttaacctaactcgaatcgcccgcgacaaaaataaaaaaccaaaacccgaaaaaattaaaacgaaaaaaacccgaaataaaaaaaaaaaaacgataccgcgccgaaaaaccgtaaaaaaaaacgataccgtaccgatctcctctccttattaacccaaatcctacgaaacgtccgtatacgcgcgataccaacctaaaactatatccgccgcgcgaaaaaaacgtttacaa

SEQ ID NO: 33911 - DNA, 812 bp, Artificial Sequence
  chemically treated genomic DNA (Homo sapiens) CpG-island No: 33911
taattatttttgggggatgaatagtcggggtttttatatttgtttaatttatatttaaatttgtaaaagtatcgcgtatttttagtttttagaacggcgttttttatgtagttttttaaacgtttttttcgagtttagatttcgtttagtcgtgggaagttttcgttacgatcggttttcgttcgtgttttagtttcgcgcggtttattaggaggcggtttcggcgtgcgttacgattaggggtttttttttttcggtgaggttgttgtatatttgtatattcgtttttcggttcgtgggttgtagttaggttcgttcgcgtttttcgttcgtcgttcggttcgtaggttagtgttatttagttcgtttaaggtttagcgcggtttggagtagcggggggtttaggtttgggtcgcgcgtagtttttaatatgttagcggttagcgtttacgattgggcggagacgggagttacgtcgggtacgttgtcggtcgtttaagagtagtacggtttcgtttcgtttcgtttacgtttttggggttacgtttattttcggaagtagtttttaggtagcgtttttttttggtttggttcgagtcgttcgcggtaagggtggagaattagggttcgaagaggttggggcggggaaggttcggggtggagggaggagggcggtgtcgcgtcgggaggtcgtgggaagaggcggtatcgtgtcgattttttttttttattagtttaggttttgcgaggcgttcgtgtgcgcgcggtattagtttggagttgtgttcgtcgcgcgggaggagcgtttatag

SEQ ID NO: 33912 - DNA, 812 bp, Artificial Sequence
  chemically treated genomic DNA (Homo sapiens) CpG-island No: 33912
ctataaacgctcctcccgcgcgacgaacacaactccaaactaataccgcgcgcacacgaacgcctcgcaaaacctaaactaataaaaaaaaaaaatcgacacgataccgcctcttcccacgacctcccgacgcgacaccgccctcctccctccaccccgaaccttccccgccccaacctcttcgaaccctaattctccacccttaccgcgaacgactcgaaccaaaccaaaaaaaaacgctacctaaaaactacttccgaaaataaacgtaaccccaaaaacgtaaacgaaacgaaacgaaaccgtactactcttaaacgaccgacaacgtacccgacgtaactcccgtctccgcccaatcgtaaacgctaaccgctaacatattaaaaactacgcgcgacccaaacctaaaccccccgctactccaaaccgcgctaaaccttaaacgaactaaataacactaacctacgaaccgaacgacgaacgaaaaacgcgaacgaacctaactacaacccacgaaccgaaaaacgaatatacaaatatacaacaacctcaccgaaaaaaaaaaacccctaatcgtaacgcacgccgaaaccgcctcctaataaaccgcgcgaaactaaaacacgaacgaaaaccgatcgtaacgaaaacttcccacgactaaacgaaatctaaactcgaaaaaaacgtttaaaaaactacataaaaaacgccgttctaaaaactaaaaatacgcgatacttttacaaatttaaatataaattaaacaaatataaaaaccccgactattcatcccccaaaaataatta

SEQ ID NO: 33913 - DNA, 668 bp, Artificial Sequence
  chemically treated genomic DNA (Homo sapiens) CpG-island No: 33913
cgtcgtgagggggacgtcgtgagaggggtgttttgagggggacgtcgtgaggggggagcgtggtgacggggacgtcgtgaggggggcgtcgtgagaaggacgttgttagtggaggcgtggtgagggggggttaggagagggacgtcgtgaggggggcgtattgtgagggggtcgcgttatgagggggatgtgtcgtgagggaggcgcgacgtgaggagggtacgtagtgaggaaggcgtcgtgagggggattttgtgagggggagtatcgtgagggggattttttgaaggaggtgtatcgtgacgggggcgtcgtgacggggatgtcgtgaggagggcgcgtggtaacgggggtatcgtgaggggagcgcgtcgtgtggagggcgtcgtgacggggacgtcgtgaggagggtacgtcgtgaggaaggcgtcgtgagggggaggtcgtgagggggacgtgacgaagggggcgcgtcgtgacgggggcgtcgtgagggggatgtcgtgaggagggcgcgtggtaacgggggtatcgtgaggggagcgcgtcgtgtgtagggcgtcgtgacgggtacgtcgtgaggggcgcgttgtgaggcgagtttttgttttttttttttggagttttcgttttttagttgtttttcgtcgttaggggttttttttgtt

SEQ ID NO: 33914 - DNA, 668 bp, Artificial Sequence
  chemically treated genomic DNA (Homo sapiens) CpG-island No: 33914
aacaaaaaaaacccctaacgacgaaaaacaactaaaaaacgaaaactccaaaaaaaaaaaacaaaaactcgcctcacaacgcgcccctcacgacgtacccgtcacgacgccctacacacgacgcgctcccctcacgatacccccgttaccacgcgccctcctcacgacatccccctcacgacgcccccgtcacgacgcgcccccttcgtcacgtccccctcacgacctccccctcacgacgccttcctcacgacgtaccctcctcacgacgtccccgtcacgacgccctccacacgacgcgctcccctcacgatacccccgttaccacgcgccctcctcacgacatccccgtcacgacgcccccgtcacgatacacctccttcaaaaaatccccctcacgatactccccctcacaaaatccccctcacgacgccttcctcactacgtaccctcctcacgtcgcgcctccctcacgacacatccccctcataacgcgaccccctcacaatacgcccccctcacgacgtccctctcctaaccccccctcaccacgcctccactaacaacgtccttctcacgacgcccccctcacgacgtccccgtcaccacgctcccccctcacgacgtccccctcaaaacacccctctcacgacgtccccctcacgacg

SEQ ID NO: 33915 - DNA, 668 bp, Artificial Sequence
  chemically treated genomic DNA (Homo sapiens) CpG-island No: 33915
gataggaagagtttttgacggcggggggtagttgaggagcgggagttttagggggagggggtagagattcgttttatagcgcgttttttacgacgtgttcgttacgacgttttatatacgacgcgttttttttacgatgttttcgttattacgcgttttttttacgatattttttttacgacgttttcgttacgacgcgtttttttcgttacgttttttttacgattttttttttacgacgttttttttacgacgtgttttttttacgacgttttcgttacgacgttttttatacgacgcgttttttttacgatgttttcgttattacgcgttttttttacgatattttcgttacgacgttttcgttacgatgtattttttttaggaagttttttttacgatgtttttttttataaagttttttttacgacgttttttttattacgtgttttttttacgtcgcgttttttttacgatatattttttttatgacgcggtttttttataatgcgttttttttacgacgttttttttttgatttttttttattacgtttttattgataacgttttttttacgacgttttttttacgacgttttcgttattacgttttttttttacgacgttttttttaggatattttttttacgacgttttttttacgacg

SEQ ID NO: 33916 - DNA, 668 bp, Artificial Sequence
  chemically treated genomic DNA (Homo sapiens) CpG-island No: 33916
cgtcgtaaaaaaaacgtcgtaaaaaaaatatcctaaaaaaaacgtcgtaaaaaaaaaacgtaataacgaaaacgtcgtaaaaaaaacgtcgtaaaaaaaacgttatcaataaaaacgtaataaaaaaaaatcaaaaaaaaaacgtcgtaaaaaaaacgcattataaaaaaaccgcgtcataaaaaaaatatatcgtaaaaaaaacgcgacgtaaaaaaaacacgtaataaaaaaaacgtcgtaaaaaaaactttataaaaaaaaacatcgtaaaaaaaacttcctaaaaaaaatacatcgtaacgaaaacgtcgtaacgaaaatatcgtaaaaaaaacgcgtaataacgaaaacatcgtaaaaaaaacgcgtcgtataaaaaacgtcgtaacgaaaacgtcgtaaaaaaaacacgtcgtaaaaaaaacgtcgtaaaaaaaaaatcgtaaaaaaaacgtaacgaaaaaaacgcgtcgtaacgaaaacgtcgtaaaaaaaatatcgtaaaaaaaacgcgtaataacgaaaacatcgtaaaaaaaacgcgtcgtatataaaacgtcgtaacgaacacgtcgtaaaaaacgcgctataaaacgaatctctaccccctccccctaaaactcccgctcctcaactaccccccgccgtcaaaaactcttcctatc

SEQ ID NO: 33917 - DNA, 914 bp, Artificial Sequence
  chemically treated genomic DNA (Homo sapiens) CpG-island No: 33917
attacgtggggagttttaagaattttttttaagaaagtgattgattgatggcgggggagggggtgggcgcgggtttagtttcgggaaaaggttggggttttcgttgggagtgtatagaaagatgatttgaagaacgtggggagtcgttcgtagttcggtacggaggggcggtggtcggggttgttgggtataagggatcggtagcgcgcggaatattcgtttttaattttcgttttcgtgcgcgtttcgtttttacgcgcgcgttttttttcgttaggcgcgtagagaggcggggcgtagcgcgtacggaggtaataagggacgcggcgggaagagggcgtgcgtttcgtttcgtttttttcgcggtttcgtacgtttcgtttttattttttgcgcgtgttgggagtcggttggtaaggcgtgcggtgggcggggcgtcgcgttgacgttgttcgggatgcggataggtttcgtcgtttttagcgtcgtcgtcgtagttgtcgtcgtcgtcgttttcgtttcgtttgttatcggggtttgtatgaaaatatcgggcggcgggcggcgagggattcgtcgtgatttaggtgttgagtcgggtgttgcggttttgcgcggttttcgttagcgttttattttgagtcggtgagcgttttgttgtagtttttatgtttcggtcggtcgtttttttgtttttttcgggtcgcgggagatgcgagcgacggcgttcgggggtaggaggggcgatttcggatttttgcgttttttatttgacgggttgtgtaacgtatgttatatatgtgacgcgtgaggggaacgtattcggttttgagggaaagttttgacggggtggggttttgattgggtttggaaaacgttttttttagttttcggattttcggtggattttcgtt

SEQ ID NO: 33918 - DNA, 914 bp, Artificial Sequence
  chemically treated genomic DNA (Homo sapiens) CpG-island No: 33918
aacgaaaatccaccgaaaatccgaaaactaaaaaaaacgttttccaaacccaatcaaaaccccaccccgtcaaaactttccctcaaaaccgaatacgttcccctcacgcgtcacatatataacatacgttacacaacccgtcaaataaaaaacgcaaaaatccgaaatcgcccctcctacccccgaacgccgtcgctcgcatctcccgcgacccgaaaaaaacaaaaaaacgaccgaccgaaacataaaaactacaacaaaacgctcaccgactcaaaataaaacgctaacgaaaaccgcgcaaaaccgcaacacccgactcaacacctaaatcacgacgaatccctcgccgcccgccgcccgatattttcatacaaaccccgataacaaacgaaacgaaaacgacgacgacgacaactacgacgacgacgctaaaaacgacgaaacctatccgcatcccgaacaacgtcaacgcgacgccccgcccaccgcacgccttaccaaccgactcccaacacgcgcaaaaaataaaaacgaaacgtacgaaaccgcgaaaaaaacgaaacgaaacgcacgccctcttcccgccgcgtcccttattacctccgtacgcgctacgccccgcctctctacgcgcctaacgaaaaaaaacgcgcgcgtaaaaacgaaacgcgcacgaaaacgaaaattaaaaacgaatattccgcgcgctaccgatcccttatacccaacaaccccgaccaccgcccctccgtaccgaactacgaacgactccccacgttcttcaaatcatctttctatacactcccaacgaaaaccccaaccttttcccgaaactaaacccgcgcccaccccctcccccgccatcaatcaatcactttcttaaaaaaaattcttaaaactccccacgtaat

SEQ ID NO: 33919 - DNA, 914 bp, Artificial Sequence
  chemically treated genomic DNA (Homo sapiens) CpG-island No: 33919
gacggggatttatcgagggttcggggattggggaaggcgttttttagatttagttaaagttttatttcgttagggtttttttttaagatcgagtgcgttttttttacgcgttatatgtgtaatatgcgttatataattcgttaggtaaggggcgtagggattcggggtcgttttttttattttcgggcgtcgtcgttcgtatttttcgcggttcggggagagtagagggacggtcggtcgggatatgaggattgtagtagggcgtttatcggtttaggatggggcgttggcggggatcgcgtagagtcgtagtattcggtttagtatttggattacggcggatttttcgtcgttcgtcgttcggtgtttttatataaatttcggtggtaggcgaggcggaggcggcggcggcggtagttgcggcggcggcgttggaggcggcggaatttgttcgtatttcgggtaacgttagcgcggcgtttcgtttatcgtacgttttgttagtcggtttttagtacgcgtagggagtgggggcggggcgtgcgaggtcgcgaaaggggcggggcggagcgtacgtttttttttcgtcgcgttttttgttattttcgtgcgcgttgcgtttcgtttttttgcgcgtttgacgggagggagcgcgcgcgtgggggcggagcgcgtacgggagcgggaattaggggcgggtgtttcgcgcgttgtcggttttttgtatttagtagtttcggttatcgttttttcgtatcgaattgcgagcgattttttacgttttttaagttatttttttgtatatttttaacgagggttttagttttttttcggaattaagttcgcgtttattttttttttcgttattaattagttatttttttaggaagggtttttaaagttttttacgtgat

SEQ ID NO: 33920 - DNA, 914 bp, Artificial Sequence
  chemically treated genomic DNA (Homo sapiens) CpG-island No: 33920
atcacgtaaaaaactttaaaaacccttcctaaaaaaataactaattaataacgaaaaaaaaaataaacgcgaacttaattccgaaaaaaaactaaaaccctcgttaaaaatatacaaaaaaataacttaaaaaacgtaaaaaatcgctcgcaattcgatacgaaaaaacgataaccgaaactactaaatacaaaaaaccgacaacgcgcgaaacacccgcccctaattcccgctcccgtacgcgctccgcccccacgcgcgcgctccctcccgtcaaacgcgcaaaaaaacgaaacgcaacgcgcacgaaaataacaaaaaacgcgacgaaaaaaaaacgtacgctccgccccgcccctttcgcgacctcgcacgccccgcccccactccctacgcgtactaaaaaccgactaacaaaacgtacgataaacgaaacgccgcgctaacgttacccgaaatacgaacaaattccgccgcctccaacgccgccgccgcaactaccgccgccgccgcctccgcctcgcctaccaccgaaatttatataaaaacaccgaacgacgaacgacgaaaaatccgccgtaatccaaatactaaaccgaatactacgactctacgcgatccccgccaacgccccatcctaaaccgataaacgccctactacaatcctcatatcccgaccgaccgtccctctactctccccgaaccgcgaaaaatacgaacgacgacgcccgaaaataaaaaaaacgaccccgaatccctacgccccttacctaacgaattatataacgcatattacacatataacgcgtaaaaaaaacgcactcgatcttaaaaaaaaaccctaacgaaataaaactttaactaaatctaaaaaacgccttccccaatccccgaaccctcgataaatccccgtc

SEQ ID NO: 33921 - DNA, 540 bp, Artificial Sequence
  chemically treated genomic DNA (Homo sapiens) CpG-island No: 33921
ttcgcgggggtcgagtcgcgtatattttcggcgttgtcgtcgtcgagcgggtaagcgcggtcgggcgggcgagcgcgggtttattttgttggtcgtcgggcgggcgggttgcgcgcgttcgttttattcgtattatacgttgtagttggtttcgttttgtttttttgggatttagcgttgattttatcgatatttcgcggataattaatgggttgcggtgttcgtttttttattagtatgtttttggaatcgtttattttggtagcgttcggttagcgggcggtgtcgggggcggggtcgggtttagtcgtgataggaaggggcgtgtgcgcggatgggaggcgaagaagtgttcggcgttcggtttttggtattgtgagttcgtcggttttcgtcggtaacgggcgcgcgggtttagtaatttttttcgttttggtcgggtcggacgttggtttggcgcgttttttggtttttcggaagggtcgtttacggggagtttggaaggaattttagacgtaaaataatagtgataagttattt

SEQ ID NO: 33922 - DNA, 540 bp, Artificial Sequence
  chemically treated genomic DNA (Homo sapiens) CpG-island No: 33922
aaataacttatcactattattttacgtctaaaattccttccaaactccccgtaaacgacccttccgaaaaaccaaaaaacgcgccaaaccaacgtccgacccgaccaaaacgaaaaaaattactaaacccgcgcgcccgttaccgacgaaaaccgacgaactcacaataccaaaaaccgaacgccgaacacttcttcgcctcccatccgcgcacacgccccttcctatcacgactaaacccgaccccgcccccgacaccgcccgctaaccgaacgctaccaaaataaacgattccaaaaacatactaataaaaaaacgaacaccgcaacccattaattatccgcgaaatatcgataaaatcaacgctaaatcccaaaaaaacaaaacgaaaccaactacaacgtataatacgaataaaacgaacgcgcgcaacccgcccgcccgacgaccaacaaaataaacccgcgctcgcccgcccgaccgcgcttacccgctcgacgacgacaacgccgaaaatatacgcgactcgacccccgcgaa

SEQ ID NO: 33923 - DNA, 540 bp, Artificial Sequence
  chemically treated genomic DNA (Homo sapiens) CpG-island No: 33923
aaataatttattattgttattttacgtttaaggttttttttaagtttttcgtgggcgattttttcgaaggattagaaggcgcgttaggttagcgttcggttcggttaggacggaaagggttattaggttcgcgcgttcgttatcggcggaggtcggcgggtttataatgttaggagtcgggcgtcggatattttttcgttttttattcgcgtatacgtttttttttgttacggttgggttcggtttcgttttcggtatcgttcgttggtcgggcgttgttagagtggacggttttagaggtatgttaatgagggggcgggtatcgtagtttattggttgttcgcggagtgtcggtgaagttagcgttgagttttagaaaaatagagcggggttagttgtagcgtgtagtgcgagtggggcggacgcgcgtagttcgttcgttcggcgattagtaaggtaagttcgcgttcgttcgttcggtcgcgtttgttcgttcggcggcggtagcgtcgggggtgtgcgcggttcggttttcgcggg

SEQ ID NO: 33924 - DNA, 540 bp, Artificial Sequence
  chemically treated genomic DNA (Homo sapiens) CpG-island No: 33924
cccgcgaaaaccgaaccgcgcacacccccgacgctaccgccgccgaacgaacaaacgcgaccgaacgaacgaacgcgaacttaccttactaatcgccgaacgaacgaactacgcgcgtccgccccactcgcactacacgctacaactaaccccgctctatttttctaaaactcaacgctaacttcaccgacactccgcgaacaaccaataaactacgatacccgccccctcattaacatacctctaaaaccgtccactctaacaacgcccgaccaacgaacgataccgaaaacgaaaccgaacccaaccgtaacaaaaaaaaacgtatacgcgaataaaaaacgaaaaaatatccgacgcccgactcctaacattataaacccgccgacctccgccgataacgaacgcgcgaacctaataaccctttccgtcctaaccgaaccgaacgctaacctaacgcgccttctaatccttcgaaaaaatcgcccacgaaaaacttaaaaaaaaccttaaacgtaaaataacaataataaattattt

SEQ ID NO: 33925 - DNA, 529 bp, Artificial Sequence
  chemically treated genomic DNA (Homo sapiens) CpG-island No: 33925
ttttcgtttgattttttttcgtttttaggtttttttcgattttttcgagtcgggacggttgaagcggtcggcgggagtttcggtatttcgggcgtatttatcgtggtgggtcggagggtatttttgtatcgtggttttgatcgagttttcgtagtagggcgggacgtggttgttttgatcgtcgatgttaaaaagtatatttatttttttcggtagcgggtattgcgtcgcgtttatgtaggagtggttgaggttcgggtggtgcgtgttcgggtgttgttcgttgagtacggcggggtggtggtggtttatttagcgcggttggttcgtcgttatttttatggtttcggttgtgttcgcgttttttcgtcgggttcggaattcgcgcgcgggagggagggttgttcgtttgggaagtcggggggtttttgtcgttcgagggtttggggtcgttgaatgatttgttttcggtggggggatgggaaggttgggaagtaaaggtgagtaaaggagaaggttttttaaaaat

SEQ ID NO: 33926 - DNA, 529 bp, Artificial Sequence
  chemically treated genomic DNA (Homo sapiens) CpG-island No: 33926
atttttaaaaaaccttctcctttactcacctttacttcccaaccttcccatccccccaccgaaaacaaatcattcaacgaccccaaaccctcgaacgacaaaaaccccccgacttcccaaacgaacaaccctccctcccgcgcgcgaattccgaacccgacgaaaaaacgcgaacacaaccgaaaccataaaaataacgacgaaccaaccgcgctaaataaaccaccaccaccccgccgtactcaacgaacaacacccgaacacgcaccacccgaacctcaaccactcctacataaacgcgacgcaatacccgctaccgaaaaaaataaatatactttttaacatcgacgatcaaaacaaccacgtcccgccctactacgaaaactcgatcaaaaccacgatacaaaaataccctccgacccaccacgataaatacgcccgaaataccgaaactcccgccgaccgcttcaaccgtcccgactcgaaaaaatcgaaaaaaacctaaaaacgaaaaaaaatcaaacgaaaa

SEQ ID NO: 33927 - DNA, 529 bp, Artificial Sequence
  chemically treated genomic DNA (Homo sapiens) CpG-island No: 33927
atttttaaaaaatttttttttttgtttatttttgttttttagtttttttatttttttatcgaaagtaaattatttaacgattttaggttttcggacggtaggagtttttcgattttttaggcggatagttttttttttcgcgcgcgggtttcgggttcggcgagagggcgcgagtatagtcgaggttatggaggtgacggcggattagtcgcgttgggtgagttattattatttcgtcgtgtttaacgggtagtattcggatacgtattattcgggttttagttatttttatatggacgcggcgtagtattcgttgtcggaggaggtggatgtgttttttaatatcgacggttaaggtaattacgtttcgttttattacggaaattcggttagggttacggtgtagaggtatttttcgatttattacggtgagtgcgttcggggtgtcggggttttcgtcggtcgttttagtcgtttcggttcggggaggtcgggagggatttgagggcggggagaggttaagcgaaag

SEQ ID NO: 33928 - DNA, 529 bp, Artificial Sequence
  chemically treated genomic DNA (Homo sapiens) CpG-island No: 33928
ctttcgcttaacctctccccgccctcaaatccctcccgacctccccgaaccgaaacgactaaaacgaccgacgaaaaccccgacaccccgaacgcactcaccgtaataaatcgaaaaatacctctacaccgtaaccctaaccgaatttccgtaataaaacgaaacgtaattaccttaaccgtcgatattaaaaaacacatccacctcctccgacaacgaatactacgccgcgtccatataaaaataactaaaacccgaataatacgtatccgaatactacccgttaaacacgacgaaataataataactcacccaacgcgactaatccgccgtcacctccataacctcgactatactcgcgccctctcgccgaacccgaaacccgcgcgcgaaaaaaaaaactatccgcctaaaaaatcgaaaaactcctaccgtccgaaaacctaaaatcgttaaataatttactttcgataaaaaaataaaaaaactaaaaaacaaaaataaacaaaaaaaaaaattttttaaaaat

SEQ ID NO: 33929 - DNA, 822 bp, Artificial Sequence
  chemically treated genomic DNA (Homo sapiens) CpG-island No: 33929
cgtttttttcggttattagcgtgaagtagatgtggcgttcggtgttttttacgtattttacggttttgatgcgggcgaagttgagttttttgggtcggtcgttcgtgtttttggtttcgaagagttgtagttcgcgttcggtgaggacgtagcgttttcgtttttatagttgtagtagttcgtcgttgcgtttttttagtacgttttttttgagtacggtagtcgtcgtcgtcgtcgttatgggcgtttcgaggttcgcggaaagttttaggttgcggcgggcgcggcgtttttttcggtttcgtagcgtaggattttggcgtttcgggttggtaggtcgtgcgcgttgtttatttgcgttttgattgtttcgcgtatttatatcgcggtttttagtattcggttgtcggtgaggtggtgtcggtgtttttagcgcgtttcgcgtttatcgtttcgttttagtcggtattcgttttttcgttttattttagttggtttagttcgattcgtttttgttagatgttttcgcgtttttttaggtcgtgagttttatcgttcgttcgtttttttgtttttttgggttttgtttgcgcgttgggcggtagttcgcgggatgtgtttttatatgtttcgtcgttcgttttttgcgtcgttcgttcgtagcgtatttttattttggtcggttttttttttcgcgtcgcgtattagtttcggtagggtttcgggggcggggtcgtagcgggggtttagttatttattggaggcgtagggcgcggggcggggagggtcgggattgagagggggttgtttatttaatagttt

SEQ ID NO: 33930 - DNA, 822 bp, Artificial Sequence
  chemically treated genomic DNA (Homo sapiens) CpG-island No: 33930
aaactattaaataaacaaccccctctcaatcccgaccctccccgccccgcgccctacgcctccaataaataactaaacccccgctacgaccccgcccccgaaaccctaccgaaactaatacgcgacgcgaaaaaaaaaaccgaccaaaataaaaatacgctacgaacgaacgacgcaaaaaacgaacgacgaaacatataaaaacacatcccgcgaactaccgcccaacgcgcaaacaaaacccaaaaaaacaaaaaaacgaacgaacgataaaactcacgacctaaaaaaacgcgaaaacatctaacaaaaacgaatcgaactaaaccaactaaaataaaacgaaaaaacgaataccgactaaaacgaaacgataaacgcgaaacgcgctaaaaacaccgacaccacctcaccgacaaccgaatactaaaaaccgcgatataaatacgcgaaacaatcaaaacgcaaataaacaacgcgcacgacctaccaacccgaaacgccaaaatcctacgctacgaaaccgaaaaaaacgccgcgcccgccgcaacctaaaactttccgcgaacctcgaaacgcccataacgacgacgacgacgactaccgtactcaaaaaaaacgtactaaaaaaacgcaacgacgaactactacaactataaaaacgaaaacgctacgtcctcaccgaacgcgaactacaactcttcgaaaccaaaaacacgaacgaccgacccaaaaaactcaacttcgcccgcatcaaaaccgtaaaatacgtaaaaaacaccgaacgccacatctacttcacgctaataaccgaaaaaaacg

SEQ ID NO: 33931 - DNA, 822 bp, Artificial Sequence
  chemically treated genomic DNA (Homo sapiens) CpG-island No: 33931
gggttgttgagtaagtagtttttttttagtttcggtttttttcgtttcgcgttttgcgtttttagtgagtgattgagttttcgttgcggtttcgttttcggggttttgtcggagttggtgcgcggcgcggaggggagggtcggttagggtaggaatgcgttgcgggcgggcggcgtaggaggcgagcggcggaatatgtaagggtatatttcgcgagttgtcgtttagcgcgtagatagagtttaggggagtaagagaacgggcgggcggtggggtttacggtttagggaggcgcggaggtatttggtagaggcgggtcgggttgggttagttggggtagagcggaggagcgggtgtcggttgaagcggggcggtgggcgcggagcgcgttgggggtatcgatattattttatcggtagtcgggtgttgagggtcgcggtgtgggtgcgcggagtagttagggcgtaggtgggtagcgcgtacggtttgttagttcggggcgttagaattttgcgttgcggggtcgagaggggcgtcgcgttcgtcgtagtttggagtttttcgcgaatttcggggcgtttatgacggcggcggcgacggttatcgtgtttaaggagggcgtgttggagaagcgtagcggcgggttgttgtagttgtggaagcggaagcgttgcgtttttatcgaacgcgggttgtagtttttcgaggttaagggtacgggcggtcggtttaaggagtttagtttcgttcgtattaaggtcgtggagtgcgtggagagtatcgggcgttatatttattttacgttggtgatcgaagggggcg

SEQ ID NO: 33932 - DNA, 822 bp, Artificial Sequence
  chemically treated genomic DNA (Homo sapiens) CpG-island No: 33932
cgcccccttcgatcaccaacgtaaaataaatataacgcccgatactctccacgcactccacgaccttaatacgaacgaaactaaactccttaaaccgaccgcccgtacccttaacctcgaaaaactacaacccgcgttcgataaaaacgcaacgcttccgcttccacaactacaacaacccgccgctacgcttctccaacacgccctccttaaacacgataaccgtcgccgccgccgtcataaacgccccgaaattcgcgaaaaactccaaactacgacgaacgcgacgcccctctcgaccccgcaacgcaaaattctaacgccccgaactaacaaaccgtacgcgctacccacctacgccctaactactccgcgcacccacaccgcgaccctcaacacccgactaccgataaaataatatcgatacccccaacgcgctccgcgcccaccgccccgcttcaaccgacacccgctcctccgctctaccccaactaacccaacccgacccgcctctaccaaatacctccgcgcctccctaaaccgtaaaccccaccgcccgcccgttctcttactcccctaaactctatctacgcgctaaacgacaactcgcgaaatatacccttacatattccgccgctcgcctcctacgccgcccgcccgcaacgcattcctaccctaaccgaccctcccctccgcgccgcgcaccaactccgacaaaaccccgaaaacgaaaccgcaacgaaaactcaatcactcactaaaaacgcaaaacgcgaaacgaaaaaaaccgaaactaaaaaaaaactacttactcaacaaccc

SEQ ID NO: 33933 - DNA, 603 bp, Artificial Sequence
  chemically treated genomic DNA (Homo sapiens) CpG-island No: 33933
gtagtcggcgtgtgtttggggtagcgggttacgaggtttcgtttcggtcgtcgttttcgaggggacggtattttgtttaggatgtcgtttttttttttattgtggggtcggggtcggcggttgttttagtgcggggttcgaggttggagtgcgcggcggacgttaagtttggtgcgaggggtcgaggcggtttggggagtttcgggaaattttgtgttcgcgagaagcggatttcgtattcgcgttgtttttggggatgcgcgattttgcgcggttgcggcgcggattcggagttcgggcgggtaggcgtttcggtgagtggtcggcgcggggcggtcgcgcggtcgcggcgttgagggtttggcgtttttcgttttgcgaggtttggttggtaggttttgcgaggtcgagattaagtttcggggtaggggaggttggtgttcgagggagttgtgggttgggttcgggagaggcgttggaataaataataattaagatgttcgcggtttttcggaaaggtgtgtgttttttcgatttttatgggattgattgcgcgtttgattttagagttgatttttcgggggggttgtttaattttagttt

SEQ ID NO: 33934 - DNA, 603 bp, Artificial Sequence
  chemically treated genomic DNA (Homo sapiens) CpG-island No: 33934
aaactaaaattaaacaacccccccgaaaaatcaactctaaaatcaaacgcgcaatcaatcccataaaaatcgaaaaaacacacacctttccgaaaaaccgcgaacatcttaattattatttattccaacgcctctcccgaacccaacccacaactccctcgaacaccaacctcccctaccccgaaacttaatctcgacctcgcaaaacctaccaaccaaacctcgcaaaacgaaaaacgccaaaccctcaacgccgcgaccgcgcgaccgccccgcgccgaccactcaccgaaacgcctacccgcccgaactccgaatccgcgccgcaaccgcgcaaaatcgcgcatccccaaaaacaacgcgaatacgaaatccgcttctcgcgaacacaaaatttcccgaaactccccaaaccgcctcgacccctcgcaccaaacttaacgtccgccgcgcactccaacctcgaaccccgcactaaaacaaccgccgaccccgaccccacaataaaaaaaaaaacgacatcctaaacaaaataccgtcccctcgaaaacgacgaccgaaacgaaacctcgtaacccgctaccccaaacacacgccgactac

SEQ ID NO: 33935 - DNA, 603 bp, Artificial Sequence
  chemically treated genomic DNA (Homo sapiens) CpG-island No: 33935
ggattgaagttaggtagttttttcggagagttaattttagaattaaacgcgtagttagttttataggggtcgaaagggtatatattttttcgggaagtcgcgagtattttggttgttatttattttagcgtttttttcgagtttagtttatagttttttcgggtattaattttttttatttcgagatttggtttcggtttcgtaggatttgttagttaagtttcgtaaaacgggaagcgttagatttttagcgtcgcgatcgcgcgatcgtttcgcgtcggttatttatcggagcgtttgttcgttcgggtttcgggttcgcgtcgtagtcgcgtagagtcgcgtatttttaagggtagcgcgggtgcggggttcgtttttcgcgagtataaagtttttcggggttttttaggtcgtttcggtttttcgtattaggtttggcgttcgtcgcgtattttagtttcgggtttcgtattagggtagtcgtcggtttcggttttataatgaggagggaggcggtattttgaataaagtgtcgttttttcgggaacggcggtcggggcggagtttcgtgattcgttgttttaggtatacgtcggttgt

SEQ ID NO: 33936 - DNA, 603 bp, Artificial Sequence
  chemically treated genomic DNA (Homo sapiens) CpG-island No: 33936
acaaccgacgtatacctaaaacaacgaatcacgaaactccgccccgaccgccgttcccgaaaaaacgacactttattcaaaataccgcctccctcctcattataaaaccgaaaccgacgactaccctaatacgaaacccgaaactaaaatacgcgacgaacgccaaacctaatacgaaaaaccgaaacgacctaaaaaaccccgaaaaactttatactcgcgaaaaacgaaccccgcacccgcgctacccttaaaaatacgcgactctacgcgactacgacgcgaacccgaaacccgaacgaacaaacgctccgataaataaccgacgcgaaacgatcgcgcgatcgcgacgctaaaaatctaacgcttcccgttttacgaaacttaactaacaaatcctacgaaaccgaaaccaaatctcgaaataaaaaaaattaatacccgaaaaaactataaactaaactcgaaaaaaacgctaaaataaataacaaccaaaatactcgcgacttcccgaaaaaatatataccctttcgacccctataaaactaactacgcgtttaattctaaaattaactctccgaaaaaactacctaacttcaatcc

SEQ ID NO: 33937 - DNA, 739 bp, Artificial Sequence
  chemically treated genomic DNA (Homo sapiens) CpG-island No: 33937
ggcggcggcggcgttgggagggggacgtcggtggtcgggtttcgtattttttttagttttcggtcggcggtcgggttaacggcggcggcggtttttttttcggtttttgtcggtttcgtcgcgttttatgttcgggttagggcgttagttttcgggggtttttcgtgcgtttcgcggggtttgcgtttggatggttcggcgggatttcgcgttgtatttttcgacgagttcgggtttttattgttttttgagttagattcgttttcgggttattttgagtatcgcgggttgtcgtcgcgtttttatttgcgtttcgggtatttattatttgcgttcgggggtttcgcggcgtttttggttttgtcgggtttcgggtttcggagtcggggtgtttttttcgtttttatgggatcgtttatttgcgttcgcgtagtcgtgcgtttcgatttcggttcggtttcggcggttttcgacggtttcgcgtcgttcgttcgcgtttcgcgttttcgtcgcggttgttgtttgtcgtcgcggtttcgggtttagtttcgcgttttttcgttttttcggcgggcgggcgagttttgtagattcgcggcggcggtttattattatagatttgttcgcgtcgcggtcgttttaaagcggtaacgtcggtcgcgttggaggaggtgggttttatttagagtattttttcgtttaaagcgttaggattttttttagtaggattttttatttt

SEQ ID NO: 33938 - DNA, 739 bp, Artificial Sequence
  chemically treated genomic DNA (Homo sapiens) CpG-island No: 33938
aaaataaaaaatcctactaaaaaaaatcctaacgctttaaacgaaaaaatactctaaataaaacccacctcctccaacgcgaccgacgttaccgctttaaaacgaccgcgacgcgaacaaatctataataataaaccgccgccgcgaatctacaaaactcgcccgcccgccgaaaaaacgaaaaaacgcgaaactaaacccgaaaccgcgacgacaaacaacaaccgcgacgaaaacgcgaaacgcgaacgaacgacgcgaaaccgtcgaaaaccgccgaaaccgaaccgaaatcgaaacgcacgactacgcgaacgcaaataaacgatcccataaaaacgaaaaaaacaccccgactccgaaacccgaaacccgacaaaaccaaaaacgccgcgaaacccccgaacgcaaataataaatacccgaaacgcaaataaaaacgcgacgacaacccgcgatactcaaaataacccgaaaacgaatctaactcaaaaaacaataaaaacccgaactcgtcgaaaaatacaacgcgaaatcccgccgaaccatccaaacgcaaaccccgcgaaacgcacgaaaaacccccgaaaactaacgccctaacccgaacataaaacgcgacgaaaccgacaaaaaccgaaaaaaaaaccgccgccgccgttaacccgaccgccgaccgaaaactaaaaaaaatacgaaacccgaccaccgacgtccccctcccaacgccgccgccgcc

SEQ ID NO: 33939 - DNA, 739 bp, Artificial Sequence
  chemically treated genomic DNA (Homo sapiens) CpG-island No: 33939
gggatggagggttttgttggagggaattttggcgttttgggcggaggagtgttttgggtggggtttattttttttagcgcggtcggcgttgtcgttttaaggcggtcgcggcgcgagtaggtttatggtaatgagtcgtcgtcgcgagtttgtagagttcgttcgttcgtcggggaggcgagggagcgcggggttgggttcggggtcgcggcgataggtagtagtcgcggcggggacgcggggcgcgagcgggcggcgcgggatcgtcgggggtcgtcggggtcgggtcggggtcggggcgtacggttacgcgggcgtaggtgggcgattttataggggcggagggggtatttcggtttcggaattcggggttcggtaaggttaggggcgtcgcggggttttcgggcgtaggtggtgagtgttcggagcgtaggtggaggcgcggcggtagttcgcggtgtttagggtgattcgggagcgggtttggtttagggggtagtgggagttcgggttcgtcggagggtgtagcgcggggtttcgtcgagttatttagacgtaggtttcgcggggcgtacgggaggttttcggggattggcgttttggttcgggtatgaggcgcggcggggtcggtaggagtcggaggaggagtcgtcgtcgtcgttgattcggtcgtcggtcgggagttgggagagatgcggagttcggttatcggcgttttttttttaacgtcgtcgtcgtt

SEQ ID NO: 33940 - DNA, 739 bp, Artificial Sequence
  chemically treated genomic DNA (Homo sapiens) CpG-island No: 33940
aacgacgacgacgttaaaaaaaaaacgccgataaccgaactccgcatctctcccaactcccgaccgacgaccgaatcaacgacgacgacgactcctcctccgactcctaccgaccccgccgcgcctcatacccgaaccaaaacgccaatccccgaaaacctcccgtacgccccgcgaaacctacgtctaaataactcgacgaaaccccgcgctacaccctccgacgaacccgaactcccactaccccctaaaccaaacccgctcccgaatcaccctaaacaccgcgaactaccgccgcgcctccacctacgctccgaacactcaccacctacgcccgaaaaccccgcgacgcccctaaccttaccgaaccccgaattccgaaaccgaaataccccctccgcccctataaaatcgcccacctacgcccgcgtaaccgtacgccccgaccccgacccgaccccgacgacccccgacgatcccgcgccgcccgctcgcgccccgcgtccccgccgcgactactacctatcgccgcgaccccgaacccaaccccgcgctccctcgcctccccgacgaacgaacgaactctacaaactcgcgacgacgactcattaccataaacctactcgcgccgcgaccgccttaaaacgacaacgccgaccgcgctaaaaaaaataaaccccacccaaaacactcctccgcccaaaacgccaaaattccctccaacaaaaccctccatccc

SEQ ID NO: 33941 - DNA, 507 bp, Artificial Sequence
  chemically treated genomic DNA (Homo sapiens) CpG-island No: 33941
ggtgagcgtcgcgtcggggtgagagtatgcgttggatttaggaggttgtgtacgttaacggtcgtgttaggcgcgagtgtgttagagaagtgtgtgaacgcgggaacgtttgtgtcgttttagggtggtgatagaagtagtgtttggaaaacgttggttgagagcgcgtgtattaggttatcgtaggttgcgaagaagtcggggttttttattttaagggtttcgggagttggtatcgacgtattattgtaagcgcgttcgcgtttagtttttttttatcgacgcggtttttttcggtttttttatcgttcgttcggcggtgttcggtttttgggttgttaggttacggcgggggcgcggcgcgcggggcgttcgttgaaagataacgggcggtcgaggtttcgttgttttgggttgggttgcgtcgcgttggattgggttgcgttgggttgcgcgttcggttttcgcgcggttcggtagcgttcgcgcgttcggtttcgttcggtt

SEQ ID NO: 33942 - DNA, 507 bp, Artificial Sequence
  chemically treated genomic DNA (Homo sapiens) CpG-island No: 33942
aaccgaacgaaaccgaacgcgcgaacgctaccgaaccgcgcgaaaaccgaacgcgcaacccaacgcaacccaatccaacgcgacgcaacccaacccaaaacaacgaaacctcgaccgcccgttatctttcaacgaacgccccgcgcgccgcgcccccgccgtaacctaacaacccaaaaaccgaacaccgccgaacgaacgataaaaaaaccgaaaaaaaccgcgtcgataaaaaaaaactaaacgcgaacgcgcttacaataatacgtcgataccaactcccgaaacccttaaaataaaaaaccccgacttcttcgcaacctacgataacctaatacacgcgctctcaaccaacgttttccaaacactacttctatcaccaccctaaaacgacacaaacgttcccgcgttcacacacttctctaacacactcgcgcctaacacgaccgttaacgtacacaacctcctaaatccaacgcatactctcaccccgacgcgacgctcacc

SEQ ID NO: 33943 - DNA, 507 bp, Artificial Sequence
  chemically treated genomic DNA (Homo sapiens) CpG-island No: 33943
agtcgggcggagtcgagcgcgcgggcgttgtcgagtcgcgcggaggtcgggcgcgtagtttagcgtagtttagtttagcgcggcgtagtttagtttagagtagcggagtttcggtcgttcgttgttttttaacgagcgtttcgcgcgtcgcgttttcgtcgtggtttggtagtttagggatcgggtatcgtcgagcgggcggtagagggatcggagggagtcgcgtcggtgggagagggttgggcgcgggcgcgtttgtagtagtgcgtcggtgttaattttcgggatttttggagtgaggggtttcggttttttcgtagtttgcggtggtttgatgtacgcgtttttagttagcgttttttagatattatttttgttattattttagggcgatataagcgttttcgcgtttatatatttttttggtatattcgcgtttggtacggtcgttggcgtgtatagttttttgagtttagcgtatatttttatttcggcgcggcgtttatt

SEQ ID NO: 33944 - DNA, 507 bp, Artificial Sequence
  chemically treated genomic DNA (Homo sapiens) CpG-island No: 33944
aataaacgccgcgccgaaataaaaatatacgctaaactcaaaaaactatacacgccaacgaccgtaccaaacgcgaatataccaaaaaaatatataaacgcgaaaacgcttatatcgccctaaaataataacaaaaataatatctaaaaaacgctaactaaaaacgcgtacatcaaaccaccgcaaactacgaaaaaaccgaaacccctcactccaaaaatcccgaaaattaacaccgacgcactactacaaacgcgcccgcgcccaaccctctcccaccgacgcgactccctccgatccctctaccgcccgctcgacgatacccgatccctaaactaccaaaccacgacgaaaacgcgacgcgcgaaacgctcgttaaaaaacaacgaacgaccgaaactccgctactctaaactaaactacgccgcgctaaactaaactacgctaaactacgcgcccgacctccgcgcgactcgacaacgcccgcgcgctcgactccgcccgact

SEQ ID NO: 33945 - DNA, 703 bp, Artificial Sequence
  chemically treated genomic DNA (Homo sapiens) CpG-island No: 33945
taagcgcggtttattttttttttacggtagggtaggcggggttgttgcgcgggttttaggtttaggttcgcgggtcgtcggttgtggatgtcgttttggtagtttgggttcggggtggttttggcggtaggagtttggttattcgtatatcgcgtttcgtagttcgtttttcgtgcgggtggtttaggagtttggagggtcgtggtagtttcgagcgatggttgttgagttttcgggttttagggcgtttaggcgtgcgtcgtgatttcgttaggttgtgttacggagttttttcgttgttgttcgcgttgtttagtttgtaggtcgaaggttttggatttattcgttttggagatgcgtcgagtttttcgtaatttcggtgtatttgtcgtcggggtagtcgggtttaaggatttagtcgtagtttttatttacgttcgtttattgtttcggttcgaggcgttgcgggattttagatttagcgaggagggcgtcgttttttttttgtatattcgtatttttgtcgtttcgaattcggtttattttcggtaacggagtattttagcgtagtttcgttaattttattttttgagggagggatagtcgttttcgttcgtcgtttatagttttgtttttttcggttttttttaacgtttttttttacgaggacgggttagtcgtatagtttagttttttttgttaa

SEQ ID NO: 33946 - DNA, 703 bp, Artificial Sequence
  chemically treated genomic DNA (Homo sapiens) CpG-island No: 33946
ttaacaaaaaaaactaaactatacgactaacccgtcctcgtaaaaaaaaacgttaaaaaaaaccgaaaaaaacaaaactataaacgacgaacgaaaacgactatccctccctcaaaaaataaaattaacgaaactacgctaaaatactccgttaccgaaaataaaccgaattcgaaacgacaaaaatacgaatatacaaaaaaaaaacgacgccctcctcgctaaatctaaaatcccgcaacgcctcgaaccgaaacaataaacgaacgtaaataaaaactacgactaaatccttaaacccgactaccccgacgacaaatacaccgaaattacgaaaaactcgacgcatctccaaaacgaataaatccaaaaccttcgacctacaaactaaacaacgcgaacaacaacgaaaaaactccgtaacacaacctaacgaaatcacgacgcacgcctaaacgccctaaaacccgaaaactcaacaaccatcgctcgaaactaccacgaccctccaaactcctaaaccacccgcacgaaaaacgaactacgaaacgcgatatacgaataaccaaactcctaccgccaaaaccaccccgaacccaaactaccaaaacgacatccacaaccgacgacccgcgaacctaaacctaaaacccgcgcaacaaccccgcctaccctaccgtaaaaaaaaaataaaccgcgctta

SEQ ID NO: 33947 - DNA, 703 bp, Artificial Sequence
  chemically treated genomic DNA (Homo sapiens) CpG-island No: 33947
ttgatagggagggttgggttgtgcggttggttcgttttcgtgaagaggagcgttgggaggagtcgggagagataaggttatgggcggcgggcggggacggttgttttttttttaaggagtggagttagcgaggttgcgttggggtgtttcgttgtcgaggatgggtcgagttcgaggcggtaaaggtgcgggtgtgtaggggggaggcggcgtttttttcgttgggtttggggtttcgtagcgtttcgggtcggagtagtgagcgagcgtgggtgggagttgcggttgggtttttgagttcggttgtttcgacggtaggtgtatcggggttgcgggggattcggcgtatttttagggcgagtgagtttagggttttcggtttataggttgagtaacgcggataatagcgagggggtttcgtggtatagtttggcggggttacggcgtacgtttgggcgttttggagttcggagatttagtagttatcgttcggggttattacggttttttaggtttttgagttattcgtacggaggacgagttgcggagcgcggtgtgcggatagttaagtttttgtcgttaaggttatttcgagtttaggttgttagggcggtatttatagtcggcggttcgcgggtttgggtttgagattcgcgtagtagtttcgtttgttttgtcgtgagagggaagtagatcgcgtttg

SEQ ID NO: 33948 - DNA, 703 bp, Artificial Sequence
  chemically treated genomic DNA (Homo sapiens) CpG-island No: 33948
caaacgcgatctacttccctctcacgacaaaacaaacgaaactactacgcgaatctcaaacccaaacccgcgaaccgccgactataaataccgccctaacaacctaaactcgaaataaccttaacgacaaaaacttaactatccgcacaccgcgctccgcaactcgtcctccgtacgaataactcaaaaacctaaaaaaccgtaataaccccgaacgataactactaaatctccgaactccaaaacgcccaaacgtacgccgtaaccccgccaaactataccacgaaaccccctcgctattatccgcgttactcaacctataaaccgaaaaccctaaactcactcgccctaaaaatacgccgaatcccccgcaaccccgatacacctaccgtcgaaacaaccgaactcaaaaacccaaccgcaactcccacccacgctcgctcactactccgacccgaaacgctacgaaaccccaaacccaacgaaaaaaacgccgcctcccccctacacacccgcacctttaccgcctcgaactcgacccatcctcgacaacgaaacaccccaacgcaacctcgctaactccactccttaaaaaaaaaacaaccgtccccgcccgccgcccataaccttatctctcccgactcctcccaacgctcctcttcacgaaaacgaaccaaccgcacaacccaaccctccctatcaa

SEQ ID NO: 33949 - DNA, 681 bp, Artificial Sequence
  chemically treated genomic DNA (Homo sapiens) CpG-island No: 33949
tcgttttttttttttttacggtttcgtttttttgcgcggtttcgagcggttcgtttttcgttatcgtcgtagttttttacgggcgtagaattcgtttttcgttttttttttcgttttcggcgttttttttttttttttttcgttattcgtttttatatttcgtcgatttttttttcggcgggtggttcggaatatacgtgatttttttgttaggttttataaggcgcggaatcgaaagcggtcgtcgggtggttacgggtatcgggcggtcgcgcggaaaggagcggtttttttcggggtcgggcgcgcggagagcggcgaggaaagttcgggttgggttgggttaggttggttatcgcgttggcgacgggagtagacgcgggtttcgggagacgttttttagcgtttttgtttttcgttttcgtcgtttttcggtgtagttcgtattcgtttttttttaaacgttggcggttcgcgttgtaggcgtttttttttttgggggtgttgaggtttgagcgaaattttattggatagtaatcggttttagcggagcgaaaatttagtcgtattttagttacgttttagggtaagttgcgtcgggtatcgttttttttttgtgacgtttaaaagaatgtagatgggttattaattataggagaggttaaatttgagggcgtgttt

SEQ ID NO: 33950 - DNA, 681 bp, Artificial Sequence
  chemically treated genomic DNA (Homo sapiens) CpG-island No: 33950
aaacacgccctcaaatttaacctctcctataattaataacccatctacattcttttaaacgtcacaaaaaaaaaacgatacccgacgcaacttaccctaaaacgtaactaaaatacgactaaattttcgctccgctaaaaccgattactatccaataaaatttcgctcaaacctcaacacccccaaaaaaaaaaacgcctacaacgcgaaccgccaacgtttaaaaaaaaacgaatacgaactacaccgaaaaacgacgaaaacgaaaaacaaaaacgctaaaaaacgtctcccgaaacccgcgtctactcccgtcgccaacgcgataaccaacctaacccaacccaacccgaactttcctcgccgctctccgcgcgcccgaccccgaaaaaaaccgctcctttccgcgcgaccgcccgatacccgtaaccacccgacgaccgctttcgattccgcgccttataaaacctaacaaaaaaatcacgtatattccgaaccacccgccgaaaaaaaaatcgacgaaatataaaaacgaataacgaaaaaaaaaaaaaaaaaacgccgaaaacgaaaaaaaaaacgaaaaacgaattctacgcccgtaaaaaactacgacgataacgaaaaacgaaccgctcgaaaccgcgcaaaaaaacgaaaccgtaaaaaaaaaaaaaacga

SEQ ID NO: 33951 - DNA, 681 bp, Artificial Sequence
  chemically treated genomic DNA (Homo sapiens) CpG-island No: 33951
aagtacgtttttaagtttaattttttttgtagttggtaatttatttgtatttttttgaacgttataaggaagaaacggtgttcggcgtagtttgttttggagcgtagttggagtgcggttgagttttcgtttcgttgaagtcggttattgtttagtgggatttcgtttaagttttagtatttttaggaggggaggcgtttgtagcgcgggtcgttagcgtttggagggaggcgggtgcgggttgtatcgggagacggcgagagcgagagataggggcgttgggaggcgtttttcgggattcgcgtttgttttcgtcgttagcgcggtggttagtttagtttagtttagttcgggtttttttcgtcgtttttcgcgcgttcggtttcgggggaggtcgttttttttcgcgcggtcgttcggtgttcgtgattattcggcggtcgttttcggtttcgcgttttataaggtttgataggggggttacgtgtgtttcgggttattcgtcgggaggagggtcgacggggtgtaagggcgggtagcggggaggaaaaggggagggcgtcgggggcggaggaaggagcgaggggcggattttgcgttcgtgggaggttgcggcggtggcggggagcggatcgttcggagtcgcgtaggggagcgggatcgtggagaaggaggaggcgg

SEQ ID NO: 33952 - DNA, 681 bp, Artificial Sequence
  chemically treated genomic DNA (Homo sapiens) CpG-island No: 33952
ccgcctcctccttctccacgatcccgctcccctacgcgactccgaacgatccgctccccgccaccgccgcaacctcccacgaacgcaaaatccgcccctcgctccttcctccgcccccgacgccctccccttttcctccccgctacccgcccttacaccccgtcgaccctcctcccgacgaataacccgaaacacacgtaacccccctatcaaaccttataaaacgcgaaaccgaaaacgaccgccgaataatcacgaacaccgaacgaccgcgcgaaaaaaaacgacctcccccgaaaccgaacgcgcgaaaaacgacgaaaaaaacccgaactaaactaaactaaactaaccaccgcgctaacgacgaaaacaaacgcgaatcccgaaaaacgcctcccaacgcccctatctctcgctctcgccgtctcccgatacaacccgcacccgcctccctccaaacgctaacgacccgcgctacaaacgcctcccctcctaaaaatactaaaacttaaacgaaatcccactaaacaataaccgacttcaacgaaacgaaaactcaaccgcactccaactacgctccaaaacaaactacgccgaacaccgtttcttccttataacgttcaaaaaaatacaaataaattaccaactacaaaaaaaattaaacttaaaaacgtactt

SEQ ID NO: 33953 - DNA, 701 bp, Artificial Sequence
  chemically treated genomic DNA (Homo sapiens) CpG-island No: 33953
atggtaggggtcggaggttagtattatttttcgggtatcgttggaggagcggtcgtcggagtcggcgtcgcggttattttcgtcgttgtttcggcggggtcgggagaggattcgtttgatagcgaagcggagtaagagggattttagaaattgattcgtaaagtgtttatttcggggtagattcggattaaggtagggcggaggaggcgggtttgagggtcgcgtggaaagcgggaggtggagagggcgcgggggcgttggaacgcgtcgggcgatttcgggaaggcggggaaggcggggaaggcggggaaggcggggaaggcggggaaggcggggaaggcggggaaggcggggaaggcggggatggtgagacggtgaggcggggcggggtttggggcgcgggcggagcggggaggggtggggcggggttcgggggcgttggatcgcggtgttgcgggacggattttcggcggttgcgcgggaggttgttagtttgggtttttagggagttcgattggtagaggcgggtgtagggaattcgcggttcggcgggagcgtgggaaaaagttgacgcgtagtcgcgagtttttatttagggaatttaaaaggagagttttaattttttttttttgtcgttcggaggagcgtgcgtatgtgttggttaattagtttgcgttgtagtgagttttgttgttttttta

SEQ ID NO: 33954 - DNA, 701 bp, Artificial Sequence
  chemically treated genomic DNA (Homo sapiens) CpG-island No: 33954
taaaaaaacaacaaaactcactacaacgcaaactaattaaccaacacatacgcacgctcctccgaacgacaaaaaaaaaaaattaaaactctccttttaaattccctaaataaaaactcgcgactacgcgtcaactttttcccacgctcccgccgaaccgcgaattccctacacccgcctctaccaatcgaactccctaaaaacccaaactaacaacctcccgcgcaaccgccgaaaatccgtcccgcaacaccgcgatccaacgcccccgaaccccgccccacccctccccgctccgcccgcgccccaaaccccgccccgcctcaccgtctcaccatccccgccttccccgccttccccgccttccccgccttccccgccttccccgccttccccgccttccccgccttccccgccttcccgaaatcgcccgacgcgttccaacgcccccgcgccctctccacctcccgctttccacgcgaccctcaaacccgcctcctccgccctaccttaatccgaatctaccccgaaataaacactttacgaatcaatttctaaaatccctcttactccgcttcgctatcaaacgaatcctctcccgaccccgccgaaacaacgacgaaaataaccgcgacgccgactccgacgaccgctcctccaacgatacccgaaaaataatactaacctccgacccctaccat

SEQ ID NO: 33955 - DNA, 701 bp, Artificial Sequence
  chemically treated genomic DNA (Homo sapiens) CpG-island No: 33955
tgggaaagtagtagggtttattgtagcgtaggttggttggttagtatatgcgtacgttttttcgaacggtagggaagaaaaattgaaattttttttttaagttttttaagtaggaattcgcgattgcgcgttagtttttttttacgttttcgtcgagtcgcgggttttttgtattcgtttttgttagtcgaattttttgggagtttaggttagtagtttttcgcgtagtcgtcgggaattcgtttcgtagtatcgcggtttagcgttttcgggtttcgttttattttttttcgtttcgttcgcgttttaggtttcgtttcgttttatcgttttattattttcgtttttttcgtttttttcgtttttttcgtttttttcgtttttttcgtttttttcgtttttttcgtttttttcgttttttcgggatcgttcggcgcgttttagcgttttcgcgttttttttatttttcgttttttacgcggtttttaggttcgtttttttcgttttattttggttcggatttgtttcgaggtagatattttgcggattagtttttggggttttttttgtttcgtttcgttgttagacgaattttttttcggtttcgtcgaggtagcggcggaagtgatcgcggcgtcggtttcggcggtcgtttttttagcggtgttcggagggtggtgttggttttcggtttttgttat

SEQ ID NO: 33956 - DNA, 701 bp, Artificial Sequence
  chemically treated genomic DNA (Homo sapiens) CpG-island No: 33956
ataacaaaaaccgaaaaccaacaccaccctccgaacaccgctaaaaaaacgaccgccgaaaccgacgccgcgatcacttccgccgctacctcgacgaaaccgaaaaaaaattcgtctaacaacgaaacgaaacaaaaaaaaccccaaaaactaatccgcaaaatatctacctcgaaacaaatccgaaccaaaataaaacgaaaaaaacgaacctaaaaaccgcgtaaaaaacgaaaaataaaaaaaacgcgaaaacgctaaaacgcgccgaacgatcccgaaaaaacgaaaaaaacgaaaaaaacgaaaaaaacgaaaaaaacgaaaaaaacgaaaaaaacgaaaaaaacgaaaaaaacgaaaataataaaacgataaaacgaaacgaaacctaaaacgcgaacgaaacgaaaaaaaataaaacgaaacccgaaaacgctaaaccgcgatactacgaaacgaattcccgacgactacgcgaaaaactactaacctaaactcccaaaaaattcgactaacaaaaacgaatacaaaaaacccgcgactcgacgaaaacgtaaaaaaaaactaacgcgcaatcgcgaattcctacttaaaaaacttaaaaaaaaaatttcaatttttcttccctaccgttcgaaaaaacgtacgcatatactaaccaaccaacctacgctacaataaaccctactactttccca

SEQ ID NO: 33957 - DNA, 726 bp, Artificial Sequence
  chemically treated genomic DNA (Homo sapiens) CpG-island No: 33957
tagttcgcgcggttatcgagaggaagtattatttattttttttttttttaaagagtttgtcgattatattatttaattaaaatggtagcggcgattacgttacggagtttttcgtagtaacgggtttggggttcggaggcggcgttgagtttttgttacgacgcgttattcgggttattttgagagaacgcggtagtcgcggtttcgttgtttttttttcgttttatattattttttataggatttttaagtttttatttattaggttttagggttaggattcgattcggttggttcggtcgtcgtcgtcgaggttgtttcgtatttttttggtcgtcgtttttaagttcgtttttaatgagtagttggttgagattcgtttttagtttagcgtttgttcggagacgttgtttaggtagttattattttttttattgttattaagtagcgataggaaacgattgtttataataggaagtgatgatgtcgcgtttcggtatcgtagttttatttttagtttattagttaattttagtcgatttttcgaaaaggtttcgcgggaggaggagggggacggtagacgacgcggtaaggcgggcggcggtttggaaaaggaaagttgttatgacgtttattatgtgataggttttattttttttcgttattttgaattgtggcgagaaatttgcgttttgagaattgtgggaattttcgtttttttatttt

SEQ ID NO: 33958 - DNA, 726 bp, Artificial Sequence
  chemically treated genomic DNA (Homo sapiens) CpG-island No: 33958
aaaataaaaaaacgaaaattcccacaattctcaaaacgcaaatttctcgccacaattcaaaataacgaaaaaaaataaaacctatcacataataaacgtcataacaactttccttttccaaaccgccgcccgccttaccgcgtcgtctaccgtccccctcctcctcccgcgaaaccttttcgaaaaatcgactaaaattaactaataaactaaaaataaaactacgataccgaaacgcgacatcatcacttcctattataaacaatcgtttcctatcgctacttaataacaataaaaaaaataataactacctaaacaacgtctccgaacaaacgctaaactaaaaacgaatctcaaccaactactcattaaaaacgaacttaaaaacgacgaccaaaaaaatacgaaacaacctcgacgacgacgaccgaaccaaccgaatcgaatcctaaccctaaaacctaataaataaaaacttaaaaatcctataaaaaataatataaaacgaaaaaaaaacaacgaaaccgcgactaccgcgttctctcaaaataacccgaataacgcgtcgtaacaaaaactcaacgccgcctccgaaccccaaacccgttactacgaaaaactccgtaacgtaatcgccgctaccattttaattaaataatataatcgacaaactctttaaaaaaaaaaaaaataaataatacttcctctcgataaccgcgcgaacta

SEQ ID NO: 33959 - DNA, 726 bp, Artificial Sequence
  chemically treated genomic DNA (Homo sapiens) CpG-island No: 33959
aaaatgggaaagcgaaggtttttataatttttagaacgtaaatttttcgttataatttaaaatggcggaggagggtggggtttgttatatggtgggcgttataatagttttttttttttaaatcgtcgttcgttttgtcgcgtcgtttgtcgtttttttttttttttcgcggagttttttcgaggaatcgattgggattggttaataggttgggagtggggttgcggtgtcgggacgcggtattattattttttgttgtgggtagtcgttttttgtcgttgtttggtaataatggggaagataatggttgtttgagtaacgttttcgagtaggcgttgggttagaggcgggttttaattagttatttattggaggcgggtttgagagcggcggttagggaggtgcggagtagtttcggcggcggcggtcgaattaatcgagtcggattttgattttaaaatttagtaagtgaagatttgggaattttgtgagaaatgatgtagagcgagaggaagatagcggagtcgcggttgtcgcgtttttttaaaatggttcgagtgacgcgtcgtggtagaggtttagcgtcgttttcggattttaggttcgttgttgcggggggtttcgtggcgtagtcgtcgttgttattttagttgagtggtatagtcgataggttttttgaaggggaaggaggtgggtagtattttttttcggtggtcgcgcgagttg

SEQ ID NO: 33960 - DNA, 726 bp, Artificial Sequence
  chemically treated genomic DNA (Homo sapiens) CpG-island No: 33960
caactcgcgcgaccaccgaaaaaaaatactacccacctccttccccttcaaaaaacctatcgactataccactcaactaaaataacaacgacgactacgccacgaaaccccccgcaacaacgaacctaaaatccgaaaacgacgctaaacctctaccacgacgcgtcactcgaaccattttaaaaaaacgcgacaaccgcgactccgctatcttcctctcgctctacatcatttctcacaaaattcccaaatcttcacttactaaattttaaaatcaaaatccgactcgattaattcgaccgccgccgccgaaactactccgcacctccctaaccgccgctctcaaacccgcctccaataaataactaattaaaacccgcctctaacccaacgcctactcgaaaacgttactcaaacaaccattatcttccccattattaccaaacaacgacaaaaaacgactacccacaacaaaaaataataataccgcgtcccgacaccgcaaccccactcccaacctattaaccaatcccaatcgattcctcgaaaaaactccgcgaaaaaaaaaaaaaaacgacaaacgacgcgacaaaacgaacgacgatttaaaaaaaaaaaactattataacgcccaccatataacaaaccccaccctcctccgccattttaaattataacgaaaaatttacgttctaaaaattataaaaaccttcgctttcccatttt

SEQ ID NO: 33961 - DNA, 563 bp, Artificial Sequence
  chemically treated genomic DNA (Homo sapiens) CpG-island No: 33961
agtttcgtttcgttttaggaggcgggttcggtcgcgcggtgtattaattcgagagtttcgagtcgtttttgtttttcgcgagttttattttacgttatcgtttattaatcgcgttgcgcgttcgtttagtcgggtcgcgtaatagcgggagggttgagtcgtcggcgtttcgtttttgtcgtgttcggcggcggttaggcgggcggtcgcgcggggtttaggtattttttaagcggcgtttcgtagtatcgggttttggttgtagcgtcggggtcgtagggggcggcgttgttgttcgaagggtgtcgggcgaggcgggcgttatcggtcgggtcgaagggcgttttagtttcgtcggggttcgcggcgcgggttttaggatcgaggaggaggcggcgttttcgttgttcggggtcggttcggtgtttgttttgaggaggttcgaggtcggacgttttcggttcgtagcgatttcgacgcgttttttggagaggttttcgagtttttggtagttttttgggggtgttttatttttttcggttttatttgcgttggtcgttcgg

SEQ ID NO: 33962 - DNA, 563 bp, Artificial Sequence
  chemically treated genomic DNA (Homo sapiens) CpG-island No: 33962
ccgaacgaccaacgcaaataaaaccgaaaaaaataaaacacccccaaaaaactaccaaaaactcgaaaacctctccaaaaaacgcgtcgaaatcgctacgaaccgaaaacgtccgacctcgaacctcctcaaaacaaacaccgaaccgaccccgaacaacgaaaacgccgcctcctcctcgatcctaaaacccgcgccgcgaaccccgacgaaactaaaacgcccttcgacccgaccgataacgcccgcctcgcccgacacccttcgaacaacaacgccgccccctacgaccccgacgctacaaccaaaacccgatactacgaaacgccgcttaaaaaatacctaaaccccgcgcgaccgcccgcctaaccgccgccgaacacgacaaaaacgaaacgccgacgactcaaccctcccgctattacgcgacccgactaaacgaacgcgcaacgcgattaataaacgataacgtaaaataaaactcgcgaaaaacaaaaacgactcgaaactctcgaattaatacaccgcgcgaccgaacccgcctcctaaaacgaaacgaaact

SEQ ID NO: 33963 - DNA, 563 bp, Artificial Sequence
  chemically treated genomic DNA (Homo sapiens) CpG-island No: 33963
tcgggcggttagcgtaggtgaagtcggggaaggtggggtatttttagggggttgttaggagttcgggggtttttttaggaggcgcgtcggggtcgttgcgggtcgggaacgttcggtttcgggtttttttagggtaggtatcgggtcggtttcgggtagcggaggcgtcgtttttttttcgattttgggattcgcgtcgcgggtttcggcggagttgaggcgtttttcggttcggtcggtggcgttcgtttcgttcggtatttttcgagtagtagcgtcgttttttgcggtttcgacgttgtagttagagttcgatgttgcgaggcgtcgtttggagaatgtttgggtttcgcgcggtcgttcgtttagtcgtcgtcgagtacggtaggggcggggcgtcggcggtttagttttttcgttattgcgcggttcggttaggcgggcgcgtagcgcgattggtgggcggtggcgtggggtgggattcgcgggaggtagaggcggttcggggttttcggattggtgtatcgcgcggtcgggttcgttttttagggcggggcggggtt

SEQ ID NO: 33964 - DNA, 563 bp, Artificial Sequence
  chemically treated genomic DNA (Homo sapiens) CpG-island No: 33964
aaccccgccccgccctaaaaaacgaacccgaccgcgcgatacaccaatccgaaaaccccgaaccgcctctacctcccgcgaatcccaccccacgccaccgcccaccaatcgcgctacgcgcccgcctaaccgaaccgcgcaataacgaaaaaactaaaccgccgacgccccgcccctaccgtactcgacgacgactaaacgaacgaccgcgcgaaacccaaacattctccaaacgacgcctcgcaacatcgaactctaactacaacgtcgaaaccgcaaaaaacgacgctactactcgaaaaataccgaacgaaacgaacgccaccgaccgaaccgaaaaacgcctcaactccgccgaaacccgcgacgcgaatcccaaaatcgaaaaaaaaacgacgcctccgctacccgaaaccgacccgatacctaccctaaaaaaacccgaaaccgaacgttcccgacccgcaacgaccccgacgcgcctcctaaaaaaacccccgaactcctaacaaccccctaaaaataccccaccttccccgacttcacctacgctaaccgcccga

SEQ ID NO: 33965 - DNA, 508 bp, Artificial Sequence
  chemically treated genomic DNA (Homo sapiens) CpG-island No: 33965
tttttagcgttcggggaatatagttacgtaaatatatacggattataattacggatatatagtcgtatagtttttagggagtttcgtattagtacgttttcgttttttttcggtgtcgttgttttttttcgtagaggcgtttttttagatacgcgcgggtacgtattgatttggggaggggtgcgggtgggcgtcggggttagtgcgtgttttgttcgttttcgcggcggtcggtaaaggcgattatttataaggttgttagcgcgcggtatgtcgggagtcggcgttttcgaaggtagggagggcgggaaggagggagggagagcggattagggatcgggaagcggggcgggatcgagttcgagttcgggtgcgcggcgatatcgtattcggtatcgtgtgtttcgtatcgtggatttttaggtggttgtgtttatatacgcgaattatattttatagtttgttaagagttttttattgcgatatttcgattgtgtttaaggtatat

SEQ ID NO: 33966 - DNA, 508 bp, Artificial Sequence
  chemically treated genomic DNA (Homo sapiens) CpG-island No: 33966
atataccttaaacacaatcgaaatatcgcaataaaaaactcttaacaaactataaaatataattcgcgtatataaacacaaccacctaaaaatccacgatacgaaacacacgataccgaatacgatatcgccgcgcacccgaactcgaactcgatcccgccccgcttcccgatccctaatccgctctccctccctccttcccgccctccctaccttcgaaaacgccgactcccgacataccgcgcgctaacaaccttataaataatcgcctttaccgaccgccgcgaaaacgaacaaaacacgcactaaccccgacgcccacccgcacccctccccaaatcaatacgtacccgcgcgtatctaaaaaaacgcctctacgaaaaaaaacaacgacaccgaaaaaaaacgaaaacgtactaatacgaaactccctaaaaactatacgactatatatccgtaattataatccgtatatatttacgtaactatattccccgaacgctaaaaa

SEQ ID NO: 33967 - DNA, 508 bp, Artificial Sequence
  chemically treated genomic DNA (Homo sapiens) CpG-island No: 33967
gtgtattttgagtatagtcggggtatcgtaatggaaaatttttggtaaattgtaaagtgtagttcgcgtgtgtgggtatagttatttgggggtttacggtgcggggtatacggtgtcgggtgcggtgtcgtcgcgtattcgggttcgggttcggtttcgtttcgtttttcggtttttggttcgttttttttttttttttttcgttttttttgttttcgggaacgtcggttttcggtatgtcgcgcgttgatagttttataaatagtcgtttttgtcggtcgtcgcgaggacgggtagggtacgtattggtttcggcgtttattcgtatttttttttaggttagtgcgtgttcgcgcgtgtttgggggggcgtttttgcggggaggggtagcggtatcgggggagggcgggggcgtgttggtgcggggttttttgggggttgtgcggttgtgtattcgtggttgtgattcgtgtgtgtttgcgtggttgtgtttttcgggcgttgggga

SEQ ID NO: 33968 - DNA, 508 bp, Artificial Sequence
  chemically treated genomic DNA (Homo sapiens) CpG-island No: 33968
tccccaacgcccgaaaaacacaaccacgcaaacacacacgaatcacaaccacgaatacacaaccgcacaacccccaaaaaaccccgcaccaacacgcccccgccctcccccgataccgctacccctccccgcaaaaacgcccccccaaacacgcgcgaacacgcactaacctaaaaaaaaatacgaataaacgccgaaaccaatacgtaccctacccgtcctcgcgacgaccgacaaaaacgactatttataaaactatcaacgcgcgacataccgaaaaccgacgttcccgaaaacaaaaaaaacgaaaaaaaaaaaaaaaaaacgaaccaaaaaccgaaaaacgaaacgaaaccgaacccgaacccgaatacgcgacgacaccgcacccgacaccgtataccccgcaccgtaaacccccaaataactatacccacacacgcgaactacactttacaatttaccaaaaattttccattacgataccccgactatactcaaaatacac

SEQ ID NO: 33969 - DNA, 675 bp, Artificial Sequence
  chemically treated genomic DNA (Homo sapiens) CpG-island No: 33969
ggggggcgatagtttaggaagattagggggcggtagggcgcgtgggggcgggggttgggagattcgtaggaggattttcgattttgtttgaagatttaagtaggcggagtcgcggtttggttcgcggggtaggcggggcgtaagagtgttttcgggggcggggggtcgattcgcgttttaaaggttttcgcgatttattcgtcggcgtttggtttggtttagttgtattacgagcgttgcggatattcggggcggtagtcggtttgttagttttttcgttaggtttcgcggttcgtatttgtcgttcgtatttgtagtttcgtatttgcggttagtgtttattgtttttttttgtcgttcgtatttgtagtttcgtatttgtcgtttgtatttgtagtttcgcgttttattcggtttaagtatggttgattaggcgtttttcgatacggacgttaatattttgattcgtttcgttatggaggagggtaggaaggttcgcggtacgggcgagttgatttagttgtttaattcgttttgtatagtagttaaagttattttttcggcggtgcgtaaggcgggtatcgcgtatttgtgagtcgggttttgggcggtgggtttcgttttgtttgtttgtttggggagtttgttcggcgggttgacgttgggttttttgag

SEQ ID NO: 33970 - DNA, 675 bp, Artificial Sequence
  chemically treated genomic DNA (Homo sapiens) CpG-island No: 33970
ctcaaaaaacccaacgtcaacccgccgaacaaactccccaaacaaacaaacaaaacgaaacccaccgcccaaaacccgactcacaaatacgcgatacccgccttacgcaccgccgaaaaaataactttaactactatacaaaacgaattaaacaactaaatcaactcgcccgtaccgcgaaccttcctaccctcctccataacgaaacgaatcaaaatattaacgtccgtatcgaaaaacgcctaatcaaccatacttaaaccgaataaaacgcgaaactacaaatacaaacgacaaatacgaaactacaaatacgaacgacaaaaaaaaacaataaacactaaccgcaaatacgaaactacaaatacgaacgacaaatacgaaccgcgaaacctaacgaaaaaactaacaaaccgactaccgccccgaatatccgcaacgctcgtaatacaactaaaccaaaccaaacgccgacgaataaatcgcgaaaacctttaaaacgcgaatcgaccccccgcccccgaaaacactcttacgccccgcctaccccgcgaaccaaaccgcgactccgcctacttaaatcttcaaacaaaatcgaaaatcctcctacgaatctcccaacccccgcccccacgcgccctaccgccccctaatcttcctaaactatcgcccccc

SEQ ID NO: 33971 - DNA, 675 bp, Artificial Sequence
  chemically treated genomic DNA (Homo sapiens) CpG-island No: 33971
tttagagggtttaacgttagttcgtcgggtaggttttttaggtagatagataggacggggtttatcgtttaaggttcgatttataggtgcgcgatgttcgttttgcgtatcgtcgaagagatggttttgattgttgtgtagagcgagttgagtagttgggttaattcgttcgtgtcgcgggtttttttgtttttttttatgacgaagcgggttagggtgttgacgttcgtgtcgaagggcgtttggttagttatgtttgaatcgggtagagcgcggggttgtaggtgtaagcggtaggtgcggggttgtaggtgcgggcggtaagagagggtagtaggtattggtcgtaggtgcggagttgtaggtgcgggcggtaggtgcgggtcgcgggatttggcgggaggattgatagatcgattgtcgtttcgagtgttcgtagcgttcgtggtgtaattgggttaggttaggcgtcggcgggtgaatcgcggaaatttttagaacgcgggtcggtttttcgttttcgggaatatttttgcgtttcgtttatttcgcggattagatcgcggtttcgtttgtttggatttttagataaggtcggggatttttttgcgggttttttaattttcgtttttacgcgttttgtcgttttttagtttttttgggttgtcgtttttt

SEQ ID NO: 33972 - DNA, 675 bp, Artificial Sequence
  chemically treated genomic DNA (Homo sapiens) CpG-island No: 33972
aaaaaacgacaacccaaaaaaactaaaaaacgacaaaacgcgtaaaaacgaaaattaaaaaacccgcaaaaaaatccccgaccttatctaaaaatccaaacaaacgaaaccgcgatctaatccgcgaaataaacgaaacgcaaaaatattcccgaaaacgaaaaaccgacccgcgttctaaaaatttccgcgattcacccgccgacgcctaacctaacccaattacaccacgaacgctacgaacactcgaaacgacaatcgatctatcaatcctcccgccaaatcccgcgacccgcacctaccgcccgcacctacaactccgcacctacgaccaatacctactaccctctcttaccgcccgcacctacaaccccgcacctaccgcttacacctacaaccccgcgctctacccgattcaaacataactaaccaaacgcccttcgacacgaacgtcaacaccctaacccgcttcgtcataaaaaaaaacaaaaaaacccgcgacacgaacgaattaacccaactactcaactcgctctacacaacaatcaaaaccatctcttcgacgatacgcaaaacgaacatcgcgcacctataaatcgaaccttaaacgataaaccccgtcctatctatctacctaaaaaacctacccgacgaactaacgttaaaccctctaaa

SEQ ID NO: 33973 - DNA, 780 bp, Artificial Sequence
  chemically treated genomic DNA (Homo sapiens) CpG-island No: 33973
gtacgttgcgtattcgtattggggtttgggcggtgtagcggcggcgggagggttttgggaatcgtagtcgtcgaggttagtgtgtgagtcggtcggtcgcggtaagtcgtatttttcggtcgtttttcgtagttttttgtttttcggtagtcgtcgtcgtttttaggtagtttagtcgggcgttcgcgttaggattttttcgtcgttcgtttcggttcggaatatggttgcgcgttttgttgttattttcgtttggtcgttattgtttttttttttagttttgtttcgcgaaggttgtcgagcgcgtttcgtcgtcgagcgggattcggaggacgacggagaggagtcggtggttttttcggagtcgtttttgtagagttttacggtgttcgtggcggttttcgttcgtaacgcggcgtatacgttgtcgtattttttcggttgtttggagcggttggattattttaagagtaggatggttatttggtgagcgcgtacgggtttcgggtcgtcgcggcgggacgcgggggcggtttgtttagcgcggatagcgttcggagtagtagttgtagggcgagggagtcgttggaggggcgggggggtacgcggaaaatttggcgtatatattttttcgttgttcgcgtcggtggttggcggatcgggcggttaggttgcggagggacgcgcgggttagtgtgcgtagagggtgttgatggggagaatcggatcgttggagttttggagggtagtttgcgaattggggttttgttttataagggg

SEQ ID NO: 33974 - DNA, 780 bp, Artificial Sequence
  chemically treated genomic DNA (Homo sapiens) CpG-island No: 33974
ccccttataaaacaaaaccccaattcgcaaactaccctccaaaactccaacgatccgattctccccatcaacaccctctacgcacactaacccgcgcgtccctccgcaacctaaccgcccgatccgccaaccaccgacgcgaacaacgaaaaaatatatacgccaaattttccgcgtacccccccgcccctccaacgactccctcgccctacaactactactccgaacgctatccgcgctaaacaaaccgcccccgcgtcccgccgcgacgacccgaaacccgtacgcgctcaccaaataaccatcctactcttaaaataatccaaccgctccaaacaaccgaaaaaatacgacaacgtatacgccgcgttacgaacgaaaaccgccacgaacaccgtaaaactctacaaaaacgactccgaaaaaaccaccgactcctctccgtcgtcctccgaatcccgctcgacgacgaaacgcgctcgacaaccttcgcgaaacaaaactaaaaaaaaaaacaataacgaccaaacgaaaataacaacaaaacgcgcaaccatattccgaaccgaaacgaacgacgaaaaaatcctaacgcgaacgcccgactaaactacctaaaaacgacgacgactaccgaaaaacaaaaaactacgaaaaacgaccgaaaaatacgacttaccgcgaccgaccgactcacacactaacctcgacgactacgattcccaaaaccctcccgccgccgctacaccgcccaaaccccaatacgaatacgcaacgtac

SEQ ID NO: 33975 - DNA, 780 bp, Artificial Sequence
  chemically treated genomic DNA (Homo sapiens) CpG-island No: 33975
ttttttgtgggataaagttttaattcgtaggttattttttagagttttagcggttcggttttttttattagtattttttgcgtatattgattcgcgcgttttttcgtagtttgatcgttcgattcgttagttatcggcgcgggtagcgagggggtgtgtgcgttagatttttcgcgtgttttttcgtttttttagcggttttttcgttttgtagttgttgtttcgggcgttgttcgcgttgggtaggtcgttttcgcgtttcgtcgcggcggttcggggttcgtgcgcgtttattagatggttattttgtttttggggtagtttagtcgttttaggtagtcgaggaagtgcggtagcgtgtgcgtcgcgttgcgggcgaggatcgttacgagtatcgtggggttttgtaggggcgatttcgggaaaattatcggttttttttcgtcgtttttcgagtttcgttcggcgacgaagcgcgttcggtagttttcgcggagtagggttgaggagaggagtagtagcgattaggcgagggtggtagtagggcgcgtagttatgtttcgggtcgaggcgggcggcggggaagttttggcgcgagcgttcggttgggttgtttgagggcggcggcggttgtcggggagtaaggggttgcgaggggcggtcgggggatgcggtttgtcgcggtcggtcggtttatatattggtttcggcggttgcggtttttaggattttttcgtcgtcgttgtatcgtttaggttttagtgcgggtgcgtagcgtat

SEQ ID NO: 33976 - DNA, 780 bp, Artificial Sequence
  chemically treated genomic DNA (Homo sapiens) CpG-island No: 33976
atacgctacgcacccgcactaaaacctaaacgatacaacgacgacgaaaaaatcctaaaaaccgcaaccgccgaaaccaatatataaaccgaccgaccgcgacaaaccgcatcccccgaccgcccctcgcaaccccttactccccgacaaccgccgccgccctcaaacaacccaaccgaacgctcgcgccaaaacttccccgccgcccgcctcgacccgaaacataactacgcgccctactaccaccctcgcctaatcgctactactcctctcctcaaccctactccgcgaaaactaccgaacgcgcttcgtcgccgaacgaaactcgaaaaacgacgaaaaaaaaccgataattttcccgaaatcgcccctacaaaaccccacgatactcgtaacgatcctcgcccgcaacgcgacgcacacgctaccgcacttcctcgactacctaaaacgactaaactaccccaaaaacaaaataaccatctaataaacgcgcacgaaccccgaaccgccgcgacgaaacgcgaaaacgacctacccaacgcgaacaacgcccgaaacaacaactacaaaacgaaaaaaccgctaaaaaaacgaaaaaacacgcgaaaaatctaacgcacacaccccctcgctacccgcgccgataactaacgaatcgaacgatcaaactacgaaaaaacgcgcgaatcaatatacgcaaaaaatactaataaaaaaaaccgaaccgctaaaactctaaaaaataacctacgaattaaaactttatcccacaaaaaa

SEQ ID NO: 33977 - DNA, 1399 bp, Artificial Sequence
  chemically treated genomic DNA (Homo sapiens) CpG-island No: 33977
ttgtgttacgtggaggcggtaagcgtagaaggatttcgtacgttcggcggtaattgaagattacggttagttttagattttgatttttgtaatttatgagcgttattttcgtatcgtttttcgtatttgattcgtttttgatagttgtagaggtgtaaacgggtgacggaaagagttcgattttttcggtacgcgagacggtttcggtcgggggtgtttcgggggcgtagtttcgttcgggaagtggttgtcgatagtagcgaggagcggtaagggttagggttttcgttttttcggttcgtttcgttcgttcgttcgtttcgtttcgtttcgtcgtatttacgcgagtgttttagttcgcgcgtcgttttggcggcgcgttttaggtcggtggggtcgaaagttgttttatttgtgtttgggcgtttgtcggtgttataattcgcggttttcgtcgttttcggatatttgttgcgcgggcggtaaaggcggcggcggtttcgcgtttttatttttggggtttttgttaatgcgcgaagagttacgatatgttcgtatcgtcgtcgtcgttatcgtcgtcgggatttttattcgagtttgattcgcgcgcggttgggagtagtttttacgcgtcgcgagtcggtggttatcgttattgagtaggcgttatatatatttttttttttcggcgatagaagcgcgtaagggatacgcgcgtagtttttggattggtttcgaggatagtgacgttatagcgacggcgtcgcgattgtcgaataggttttgggagttagcggggcgggagcggcgaagtatttggttacgggagttacgtcgggataaaattttcgagggacgtaggcgaatttaaggtagcgttagtttcgcgtcgtattcgcgtgggtttcgttgttaggggtttcgttgttaggggttttgaggagtttcggttttggcggtagcgggtggtaagtttttagggagttttaaggttttcgattcgtgcggcggggcgttttgcggtgagtttaggacgtagagaagagtttcgcgggaattttattcgaggcggtatcggcgttcgggtaagtcgagttttttcgcgatgagtcggcgttttggggtcgttgcgttaagagtttaggagaggcgtttttttttttcggtgttttcgtagttcgtacggttttttcgtttaagatttcggggcgattttttttcgcgtggcggggttagcgagttttttttgcggggcgtggacggggtcggggtgttcgggtaggcgtcgtttcggagtttacggtttacgcgtttttagcggttttgattttttttttgatggaattggttgattttacggaatatatggagtgattttttttattggattggaaattgt

SEQ ID NO: 33978 - DNA, 1399 bp, Artificial Sequence
  chemically treated genomic DNA (Homo sapiens) CpG-island No: 33978
acaatttccaatccaataaaaaaaatcactccatatattccgtaaaatcaaccaattccatcaaaaaaaaaatcaaaaccgctaaaaacgcgtaaaccgtaaactccgaaacgacgcctacccgaacaccccgaccccgtccacgccccgcaaaaaaaactcgctaaccccgccacgcgaaaaaaaatcgccccgaaatcttaaacgaaaaaaccgtacgaactacgaaaacaccgaaaaaaaaaaacgcctctcctaaactcttaacgcaacgaccccaaaacgccgactcatcgcgaaaaaactcgacttacccgaacgccgataccgcctcgaataaaattcccgcgaaactcttctctacgtcctaaactcaccgcaaaacgccccgccgcacgaatcgaaaaccttaaaactccctaaaaacttaccacccgctaccgccaaaaccgaaactcctcaaaacccctaacaacgaaacccctaacaacgaaacccacgcgaatacgacgcgaaactaacgctaccttaaattcgcctacgtccctcgaaaattttatcccgacgtaactcccgtaaccaaatacttcgccgctcccgccccgctaactcccaaaacctattcgacaatcgcgacgccgtcgctataacgtcactatcctcgaaaccaatccaaaaactacgcgcgtatcccttacgcgcttctatcgccgaaaaaaaaaaatatatataacgcctactcaataacgataaccaccgactcgcgacgcgtaaaaactactcccaaccgcgcgcgaatcaaactcgaataaaaatcccgacgacgataacgacgacgacgatacgaacatatcgtaactcttcgcgcattaacaaaaaccccaaaaataaaaacgcgaaaccgccgccgcctttaccgcccgcgcaacaaatatccgaaaacgacgaaaaccgcgaattataacaccgacaaacgcccaaacacaaataaaacaactttcgaccccaccgacctaaaacgcgccgccaaaacgacgcgcgaactaaaacactcgcgtaaatacgacgaaacgaaacgaaacgaacgaacgaacgaaacgaaccgaaaaaacgaaaaccctaacccttaccgctcctcgctactatcgacaaccacttcccgaacgaaactacgcccccgaaacacccccgaccgaaaccgtctcgcgtaccgaaaaaatcgaactctttccgtcacccgtttacacctctacaactatcaaaaacgaatcaaatacgaaaaacgatacgaaaataacgctcataaattacaaaaatcaaaatctaaaactaaccgtaatcttcaattaccgccgaacgtacgaaatccttctacgcttaccgcctccacgtaacacaa

SEQ ID NO: 33979 - DNA, 1399 bp, Artificial Sequence
  chemically treated genomic DNA (Homo sapiens) CpG-island No: 33979
atagtttttaatttagtgggaaaagttattttatatatttcgtgaagttaattagttttattaaggagaaagttagggtcgttgggagcgcgtggatcgtgggtttcggggcggcgtttgttcgggtatttcggtttcgtttacgtttcgtaagaggagttcgttggtttcgttacgcgggaaggggtcgtttcggggttttgggcgggagggtcgtgcgggttgcggagatatcgaggaggggaggcgttttttttgagtttttggcgtagcgattttagggcgtcgatttatcgcggaagggttcggtttgttcgggcgtcggtgtcgtttcgggtgaggttttcgcgagatttttttttgcgttttggatttatcgtagggcgtttcgtcgtacggatcgagaattttggggttttttggaaatttgttattcgttgtcgttaaggtcggaattttttagagtttttagtaacggagtttttagtaacggagtttacgcggatgcggcgcggggttgacgttgttttgggttcgtttacgtttttcgggaattttgtttcggcgtggttttcgtagttagatgtttcgtcgttttcgtttcgttggtttttaaagtttgttcggtagtcgcggcgtcgtcgttatggcgttattgttttcggggttaatttaagggttgcgcgcgtgttttttacgcgtttttatcgtcgggaggaaggggtgtgtgtggcgtttgtttagtggcggtgattatcggttcgcggcgcgtggaggttgtttttagtcgcgcgcgagttagattcgggtgggggtttcggcggcggtagcggcggcggcggtgcgagtatgtcgtggtttttcgcgtattaataagggttttaagggtgaaggcgcggggtcgtcgtcgtttttgtcgttcgcgtagtaggtgttcgaggacggcggggatcgcgggttgtaatatcggtaggcgtttaagtataaatggagtaattttcgattttatcggtttggagcgcgtcgttaaggcggcgcgcgagttggagtattcgcgtgagtgcggcggggcggggcggggcgggcgggcgggcgggacgggtcggggaagcgggagttttggtttttgtcgtttttcgttgttgtcggtagttatttttcgggcgagattgcgttttcggagtattttcggtcggagtcgtttcgcgtgtcgggaggatcggatttttttcgttattcgtttgtatttttgtagttgttaggagcgggttaggtgcgaaaagcggtgcggaggtggcgtttataggttataggggttagggtttggggttggtcgtggtttttagttatcgtcgagcgtgcgggatttttttgcgtttgtcgtttttacgtggtatag

SEQ ID NO: 33980 - DNA, 1399 bp, Artificial Sequence
  chemically treated genomic DNA (Homo sapiens) CpG-island No: 33980
ctataccacgtaaaaacgacaaacgcaaaaaaatcccgcacgctcgacgataactaaaaaccacgaccaaccccaaaccctaacccctataacctataaacgccacctccgcaccgcttttcgcacctaacccgctcctaacaactacaaaaatacaaacgaataacgaaaaaaatccgatcctcccgacacgcgaaacgactccgaccgaaaatactccgaaaacgcaatctcgcccgaaaaataactaccgacaacaacgaaaaacgacaaaaaccaaaactcccgcttccccgacccgtcccgcccgcccgcccgccccgccccgccccgccgcactcacgcgaatactccaactcgcgcgccgccttaacgacgcgctccaaaccgataaaatcgaaaattactccatttatacttaaacgcctaccgatattacaacccgcgatccccgccgtcctcgaacacctactacgcgaacgacaaaaacgacgacgaccccgcgccttcacccttaaaacccttattaatacgcgaaaaaccacgacatactcgcaccgccgccgccgctaccgccgccgaaacccccacccgaatctaactcgcgcgcgactaaaaacaacctccacgcgccgcgaaccgataatcaccgccactaaacaaacgccacacacaccccttcctcccgacgataaaaacgcgtaaaaaacacgcgcgcaacccttaaattaaccccgaaaacaataacgccataacgacgacgccgcgactaccgaacaaactttaaaaaccaacgaaacgaaaacgacgaaacatctaactacgaaaaccacgccgaaacaaaattcccgaaaaacgtaaacgaacccaaaacaacgtcaaccccgcgccgcatccgcgtaaactccgttactaaaaactccgttactaaaaactctaaaaaattccgaccttaacgacaacgaataacaaatttccaaaaaaccccaaaattctcgatccgtacgacgaaacgccctacgataaatccaaaacgcaaaaaaaaatctcgcgaaaacctcacccgaaacgacaccgacgcccgaacaaaccgaacccttccgcgataaatcgacgccctaaaatcgctacgccaaaaactcaaaaaaaacgcctcccctcctcgatatctccgcaacccgcacgaccctcccgcccaaaaccccgaaacgaccccttcccgcgtaacgaaaccaacgaactcctcttacgaaacgtaaacgaaaccgaaatacccgaacaaacgccgccccgaaacccacgatccacgcgctcccaacgaccctaactttctccttaataaaactaattaacttcacgaaatatataaaataacttttcccactaaattaaaaactat

SEQ ID NO: 33981 - DNA, 621 bp, Artificial Sequence
  chemically treated genomic DNA (Homo sapiens) CpG-island No: 33981
gtttcgagtagcggtagcgaggtttggagtcgtaggcgttgttttcgcgaggtaggggaggagttttgtattgttaggggcggggttttgagtagcgaggtcgggtttgaattattaggcgcggtttttgcgagttgggggcggggttttgtataggcgggggcggggttgtgagtggtgggggcggggtttggagtagtaggcgtcgcgtttgcgagttaaggtcggagttttgtatcggcgggggcggggttttgcgtggtcggggcgggttcggggattcgcggggcgattttcggtttggtttgggtaggttgttcgggtcgtggtaggaagtcggaagtagtcgcggttttagttcgggagatatggcgggcgttaaaggtatatcgcggttttcggttcgtttgtcgtgtggtggggttgttattttcgtttcggttaagtttggggttgcgtttttcgcgcgtcgttggggaacggttttattatttttttcgttttttcggttcgggaggcgatcgatcgtttttttcgttttttggggtgtgggtggagcggcgtttcgggggagttttggttttttttgtaaggtcgttggtttttttgttttttagtggt

SEQ ID NO: 33982 - DNA, 621 bp, Artificial Sequence
  chemically treated genomic DNA (Homo sapiens) CpG-island No: 33982
accactaaaaaacaaaaaaaccaacgaccttacaaaaaaaaccaaaactcccccgaaacgccgctccacccacaccccaaaaaacgaaaaaaacgatcgatcgcctcccgaaccgaaaaaacgaaaaaaataataaaaccgttccccaacgacgcgcgaaaaacgcaaccccaaacttaaccgaaacgaaaataacaaccccaccacacgacaaacgaaccgaaaaccgcgatatacctttaacgcccgccatatctcccgaactaaaaccgcgactacttccgacttcctaccacgacccgaacaacctacccaaaccaaaccgaaaatcgccccgcgaatccccgaacccgccccgaccacgcaaaaccccgcccccgccgatacaaaactccgaccttaactcgcaaacgcgacgcctactactccaaaccccgcccccaccactcacaaccccgcccccgcctatacaaaaccccgcccccaactcgcaaaaaccgcgcctaataattcaaacccgacctcgctactcaaaaccccgcccctaacaatacaaaactcctcccctacctcgcgaaaacaacgcctacgactccaaacctcgctaccgctactcgaaac

SEQ ID NO: 33983 - DNA, 621 bp, Artificial Sequence
  chemically treated genomic DNA (Homo sapiens) CpG-island No: 33983
gttattggagagtaggaaggttagcggttttgtaaaaagggttaaggttttttcgaaacgtcgttttatttatattttaagggacgaagggagcggtcgatcgtttttcgaatcggagaggcgggaagggtggtgaggtcgttttttaacggcgcgcggaaggcgtagttttaggtttgatcggaacggaggtggtaattttattatacgataagcgagtcggggatcgcgatgtatttttaacgttcgttatgtttttcgaattggggtcgcggttgttttcggttttttgttacggttcgggtagtttgtttaagttagatcgggagtcgtttcgcggattttcgagttcgtttcggttacgtagagtttcgttttcgtcggtgtagaatttcgattttagttcgtaaacgcggcgtttgttgttttagatttcgtttttattatttataatttcgttttcgtttgtgtagaatttcgtttttagttcgtagaggtcgcgtttgatagtttagattcggtttcgttatttagagtttcgtttttgatagtatagagttttttttttatttcgcggaggtagcgtttgcggttttagatttcgttatcgttattcgaagt

SEQ ID NO: 33984 - DNA, 621 bp, Artificial Sequence
  chemically treated genomic DNA (Homo sapiens) CpG-island No: 33984
acttcgaataacgataacgaaatctaaaaccgcaaacgctacctccgcgaaataaaaaaaaaactctatactatcaaaaacgaaactctaaataacgaaaccgaatctaaactatcaaacgcgacctctacgaactaaaaacgaaattctacacaaacgaaaacgaaattataaataataaaaacgaaatctaaaacaacaaacgccgcgtttacgaactaaaatcgaaattctacaccgacgaaaacgaaactctacgtaaccgaaacgaactcgaaaatccgcgaaacgactcccgatctaacttaaacaaactacccgaaccgtaacaaaaaaccgaaaacaaccgcgaccccaattcgaaaaacataacgaacgttaaaaatacatcgcgatccccgactcgcttatcgtataataaaattaccacctccgttccgatcaaacctaaaactacgccttccgcgcgccgttaaaaaacgacctcaccacccttcccgcctctccgattcgaaaaacgatcgaccgctcccttcgtcccttaaaatataaataaaacgacgtttcgaaaaaaccttaaccctttttacaaaaccgctaaccttcctactctccaataac

SEQ ID NO: 33985 - DNA, 623 bp, Artificial Sequence
  chemically treated genomic DNA (Homo sapiens) CpG-island No: 33985
ttcggaggttcggcgcgttttcgttattataattggagtgtatggagtaggttacgtttagaggaggaagggcgggcgttgggtattcgttgatcgatttttttaagtgcgattagtgttcgttcgttttgtttttatggattcgttcgggaacggttatcgttgaggattttacgtttattaggatttcggttgggtcgtatttagttatcgtatcgtgattttcgcgggttgtgtcggttttcggcgtttttgttcgtagcgttcgtcgtcgggttagggtttcgtcgtcgttacgtttcgcgttcggtatttatcgttttatgttggtgtatatttatttcgttatggtgagtagtttcgggttcgggatatattcggtcgggggatcggggcgtttgagtgttggattttttaatttttttgtttcgcgttaacgaaatttcggagggagggggtcgtagggatttcgttagttgagaacgcgatgcgtaagtgatcgttgtttttagtttgaggtttttgcgttcgcgggtggttcggaaataaatttcgggttttaagaaacgggagggattgtagttgaattttttcgagttgaggaggatttttttaggttgggg

SEQ ID NO: 33986 - DNA, 623 bp, Artificial Sequence
  chemically treated genomic DNA (Homo sapiens) CpG-island No: 33986
ccccaacctaaaaaaatcctcctcaactcgaaaaaattcaactacaatccctcccgtttcttaaaacccgaaatttatttccgaaccacccgcgaacgcaaaaacctcaaactaaaaacaacgatcacttacgcatcgcgttctcaactaacgaaatccctacgaccccctccctccgaaatttcgttaacgcgaaacaaaaaaattaaaaaatccaacactcaaacgccccgatcccccgaccgaatatatcccgaacccgaaactactcaccataacgaaataaatatacaccaacataaaacgataaataccgaacgcgaaacgtaacgacgacgaaaccctaacccgacgacgaacgctacgaacaaaaacgccgaaaaccgacacaacccgcgaaaatcacgatacgataactaaatacgacccaaccgaaatcctaataaacgtaaaatcctcaacgataaccgttcccgaacgaatccataaaaacaaaacgaacgaacactaatcgcacttaaaaaaatcgatcaacgaatacccaacgcccgcccttcctcctctaaacgtaacctactccatacactccaattataataacgaaaacgcgccgaacctccgaa

SEQ ID NO: 33987 - DNA, 623 bp, Artificial Sequence
  chemically treated genomic DNA (Homo sapiens) CpG-island No: 33987
ttttagtttgaaaggattttttttagttcgggagggtttagttgtagtttttttcgttttttggggttcgaggtttattttcgagttattcgcgggcgtaggagttttaggttggggatagcggttatttgcgtatcgcgtttttagttggcgaagtttttgcggtttttttttttcgagatttcgttagcgcgggataggagggttggaaagtttagtatttaggcgtttcgatttttcggtcgaatatgtttcgggttcgagattatttattatggcggagtaggtgtgtattagtatggggcggtgagtgtcgggcgcgaggcgtggcggcggcggagttttagttcgacggcgagcgttgcgggtagaggcgtcgggagtcggtatagttcgcggaggttacggtgcggtagttgggtgcgatttagtcgggattttagtgggcgtggggtttttagcggtggtcgttttcgggcgggtttatggaggtaggacggacgggtattgatcgtatttggaaaagtcggttaacgggtgtttagcgttcgtttttttttttttgagcgtagtttgttttatgtattttagttatagtggcgggggcgcgtcgggttttcggg

SEQ ID NO: 33988 - DNA, 623 bp, Artificial Sequence
  chemically treated genomic DNA (Homo sapiens) CpG-island No: 33988
cccgaaaacccgacgcgcccccgccactataactaaaatacataaaacaaactacgctcaaaaaaaaaaaaacgaacgctaaacacccgttaaccgacttttccaaatacgatcaatacccgtccgtcctacctccataaacccgcccgaaaacgaccaccgctaaaaaccccacgcccactaaaatcccgactaaatcgcacccaactaccgcaccgtaacctccgcgaactataccgactcccgacgcctctacccgcaacgctcgccgtcgaactaaaactccgccgccgccacgcctcgcgcccgacactcaccgccccatactaatacacacctactccgccataataaataatctcgaacccgaaacatattcgaccgaaaaatcgaaacgcctaaatactaaactttccaaccctcctatcccgcgctaacgaaatctcgaaaaaaaaaaaccgcaaaaacttcgccaactaaaaacgcgatacgcaaataaccgctatccccaacctaaaactcctacgcccgcgaataactcgaaaataaacctcgaaccccaaaaaacgaaaaaaactacaactaaaccctcccgaactaaaaaaaatcctttcaaactaaaa

SEQ ID NO: 33989 - DNA, 502 bp, Artificial Sequence
  chemically treated genomic DNA (Homo sapiens) CpG-island No: 33989
gtttacgggtcggcgttttcgttttgttatacgtcggtcgttatagttgtcgtcgaattttagtcgttttatttttcgtcgttttattcgtagttatcgttgttttacggttaggcgttcgacgtcgtcgtagtttttttttatttggtaggggatttatatggcggtttggcgtttttggcgtagtcgtagtttttttaggtcgtttgggtcgcgtttcgcgtagtcgttcgcgtttacgaggagtttttcggtttgttggtatcgttcgttcgcgttttgggttttgattcgcgtcgtgattatgttattgtcgtgtttcggtttttgtacggtttggtcgacggcgcgtacggtttggtagacgtatttttcggtttttcggggttggcggcggttttcggtttggaggatttgtaggtgagattcgagggattcgggatgggtcgggattggtcgcggtggtttattattatggttggaggtagaaggtgataaatgt

SEQ ID NO: 33990 - DNA, 502 bp, Artificial Sequence
  chemically treated genomic DNA (Homo sapiens) CpG-island No: 33990
acatttatcaccttctacctccaaccataataataaaccaccgcgaccaatcccgacccatcccgaatccctcgaatctcacctacaaatcctccaaaccgaaaaccgccgccaaccccgaaaaaccgaaaaatacgtctaccaaaccgtacgcgccgtcgaccaaaccgtacaaaaaccgaaacacgacaataacataatcacgacgcgaatcaaaacccaaaacgcgaacgaacgataccaacaaaccgaaaaactcctcgtaaacgcgaacgactacgcgaaacgcgacccaaacgacctaaaaaaactacgactacgccaaaaacgccaaaccgccatataaatcccctaccaaataaaaaaaaactacgacgacgtcgaacgcctaaccgtaaaacaacgataactacgaataaaacgacgaaaaataaaacgactaaaattcgacgacaactataacgaccgacgtataacaaaacgaaaacgccgacccgtaaac

SEQ ID NO: 33991 - DNA, 502 bp, Artificial Sequence
  chemically treated genomic DNA (Homo sapiens) CpG-island No: 33991
gtatttgttattttttgtttttagttatggtagtaaattatcgcggttagtttcgatttatttcggatttttcgggttttatttgtaggttttttagatcgggggtcgtcgttagtttcggaaggtcgagaggtgcgtttgttaggtcgtgcgcgtcgtcggttaggtcgtgtaggagtcggggtacggtagtggtatagttacggcgcgggttaaggtttagggcgcgggcgggcggtgttagtaggtcgggaggtttttcgtgggcgcgggcggttgcgcggggcgcggtttaggcggtttgaggaggttgcggttgcgttaggggcgttaggtcgttatatgggttttttgttaggtggggaaaggttgcggcggcgtcgggcgtttgatcgtagggtagcggtggttgcgggtagggcggcgggaagtagggcggttggaattcggcggtagttgtggcggtcggcgtgtggtagagcgggggcgtcggttcgtaggt

SEQ ID NO: 33992 - DNA, 502 bp, Artificial Sequence
  chemically treated genomic DNA (Homo sapiens) CpG-island No: 33992
acctacgaaccgacgcccccgctctaccacacgccgaccgccacaactaccgccgaattccaaccgccctacttcccgccgccctacccgcaaccaccgctaccctacgatcaaacgcccgacgccgccgcaacctttccccacctaacaaaaaacccatataacgacctaacgcccctaacgcaaccgcaacctcctcaaaccgcctaaaccgcgccccgcgcaaccgcccgcgcccacgaaaaacctcccgacctactaacaccgcccgcccgcgccctaaaccttaacccgcgccgtaactataccactaccgtaccccgactcctacacgacctaaccgacgacgcgcacgacctaacaaacgcacctctcgaccttccgaaactaacgacgacccccgatctaaaaaacctacaaataaaacccgaaaaatccgaaataaatcgaaactaaccgcgataatttactaccataactaaaaacaaaaaataacaaatac

SEQ ID NO: 33993 - DNA, 670 bp, Artificial Sequence
  chemically treated genomic DNA (Homo sapiens) CpG-island No: 33993
gacgcggtgggaaagacgagggtcgttagttttttttgtttcgtattggggtaggggttcggcgttgtttcggagaaaggttaggttttttttagttagggaataatgatagttcgcgcgttcgtagttcgtttcgtttcgttttattaggttcgtaggcggtttttttcgttcggttgaggggttcggtcgcgttttttttttttttcgttttggttcggggtgtttttcgttcgtatcgttagttttatcgggtcggagttggaggtcgtcgtcgcggcggttgtattatagcgcgcgttcgttttgttgtaggatgtagtggtttttggtttggaagagttttatgttggtttcgcgcgtttagggaggcggcggttcgcgggcggcgtacggggcgttttagtcggtcgaggtcgttagagttcgcgtttcggggagcggtcgggtaggaatcgcgtcgagaagtagcggtagagggaacgtttcggggtattcgatcggtaggaggagaacgcgtttcggtagcggcggcggtagcggcggtcgtagaggtttttttttttcgtttttttttttttttggtttcgttttaggttcggttttattttttttgttggttatttttttcgagcgttcggtttcgttttttagttttttttttttttta

SEQ ID NO: 33994 - DNA, 670 bp, Artificial Sequence
  chemically treated genomic DNA (Homo sapiens) CpG-island No: 33994
taaaaaaaaaaaaaaactaaaaaacgaaaccgaacgctcgaaaaaaataaccaacaaaaaaaataaaaccgaacctaaaacgaaaccaaaaaaaaaaaaaaacgaaaaaaaaaaacctctacgaccgccgctaccgccgccgctaccgaaacgcgttctcctcctaccgatcgaataccccgaaacgttccctctaccgctacttctcgacgcgattcctacccgaccgctccccgaaacgcgaactctaacgacctcgaccgactaaaacgccccgtacgccgcccgcgaaccgccgcctccctaaacgcgcgaaaccaacataaaactcttccaaaccaaaaaccactacatcctacaacaaaacgaacgcgcgctataatacaaccgccgcgacgacgacctccaactccgacccgataaaactaacgatacgaacgaaaaacaccccgaaccaaaacgaaaaaaaaaaaaaacgcgaccgaacccctcaaccgaacgaaaaaaaccgcctacgaacctaataaaacgaaacgaaacgaactacgaacgcgcgaactatcattattccctaactaaaaaaaacctaacctttctccgaaacaacgccgaacccctaccccaatacgaaacaaaaaaaactaacgaccctcgtctttcccaccgcgtc

SEQ ID NO: 33995 - DNA, 670 bp, Artificial Sequence
  chemically treated genomic DNA (Homo sapiens) CpG-island No: 33995
tgaaaggaggaggaggttgaggggcggagtcgggcgttcggggagagtagttagtagagggggtggagtcgggtttggggcggagttagggaaggggaggagcgggggggagaggtttttacggtcgtcgttgtcgtcgtcgttgtcggggcgcgttttttttttatcggtcgggtgtttcggggcgttttttttgtcgttgtttttcggcgcggtttttattcggtcgtttttcgaggcgcgggttttggcggtttcgatcgattaggacgtttcgtgcgtcgttcgcgggtcgtcgtttttttgggcgcgcggggttagtatggagtttttttaagttaaggattattatattttgtagtagggcgagcgcgcgttgtggtgtagtcgtcgcgacggcggtttttagtttcgattcggtgaggttggcggtgcgggcggggggtatttcgggttagggcggggagaggagggggcgcggtcggattttttagtcgggcgggaggagtcgtttgcgggtttggtgaggcggggcggggcgggttgcgagcgcgcgagttgttattattttttgattggaaggagtttggttttttttcgagatagcgtcgagtttttattttagtgcggagtagaaggggttggcgattttcgttttttttatcgcgtt

SEQ ID NO: 33996 - DNA, 670 bp, Artificial Sequence
  chemically treated genomic DNA (Homo sapiens) CpG-island No: 33996
aacgcgataaaaaaaacgaaaatcgccaaccccttctactccgcactaaaataaaaactcgacgctatctcgaaaaaaaaccaaactccttccaatcaaaaaataataacaactcgcgcgctcgcaacccgccccgccccgcctcaccaaacccgcaaacgactcctcccgcccgactaaaaaatccgaccgcgccccctcctctccccgccctaacccgaaataccccccgcccgcaccgccaacctcaccgaatcgaaactaaaaaccgccgtcgcgacgactacaccacaacgcgcgctcgccctactacaaaatataataatccttaacttaaaaaaactccatactaaccccgcgcgcccaaaaaaacgacgacccgcgaacgacgcacgaaacgtcctaatcgatcgaaaccgccaaaacccgcgcctcgaaaaacgaccgaataaaaaccgcgccgaaaaacaacgacaaaaaaaacgccccgaaacacccgaccgataaaaaaaaaacgcgccccgacaacgacgacgacaacgacgaccgtaaaaacctctcccccccgctcctccccttccctaactccgccccaaacccgactccaccccctctactaactactctccccgaacgcccgactccgcccctcaacctcctcctcctttca

SEQ ID NO: 33997 - DNA, 558 bp, Artificial Sequence
  chemically treated genomic DNA (Homo sapiens) CpG-island No: 33997
tcgtttgcgggcgaggaaatggggtttttattttcgcgttgtttcggggtcgtatttcgtaggggtgtttttcggtgtaatcgcgggaagattttaagtatcgatttttcggtagtttcgcggagcgttttggcggttaagggatcgtagtatcgggttttgcggcgggggcggcgtgcgcgggggcgtcggcggtcgggttttttcgtagtattttcgaggtttttcgcgacgtattttcgtcgtttgtttatttgcgcggcgttgaggtttcggagtttatttatatggtttttttttcgttttttttcggcgcggtcgaggcggtttcggggggttttcggcgggttcgggagtcggtgggtttttcgagagtatcgagggggcggtatttttttttttttatgttcggcggtcgattttttgtgtggggcgggcggcggtcgtcgggcggtgcggcgcgggcggggggtgagtgagcgtttcggcggttttaaaagttttgggagaagcgcggcgcgttcgggcgggagaggatcgcgtcgttcgtataataat

SEQ ID NO: 33998 - DNA, 558 bp, Artificial Sequence
  chemically treated genomic DNA (Homo sapiens) CpG-island No: 33998
attattatacgaacgacgcgatcctctcccgcccgaacgcgccgcgcttctcccaaaacttttaaaaccgccgaaacgctcactcaccccccgcccgcgccgcaccgcccgacgaccgccgcccgccccacacaaaaaatcgaccgccgaacataaaaaaaaaaaaataccgccccctcgatactctcgaaaaacccaccgactcccgaacccgccgaaaaccccccgaaaccgcctcgaccgcgccgaaaaaaaacgaaaaaaaaaccatataaataaactccgaaacctcaacgccgcgcaaataaacaaacgacgaaaatacgtcgcgaaaaacctcgaaaatactacgaaaaaacccgaccgccgacgcccccgcgcacgccgcccccgccgcaaaacccgatactacgatcccttaaccgccaaaacgctccgcgaaactaccgaaaaatcgatacttaaaatcttcccgcgattacaccgaaaaacacccctacgaaatacgaccccgaaacaacgcgaaaataaaaaccccatttcctcgcccgcaaacga

SEQ ID NO: 33999 - DNA, 558 bp, Artificial Sequence
  chemically treated genomic DNA (Homo sapiens) CpG-island No: 33999
gttgttgtgcgagcggcgcggttttttttcgttcgggcgcgtcgcgttttttttagagtttttaggatcgtcggggcgtttatttatttttcgttcgcgtcgtatcgttcggcggtcgtcgttcgttttatataaaaaatcggtcgtcgggtataaagaaaaaaaggtgtcgttttttcggtgttttcggaaggtttatcggttttcgggttcgtcggggatttttcggagtcgtttcggtcgcgtcggaggagggcggggagaggattatgtgagtgggtttcggagttttagcgtcgcgtaggtaagtaggcggcggggatgcgtcgcgggaggtttcggggatgttgcggagaagttcggtcgtcggcgttttcgcgtacgtcgttttcgtcgtagggttcggtgttgcggttttttggtcgttagggcgtttcgcggggttgtcggggagtcggtgtttggggttttttcgcggttgtatcggaggatatttttgcggggtgcggtttcgaggtagcgcggggatggggattttattttttcgttcgtaagcgg

SEQ ID NO: 34000 - DNA, 558 bp, Artificial Sequence
  chemically treated genomic DNA (Homo sapiens) CpG-island No: 34000
ccgcttacgaacgaaaaaataaaatccccatccccgcgctacctcgaaaccgcaccccgcaaaaatatcctccgatacaaccgcgaaaaaaccccaaacaccgactccccgacaaccccgcgaaacgccctaacgaccaaaaaaccgcaacaccgaaccctacgacgaaaacgacgtacgcgaaaacgccgacgaccgaacttctccgcaacatccccgaaacctcccgcgacgcatccccgccgcctacttacctacgcgacgctaaaactccgaaacccactcacataatcctctccccgccctcctccgacgcgaccgaaacgactccgaaaaatccccgacgaacccgaaaaccgataaaccttccgaaaacaccgaaaaaacgacacctttttttctttatacccgacgaccgattttttatataaaacgaacgacgaccgccgaacgatacgacgcgaacgaaaaataaataaacgccccgacgatcctaaaaactctaaaaaaaacgcgacgcgcccgaacgaaaaaaaaccgcgccgctcgcacaacaac

SEQ ID NO: 34001 - DNA, 876 bp, Artificial Sequence
  chemically treated genomic DNA (Homo sapiens) CpG-island No: 34001
tttcggaggaagtaggcgagcgtcggtagatttataaataaggaaggttttgttttcgcgcggtcgcgttattttcgcggtagaagtttgattttttgtttttcggtttttcgtacgcgtttttttcgggtttcgtattcgtattcgttcggcgcggtcgaattaattgtagagtagtttgtgtttattcggtcgaggtttcggcgttttcggggcgagcgtcgattcgcggtttttaggaggcgagtttagggtttcggtcgttcgtcggtgacgggggagcgcggcgcgggttttcgtcggcgtttattcgcgggcgcgggtcggacgtttttacgtaggggcgtcgcgttttttcgtcgttgtcgttgtcggtcgtcgtgtagggtttcggggttgcgtttcggtcgtcgtcgtttgtttcgtcgcggtcgtcgaggatttggtgggaggtggaagggatagcgcgttaaggttagttttaaagttaagtcgaattttgttgcggggggcgcgcgggggcggcgacgcgtgtgcgttgggcgcgggttgcggagttgacggcgtagttttgggcggttttttcggaggcggtggttttcgtttttcgcgttcgtttcgttagtggcggtcgtacgatcgcgcgtattagcgaataatagtcgttcgtgatattttcgttgatatcgtttcggacgggcggggtggggggcgagcggttgtcgttgtagggggcggcgagtatttgttttgttttgtttttatcgtcgcgtcgttagcgttaggtgttttttttttatttcggttttttcggttttttgggcgtagggttatttattagtgtcgtcggattcggcgggtatttttttttcggtt

SEQ ID NO: 34002 - DNA, 876 bp, Artificial Sequence
  chemically treated genomic DNA (Homo sapiens) CpG-island No: 34002
aaccgaaaaaaaaatacccgccgaatccgacgacactaataaataaccctacgcccaaaaaaccgaaaaaaccgaaataaaaaaaaaacacctaacgctaacgacgcgacgataaaaacaaaacaaaacaaatactcgccgccccctacaacgacaaccgctcgccccccaccccgcccgtccgaaacgatatcaacgaaaatatcacgaacgactattattcgctaatacgcgcgatcgtacgaccgccactaacgaaacgaacgcgaaaaacgaaaaccaccgcctccgaaaaaaccgcccaaaactacgccgtcaactccgcaacccgcgcccaacgcacacgcgtcgccgcccccgcgcgccccccgcaacaaaattcgacttaactttaaaactaaccttaacgcgctatcccttccacctcccaccaaatcctcgacgaccgcgacgaaacaaacgacgacgaccgaaacgcaaccccgaaaccctacacgacgaccgacaacgacaacgacgaaaaaacgcgacgcccctacgtaaaaacgtccgacccgcgcccgcgaataaacgccgacgaaaacccgcgccgcgctcccccgtcaccgacgaacgaccgaaaccctaaactcgcctcctaaaaaccgcgaatcgacgctcgccccgaaaacgccgaaacctcgaccgaataaacacaaactactctacaattaattcgaccgcgccgaacgaatacgaatacgaaacccgaaaaaaacgcgtacgaaaaaccgaaaaacaaaaaatcaaacttctaccgcgaaaataacgcgaccgcgcgaaaacaaaaccttccttatttataaatctaccgacgctcgcctacttcctccgaaa

SEQ ID NO: 34003 - DNA, 876 bp, Artificial Sequence
  chemically treated genomic DNA (Homo sapiens) CpG-island No: 34003
agtcgggaaaggggtgttcgtcggattcgacggtattggtgggtggttttgcgtttagggagtcggagggatcggggtggggaaggggtatttggcgttggcggcgcggcggtggggatagagtagggtaagtgttcgtcgttttttgtagcggtagtcgttcgttttttatttcgttcgttcgggacggtattagcggagatgttacgggcggttattattcgttggtgcgcgcggtcgtgcggtcgttattgacggggcgggcgcggggggcgggggttatcgttttcggggagatcgtttagagttgcgtcgttagtttcgtagttcgcgtttagcgtatacgcgtcgtcgttttcgcgcgtttttcgtagtaaagttcggtttaattttgaggttggttttgacgcgttgttttttttattttttattaggttttcggcggtcgcggcgaagtaggcggcggcggtcggagcgtagtttcgggattttgtacggcggtcggtagcgatagcggcgaagggacgcggcgtttttgcgtggggacgttcggttcgcgttcgcgagtgggcgtcgacggggattcgcgtcgcgttttttcgttatcggcgagcggtcggagttttgagttcgttttttggaagtcgcgggtcggcgttcgtttcgagggcgtcgggatttcggtcgggtgaatataaattgttttgtaattgattcgatcgcgtcgggcgggtgcgggtgcggggttcggagggagcgcgtgcggaaggtcggagggtaggaagttaggtttttgtcgcgagggtggcgcggtcgcgcggggatagagttttttttatttatgagtttgtcggcgttcgtttgtttttttcgaag

SEQ ID NO: 34004 - DNA, 876 bp, Artificial Sequence
  chemically treated genomic DNA (Homo sapiens) CpG-island No: 34004
cttcgaaaaaaacaaacgaacgccgacaaactcataaataaaaaaaactctatccccgcgcgaccgcgccaccctcgcgacaaaaacctaacttcctaccctccgaccttccgcacgcgctccctccgaaccccgcacccgcacccgcccgacgcgatcgaatcaattacaaaacaatttatattcacccgaccgaaatcccgacgccctcgaaacgaacgccgacccgcgacttccaaaaaacgaactcaaaactccgaccgctcgccgataacgaaaaaacgcgacgcgaatccccgtcgacgcccactcgcgaacgcgaaccgaacgtccccacgcaaaaacgccgcgtcccttcgccgctatcgctaccgaccgccgtacaaaatcccgaaactacgctccgaccgccgccgcctacttcgccgcgaccgccgaaaacctaataaaaaataaaaaaaacaacgcgtcaaaaccaacctcaaaattaaaccgaactttactacgaaaaacgcgcgaaaacgacgacgcgtatacgctaaacgcgaactacgaaactaacgacgcaactctaaacgatctccccgaaaacgataacccccgccccccgcgcccgccccgtcaataacgaccgcacgaccgcgcgcaccaacgaataataaccgcccgtaacatctccgctaataccgtcccgaacgaacgaaataaaaaacgaacgactaccgctacaaaaaacgacgaacacttaccctactctatccccaccgccgcgccgccaacgccaaataccccttccccaccccgatccctccgactccctaaacgcaaaaccacccaccaataccgtcgaatccgacgaacacccctttcccgact

SEQ ID NO: 34005 - DNA, 590 bp, Artificial Sequence
  chemically treated genomic DNA (Homo sapiens) CpG-island No: 34005
cgatttgtgcgaggttcgcgcgcggcgcggacgatgttgaggtataagtagagcgtaatggttacggtttagaagaaggagttggtgttggcgaaggtggatagcgcgttttgtagtacgtagttttacgacgggttcgcgaagttttgtagtatttcgtagaagtaggaggcggtcgagagtaggtcggttagcgataggaagagtagtaggcgtcgtgttcggttgcgtaggtcgggttatagggcgtgcgtggttattagtaggttcgagtcgagcgcggagagtgcgtacgatagtagtattacggcgcgtttcgacggtattagttcggtgggcggcggggacggttgtatggcgtggggggttaggagtcggagcgtcgcgaggatagaagtcgggtcgcgcgtgcggttacgtcgtcgtcgtttgggtatcgaggcgttttaggttcgcgtttaggcgttcgtttcgttcgcgttcggtcgttttttcgtttatttgggtttcgggttttgaatttcgtttacgttttgcgtttcgtttttatatttcgggttttgagtttcgtttacgcgtcgcgttttatt

SEQ ID NO: 34006 - DNA, 590 bp, Artificial Sequence
  chemically treated genomic DNA (Homo sapiens) CpG-island No: 34006
aataaaacgcgacgcgtaaacgaaactcaaaacccgaaatataaaaacgaaacgcaaaacgtaaacgaaattcaaaacccgaaacccaaataaacgaaaaaacgaccgaacgcgaacgaaacgaacgcctaaacgcgaacctaaaacgcctcgatacccaaacgacgacgacgtaaccgcacgcgcgacccgacttctatcctcgcgacgctccgactcctaaccccccacgccatacaaccgtccccgccgcccaccgaactaataccgtcgaaacgcgccgtaatactactatcgtacgcactctccgcgctcgactcgaacctactaataaccacgcacgccctataacccgacctacgcaaccgaacacgacgcctactactcttcctatcgctaaccgacctactctcgaccgcctcctacttctacgaaatactacaaaacttcgcgaacccgtcgtaaaactacgtactacaaaacgcgctatccaccttcgccaacaccaactccttcttctaaaccgtaaccattacgctctacttatacctcaacatcgtccgcgccgcgcgcgaacctcgcacaaatcg

SEQ ID NO: 34007 - DNA, 590 bp, Artificial Sequence
  chemically treated genomic DNA (Homo sapiens) CpG-island No: 34007
ggtggggcgcggcgcgtgggcggggtttagggttcgggatataggggcggggcgtagggcgtggacggggtttagggttcggggtttagatgggcgggggagcggtcggacgcgggcggggcgggcgtttggacgcgagtttagggcgtttcggtgtttagacggcggcggcgtggtcgtacgcgcggttcggtttttgttttcgcggcgtttcggtttttggttttttacgttatgtagtcgttttcgtcgtttatcgagttggtgtcgtcggagcgcgtcgtggtgttgttgtcgtgcgtatttttcgcgttcggttcgggtttgttggtggttacgtacgttttgtggttcgatttgcgtagtcgggtacggcgtttgttgttttttttgtcgttggtcgatttgttttcggtcgttttttatttttacggagtgttgtagaatttcgcgggttcgtcgtgggattgcgtgttgtagggcgcgttgtttattttcgttaatattagtttttttttttggatcgtggttattgcgttttatttgtattttagtatcgttcgcgtcgcgcgcgggtttcgtatagatcg

SEQ ID NO: 34008 - DNA, 590 bp, Artificial Sequence
  chemically treated genomic DNA (Homo sapiens) CpG-island No: 34008
cgatctatacgaaacccgcgcgcgacgcgaacgatactaaaatacaaataaaacgcaataaccacgatccaaaaaaaaaaactaatattaacgaaaataaacaacgcgccctacaacacgcaatcccacgacgaacccgcgaaattctacaacactccgtaaaaataaaaaacgaccgaaaacaaatcgaccaacgacaaaaaaaacaacaaacgccgtacccgactacgcaaatcgaaccacaaaacgtacgtaaccaccaacaaacccgaaccgaacgcgaaaaatacgcacgacaacaacaccacgacgcgctccgacgacaccaactcgataaacgacgaaaacgactacataacgtaaaaaaccaaaaaccgaaacgccgcgaaaacaaaaaccgaaccgcgcgtacgaccacgccgccgccgtctaaacaccgaaacgccctaaactcgcgtccaaacgcccgccccgcccgcgtccgaccgctcccccgcccatctaaaccccgaaccctaaaccccgtccacgccctacgccccgcccctatatcccgaaccctaaaccccgcccacgcgccgcgccccacc

SEQ ID NO: 34009 - DNA, 582 bp, Artificial Sequence
  chemically treated genomic DNA (Homo sapiens) CpG-island No: 34009
ataagttgcgtcgtttgcggggcgaggttcggttgcgcgacgaggagcggttgcgggaggaggttcggtcgcggggcgaggagcggttacgggaagaggttcggttacgcgaggatgcgtcgttgcgcgttcggttcgtcgcggttttttcgcgggcggagttttggtttttttagtcggtttcgggttcggtttacgcgatttttggggtttacggtgatattcggtttttcgcggttttttgggtagggagtcgcggtttcgtttattttgttcgttcggcgtaatttaggcgtcgcgtttcggttcggggtagtttcgaggaggacgaggacgttcggacgttcgatagggttacgtagggttcgggtttcgcggttcgtcgttggtgggtagcgtttttcgtttcggcgcggttgttttttttttttttcggtttcgattcgcgttcgggtttgcgggcgattcgagcgggttttgttggcgcggcgagggttcggtttgaggtggggcgtcggttggagcgttggttttttcggtttttgttttgggttagtttagggttattgttcgtttttttgg

SEQ ID NO: 34010 - DNA, 582 bp, Artificial Sequence
  chemically treated genomic DNA (Homo sapiens) CpG-island No: 34010
ccaaaaaaacgaacaataaccctaaactaacccaaaacaaaaaccgaaaaaaccaacgctccaaccgacgccccacctcaaaccgaaccctcgccgcgccaacaaaacccgctcgaatcgcccgcaaacccgaacgcgaatcgaaaccgaaaaaaaaaaaaaacaaccgcgccgaaacgaaaaacgctacccaccaacgacgaaccgcgaaacccgaaccctacgtaaccctatcgaacgtccgaacgtcctcgtcctcctcgaaactaccccgaaccgaaacgcgacgcctaaattacgccgaacgaacaaaataaacgaaaccgcgactccctacccaaaaaaccgcgaaaaaccgaatatcaccgtaaaccccaaaaatcgcgtaaaccgaacccgaaaccgactaaaaaaaccaaaactccgcccgcgaaaaaaccgcgacgaaccgaacgcgcaacgacgcatcctcgcgtaaccgaacctcttcccgtaaccgctcctcgccccgcgaccgaacctcctcccgcaaccgctcctcgtcgcgcaaccgaacctcgccccgcaaacgacgcaacttat

SEQ ID NO: 34011 - DNA, 582 bp, Artificial Sequence
  chemically treated genomic DNA (Homo sapiens) CpG-island No: 34011
ttaggaagacgagtagtagttttaggttggtttagagtagaagtcgagagagttagcgttttagtcggcgttttattttaggtcgggttttcgtcgcgttagtagggttcgttcgagtcgttcgtaggttcgggcgcgggtcgggatcgaggagggaggaaggtagtcgcgtcggggcgggagacgttgtttattagcggcgggtcgcgagattcgggttttgcgtggttttgtcgggcgttcgggcgttttcgtttttttcggagttgtttcggatcgaggcgcggcgtttgagttgcgtcgggcgggtaggataggcgaggtcgcggttttttatttaggaagtcgcggagggtcggatattatcgtaggttttaggggtcgcgtaggtcgagttcgaggtcggttgggagagttagggtttcgttcgcggagaggtcgcggcgggtcgggcgcgtagcggcgtattttcgcgtaatcgggttttttttcgtaatcgtttttcgtttcgcggtcgggttttttttcgtagtcgtttttcgtcgcgtagtcgggtttcgtttcgtaggcggcgtagtttgt

SEQ ID NO: 34012 - DNA, 582 bp, Artificial Sequence
  chemically treated genomic DNA (Homo sapiens) CpG-island No: 34012
acaaactacgccgcctacgaaacgaaacccgactacgcgacgaaaaacgactacgaaaaaaaacccgaccgcgaaacgaaaaacgattacgaaaaaaaacccgattacgcgaaaatacgccgctacgcgcccgacccgccgcgacctctccgcgaacgaaaccctaactctcccaaccgacctcgaactcgacctacgcgacccctaaaacctacgataatatccgaccctccgcgacttcctaaataaaaaaccgcgacctcgcctatcctacccgcccgacgcaactcaaacgccgcgcctcgatccgaaacaactccgaaaaaaacgaaaacgcccgaacgcccgacaaaaccacgcaaaacccgaatctcgcgacccgccgctaataaacaacgtctcccgccccgacgcgactaccttcctccctcctcgatcccgacccgcgcccgaacctacgaacgactcgaacgaaccctactaacgcgacgaaaacccgacctaaaataaaacgccgactaaaacgctaactctctcgacttctactctaaaccaacctaaaactactactcgtcttcctaa

SEQ ID NO: 34013 - DNA, 522 bp, Artificial Sequence
  chemically treated genomic DNA (Homo sapiens) CpG-island No: 34013
agggcgcgcgtatgcgtagatttttttgttagcgcgttcgttggtttcgtttttgtttcgttttttttttttttcgttttagtcgttttttcgtcggttatttgggtattttttttttttcgaaaggtttgtgttattcgttgtcgtaggtaagcgtttaagtttcggtttcgtttggtttcgtttattggttattttttatagagtttaagaaaacgtcggtatcggttggtcgttattttgggtttcgcgtgttttcgttttagcgggaggagtcggcgtcgacgaatggcgtttgcgtattaagtttcgtcgtttgttttaggagtggagcgggaggtcggagtgggtatgcgcgattttgtaggcgtatcgttatttttcgtgtaggggcgttgttcgtttttttttgtaagtcgagttaatttagttttcgtttttttggaatcggtttagtttttaggggtaaggcggacgtggagtattttagagatagttttgcgttttttttttaatgattgt

SEQ ID NO: 34014 - DNA, 522 bp, Artificial Sequence
  chemically treated genomic DNA (Homo sapiens) CpG-island No: 34014
acaatcattaaaaaaaaaacgcaaaactatctctaaaatactccacgtccgccttacccctaaaaactaaaccgattccaaaaaaacgaaaactaaattaactcgacttacaaaaaaaaacgaacaacgcccctacacgaaaaataacgatacgcctacaaaatcgcgcatacccactccgacctcccgctccactcctaaaacaaacgacgaaacttaatacgcaaacgccattcgtcgacgccgactcctcccgctaaaacgaaaacacgcgaaacccaaaataacgaccaaccgataccgacgttttcttaaactctataaaaaataaccaataaacgaaaccaaacgaaaccgaaacttaaacgcttacctacgacaacgaataacacaaacctttcgaaaaaaaaaaaatacccaaataaccgacgaaaaaacgactaaaacgaaaaaaaaaaaaaacgaaacaaaaacgaaaccaacgaacgcgctaacaaaaaaatctacgcatacgcgcgccct

SEQ ID NO: 34015 - DNA, 522 bp, Artificial Sequence
  chemically treated genomic DNA (Homo sapiens) CpG-island No: 34015
gtagttattgaaaaagagacgtaaagttgtttttggggtattttacgttcgttttgtttttgggagttgggtcggttttaggaggacgaagattgaattagttcggtttgtagagaaaggcgagtagcgtttttatacggagagtagcggtgcgtttataaagtcgcgtatgtttatttcggtttttcgttttatttttaaggtaggcggcgaggtttagtgcgtaagcgttattcgtcggcgtcgatttttttcgttaaggcgggaatacgcggggtttaagatggcggttagtcggtatcggcgtttttttaagttttgtgaggaatggttagtggacgagattaaacggggtcgggatttgggcgtttatttgcgatagcgggtagtataggtttttcgggagggagagaatatttaggtgatcggcggggaggcggttgggacgaggggaggaaaggacgaggtaggggcggggttaacgagcgcgttagtagggggatttgcgtatgcgcgcgtttt

SEQ ID NO: 34016 - DNA, 522 bp, Artificial Sequence
  chemically treated genomic DNA (Homo sapiens) CpG-island No: 34016
aaaacgcgcgcatacgcaaatccccctactaacgcgctcgttaaccccgcccctacctcgtcctttcctcccctcgtcccaaccgcctccccgccgatcacctaaatattctctccctcccgaaaaacctatactacccgctatcgcaaataaacgcccaaatcccgaccccgtttaatctcgtccactaaccattcctcacaaaacttaaaaaaacgccgataccgactaaccgccatcttaaaccccgcgtattcccgccttaacgaaaaaaatcgacgccgacgaataacgcttacgcactaaacctcgccgcctaccttaaaaataaaacgaaaaaccgaaataaacatacgcgactttataaacgcaccgctactctccgtataaaaacgctactcgcctttctctacaaaccgaactaattcaatcttcgtcctcctaaaaccgacccaactcccaaaaacaaaacgaacgtaaaataccccaaaaacaactttacgtctctttttcaataactac

SEQ ID NO: 34017 - DNA, 1228 bp, Artificial Sequence
  chemically treated genomic DNA (Homo sapiens) CpG-island No: 34017
  unsure (774, 800)
ttttcgattttgaattattttcgtttttttttaatgttaatcgaatttttttaattttttagtagtttcgtgatagttagtatatatacgtacgttttgtgtttgcgattttggttttgttcgaagacgtttaggagtcggtttaatttttttttgattttcgttttttcgtatatttttcggatcgtcgtatcgttcggttttttttcgggttttatgttttcgttcggtacgatttagcggttcgggtatcggttgttatttattaataggatttcgttttcgcgttcgtttcggaagtataggtacgtcgttcgttttttgaatttttcggggtcgtaggttcgcgtttggttgggtttgtattttattttcgaggtagttttttcgaggtagttttttttcgtttttcgttgttgtgtgggtcgtcgttgtcgttgtcgtcgtcggggaatagtcgaggtgttgggaagagaaagggtcgaggcgaggggcggggaaagagaggcgttttcgtttgttcgcgagttcggggagcggagggagagatgaagttgggcggggcgtaggcggaggcgggggtagcgaggcgcgttagttagtcggtagttcgatgggcggtcggtcgaattcgggttcgtcggagtggaggaggtgtcgtcgttcgcgagttcgcgattgtttatagattttattcgtttgtcgggggcgcgttttttttttttcgtcgcgggtaagggtttgagcgaggtgaggcgtattaacggacgcgtncgcgttttcgtttacgtgcgcgtttncggcgaagggtaaggggcgggggcgggggttttttggttttcgtagcgcgcgacgtttcgggtttattgcgtaggcgtttcgtatttttgggggtcgagaacgtcgttcgcgtattgtgaaatatatcgtattgtgattttggtcgattgtttttacgtgtgtttttgatttaaacgcgattgtagcgcggtaggacgttttttttttttttttttatcgcgttgtacgaaatttatacgtagtcgttttatatacgatagaggtaagggtatcgtcgttattatttttttttacgatgaattattttggtttatttatgggatttgggtttcggtgttgttaaaacgatttacgggatttttggtagaatagtcgcgtatttttgttgagttatatgatgtagttttatttttttaataggttttta

SEQ ID NO: 34018 - DNA, 1228 bp, Artificial Sequence
  chemically treated genomic DNA (Homo sapiens) CpG-island No: 34018
  unsure (429, 455)
taaaaacctattaaaaaaataaaactacatcatataactcaacaaaaatacgcgactattctaccaaaaatcccgtaaatcgttttaacaacaccgaaacccaaatcccataaataaaccaaaataattcatcgtaaaaaaaaataataacgacgatacccttacctctatcgtatataaaacgactacgtataaatttcgtacaacgcgataaaaaaaaaaaaaaaaaacgtcctaccgcgctacaatcgcgtttaaatcaaaaacacacgtaaaaacaatcgaccaaaatcacaatacgatatatttcacaatacgcgaacgacgttctcgacccccaaaaatacgaaacgcctacgcaataaacccgaaacgtcgcgcgctacgaaaaccaaaaaacccccgcccccgccccttacccttcgccgnaaacgcgcacgtaaacgaaaacgcgnacgcgtccgttaatacgcctcacctcgctcaaacccttacccgcgacgaaaaaaaaaaaacgcgcccccgacaaacgaataaaatctataaacaatcgcgaactcgcgaacgacgacacctcctccactccgacgaacccgaattcgaccgaccgcccatcgaactaccgactaactaacgcgcctcgctacccccgcctccgcctacgccccgcccaacttcatctctccctccgctccccgaactcgcgaacaaacgaaaacgcctctctttccccgcccctcgcctcgaccctttctcttcccaacacctcgactattccccgacgacgacaacgacaacgacgacccacacaacaacgaaaaacgaaaaaaaactacctcgaaaaaactacctcgaaaataaaatacaaacccaaccaaacgcgaacctacgaccccgaaaaattcaaaaaacgaacgacgtacctatacttccgaaacgaacgcgaaaacgaaatcctattaataaataacaaccgatacccgaaccgctaaatcgtaccgaacgaaaacataaaacccgaaaaaaaaccgaacgatacgacgatccgaaaaatatacgaaaaaacgaaaatcaaaaaaaaattaaaccgactcctaaacgtcttcgaacaaaaccaaaatcgcaaacacaaaacgtacgtatatatactaactatcacgaaactactaaaaaattaaaaaaattcgattaacattaaaaaaaaacgaaaataattcaaaatcgaaaa

SEQ ID NO: 34019 - DNA, 1228 bp, Artificial Sequence
  chemically treated genomic DNA (Homo sapiens) CpG-island No: 34019
  unsure (429, 455)
tgggaatttgttgaagaaataaaattgtattatgtgatttagtaaggatgcgcggttattttgttaagaatttcgtgggtcgttttgataatatcggggtttaggttttatgagtaagttagaatggtttatcgtgggggaggatgatgacgacgatgtttttgtttttgtcgtgtgtaaaacggttgcgtgtgggtttcgtgtagcgcggtggggagggagaggagaaacgttttgtcgcgttatagtcgcgtttgggttaaaggtatacgtggaggtagtcggttaaagttataatgcggtgtattttatagtgcgcgaacgacgttttcggtttttaggggtgcggggcgtttgcgtagtgggttcgaggcgtcgcgcgttgcgggagttaggagattttcgttttcgttttttgtttttcgtcgngaacgcgtacgtgaacgggagcgcgnacgcgttcgttaatgcgttttatttcgtttaaatttttattcgcggcggagggagggagacgcgttttcgataagcgagtggggtttgtggatagtcgcgggttcgcgggcggcggtattttttttatttcggcgggttcgggttcggtcggtcgtttatcggattgtcgattggttgacgcgtttcgttgttttcgttttcgtttgcgtttcgtttagttttattttttttttcgtttttcgggttcgcgggtagacggaggcgttttttttttttcgtttttcgtttcggttttttttttttttagtatttcggttgtttttcggcggcggtagcggtagcggcggtttatatagtagcgagaggcgagaggaggttgtttcgaggaggttgtttcgaggatgaagtgtaaatttaattagacgcggatttacgatttcgaggggtttaagaagcgggcggcgtgtttgtgttttcggagcgaacgcgaggacgaggttttgttagtgagtagtagtcggtattcggatcgttggatcgtgtcgggcgggggtatggagttcgaggaggagtcgggcggtgcggcggttcgagaggtgtacgaagaagcgggagttaaggggaagttaggtcggtttttgggcgttttcgaatagaattaggatcgtaagtatagaacgtacgtgtatgtattgattgttacggagttgttggaggattgggaagattcggttagtattgggaggaagcgagagtggtttaaagtcgaaga

SEQ ID NO: 34020 - DNA, 1228 bp, Artificial Sequence
  chemically treated genomic DNA (Homo sapiens) CpG-island No: 34020
  unsure (774, 800)
tcttcgactttaaaccactctcgcttcctcccaatactaaccgaatcttcccaatcctccaacaactccgtaacaatcaatacatacacgtacgttctatacttacgatcctaattctattcgaaaacgcccaaaaaccgacctaacttccccttaactcccgcttcttcgtacacctctcgaaccgccgcaccgcccgactcctcctcgaactccatacccccgcccgacacgatccaacgatccgaataccgactactactcactaacaaaacctcgtcctcgcgttcgctccgaaaacacaaacacgccgcccgcttcttaaacccctcgaaatcgtaaatccgcgtctaattaaatttacacttcatcctcgaaacaacctcctcgaaacaacctcctctcgcctctcgctactatataaaccgccgctaccgctaccgccgccgaaaaacaaccgaaatactaaaaaaaaaaaaaaccgaaacgaaaaacgaaaaaaaaaaaacgcctccgtctacccgcgaacccgaaaaacgaaaaaaaaaataaaactaaacgaaacgcaaacgaaaacgaaaacaacgaaacgcgtcaaccaatcgacaatccgataaacgaccgaccgaacccgaacccgccgaaataaaaaaaataccgccgcccgcgaacccgcgactatccacaaaccccactcgcttatcgaaaacgcgtctccctccctccgccgcgaataaaaatttaaacgaaataaaacgcattaacgaacgcgtncgcgctcccgttcacgtacgcgttcncgacgaaaaacaaaaaacgaaaacgaaaatctcctaactcccgcaacgcgcgacgcctcgaacccactacgcaaacgccccgcacccctaaaaaccgaaaacgtcgttcgcgcactataaaatacaccgcattataactttaaccgactacctccacgtatacctttaacccaaacgcgactataacgcgacaaaacgtttctcctctccctccccaccgcgctacacgaaacccacacgcaaccgttttacacacgacaaaaacaaaaacatcgtcgtcatcatcctcccccacgataaaccattctaacttactcataaaacctaaaccccgatattatcaaaacgacccacgaaattcttaacaaaataaccgcgcatccttactaaatcacataatacaattttatttcttcaacaaattccca

SEQ ID NO: 34021 - DNA, 596 bp, Artificial Sequence
  chemically treated genomic DNA (Homo sapiens) CpG-island No: 34021
  unsure (568)
tttgtattttattttcgaggtagttttttttcgtttttcgttgttgtgtgggtcgtcgacgtagttgttgtcgttgtcgggtagtagtcgaggtgttgggaagagaaagggtcgaggagaggggcggggagagagaggcgttttcgtttgtcgtttgttttcgagttcggggagcggagggagagatgaagttgggcggggtacgggcggaggcgggggtaagcgaggcgtgttagttagttagttcgttagttcgatgggcggtcggtcgaattcgggttcgtcggagtggaggaggcgttgttgttcgcgagttcgcgattttttatagagtttattcgtttttgcgaggtgaagcgtattttcgggcgcgttcgcgttttcgtttacgtgcgcgttcgtaggggagggcgtgggttgaggggcgaggaatcggggcgaggggttaggggcgggggttttttggttttcgtagcgcgtaacgtttggggtttattgcgtaggcgtttcgtatttttggggttaggaatttttttggcgtatagcgaaatttatcgtattgtgattntggttaagattgtttttatgtgtgtttt

SEQ ID NO: 34022 - DNA, 596 bp, Artificial Sequence
  chemically treated genomic DNA (Homo sapiens) CpG-island No: 34022
  unsure (29)
aaaacacacataaaaacaatcttaaccanaatcacaatacgataaatttcgctatacgccaaaaaaattcctaaccccaaaaatacgaaacgcctacgcaataaaccccaaacgttacgcgctacgaaaaccaaaaaacccccgcccctaacccctcgccccgattcctcgcccctcaacccacgccctcccctacgaacgcgcacgtaaacgaaaacgcgaacgcgcccgaaaatacgcttcacctcgcaaaaacgaataaactctataaaaaatcgcgaactcgcgaacaacaacgcctcctccactccgacgaacccgaattcgaccgaccgcccatcgaactaacgaactaactaactaacacgcctcgcttacccccgcctccgcccgtaccccgcccaacttcatctctccctccgctccccgaactcgaaaacaaacgacaaacgaaaacgcctctctctccccgcccctctcctcgaccctttctcttcccaacacctcgactactacccgacaacgacaacaactacgtcgacgacccacacaacaacgaaaaacgaaaaaaaactacctcgaaaataaaatacaaa

SEQ ID NO: 34023 - DNA, 596 bp, Artificial Sequence
  chemically treated genomic DNA (Homo sapiens) CpG-island No: 34023
  unsure (29)
aaggtatatatggaggtagttttggttanagttataatgcggtgaatttcgttgtgcgttaaggaggtttttggttttaggagtgcgaagcgtttgcgtagtgggttttaggcgttgcgcgttgcgggagttaggagattttcgtttttggtttttcgtttcggtttttcgttttttagtttacgtttttttttgcgaacgcgtacgtgaacgggagcgcggacgcgttcgagaatgcgttttatttcgtagaagcgggtgggttttgtggagagtcgcgggttcgcgggtagtagcgttttttttatttcggcgggttcgggttcggtcggtcgtttatcggattggcggattggttgattgatacgtttcgtttgttttcgttttcgttcgtgtttcgtttagttttattttttttttcgtttttcgggttcgggggtagacggtagacggaggcgttttttttttttcgttttttttttcggttttttttttttttagtatttcggttgttgttcggtagcggtagtagttgcgtcggcggtttatatagtagcgagaggcgagaggaggttgtttcgaggatgaagtgtaaa

SEQ ID NO: 34024 - DNA, 596 bp, Artificial Sequence
  chemically treated genomic DNA (Homo sapiens) CpG-island No: 34024
  unsure (568)
tttacacttcatcctcgaaacaacctcctctcgcctctcgctactatataaaccgccgacgcaactactaccgctaccgaacaacaaccgaaatactaaaaaaaaaaaaaaccgaaaaaaaaaacgaaaaaaaaaaaacgcctccgtctaccgtctacccccgaacccgaaaaacgaaaaaaaaaataaaactaaacgaaacacgaacgaaaacgaaaacaaacgaaacgtatcaatcaaccaatccgccaatccgataaacgaccgaccgaacccgaacccgccgaaataaaaaaaacgctactacccgcgaacccgcgactctccacaaaacccacccgcttctacgaaataaaacgcattctcgaacgcgtccgcgctcccgttcacgtacgcgttcgcaaaaaaaaacgtaaactaaaaaacgaaaaaccgaaacgaaaaaccaaaaacgaaaatctcctaactcccgcaacgcgcaacgcctaaaacccactacgcaaacgcttcgcactcctaaaaccaaaaacctccttaacgcacaacgaaattcaccgcattataactntaaccaaaactacctccatatatacctt

SEQ ID NO: 34025 - DNA, 651 bp, Artificial Sequence
  chemically treated genomic DNA (Homo sapiens) CpG-island No: 34025
tagcgattttggtattgtgcgtcgttgagtttttttggcgggcgttcgtttttttcgcgtttggttttgatttttgtttatttcggtgttgtttatttcggttcggattcggtcgtagagcggggttttggtttgtcgggtttcgagattgtgtttttattcgcgttttcggtcgttcgcgttttcgcgttcgggttttcgggggtcgttttatttgtatgttcggagttttcgggtcgattttcgtgtttaggattgcgatgagtatttttcgtttattatatttcgggtagcggtagaggaaggaggcggtttcggttttttttttcggtaggagatcgtgaaaagggaagggttttttagtcgtagcggtggttatggacgtaggatggaggacgaggaagcggtaaattgttaggttgcgcgcggattagtagcgcgaggatattcgtgcggtttcgggtcggaggcgggggcgaggggcggggtcggttcgttttttattaatttcggtttgttagggagcggtggttaattacgtgttgttacgtaagttaacggcgtcgtttttaggagttaggttcgagtattgttcgggttgtagtgaagggggaggagtttgaggatattattggagggttcggatttcga

SEQ ID NO: 34026 - DNA, 651 bp, Artificial Sequence
  chemically treated genomic DNA (Homo sapiens) CpG-island No: 34026
tcgaaatccgaaccctccaataatatcctcaaactcctcccccttcactacaacccgaacaatactcgaacctaactcctaaaaacgacgccgttaacttacgtaacaacacgtaattaaccaccgctccctaacaaaccgaaattaataaaaaacgaaccgaccccgcccctcgcccccgcctccgacccgaaaccgcacgaatatcctcgcgctactaatccgcgcgcaacctaacaatttaccgcttcctcgtcctccatcctacgtccataaccaccgctacgactaaaaaacccttcccttttcacgatctcctaccgaaaaaaaaaaccgaaaccgcctccttcctctaccgctacccgaaatataataaacgaaaaatactcatcgcaatcctaaacacgaaaatcgacccgaaaactccgaacatacaaataaaacgacccccgaaaacccgaacgcgaaaacgcgaacgaccgaaaacgcgaataaaaacacaatctcgaaacccgacaaaccaaaaccccgctctacgaccgaatccgaaccgaaataaacaacaccgaaataaacaaaaatcaaaaccaaacgcgaaaaaaacgaacgcccgccaaaaaaactcaacgacgcacaataccaaaatcgcta

SEQ ID NO: 34027 - DNA, 651 bp, Artificial Sequence
  chemically treated genomic DNA (Homo sapiens) CpG-island No: 34027
tcgagattcgaattttttagtaatgtttttagatttttttttttttattgtagttcgggtaatattcgggtttagtttttgagagcggcgtcgttggtttacgtagtagtacgtgattggttatcgttttttggtaggtcgggattggtggaagacgggtcgatttcgtttttcgttttcgttttcggttcgaggtcgtacgggtgttttcgcgttgttagttcgcgcgtagtttggtagtttgtcgttttttcgttttttattttgcgtttatggttatcgttgcgattgaggagtttttttttttttacggttttttgtcgaagaaggagatcggagtcgttttttttttttgtcgttattcggagtatgatgggcggggggtgtttatcgtagttttggatacgggggtcgattcgggggtttcgggtatgtaggtgaggcggttttcgagggttcgggcgcgggggcgcgggcggtcggggacgcgggtggggatatagtttcggagttcggtaggttaaagtttcgttttgcggtcgagttcgggtcggggtgggtagtatcggggtgggtagaggttagagttaggcgcgggagggacgggcgttcgttaaggggatttaacggcgtatagtgttagggtcgttg

SEQ ID NO: 34028 - DNA, 651 bp, Artificial Sequence
  chemically treated genomic DNA (Homo sapiens) CpG-island No: 34028
caacgaccctaacactatacgccgttaaatccccttaacgaacgcccgtccctcccgcgcctaactctaacctctacccaccccgatactacccaccccgacccgaactcgaccgcaaaacgaaactttaacctaccgaactccgaaactatatccccacccgcgtccccgaccgcccgcgcccccgcgcccgaaccctcgaaaaccgcctcacctacatacccgaaacccccgaatcgacccccgtatccaaaactacgataaacaccccccgcccatcatactccgaataacgacaaaaaaaaaaaacgactccgatctccttcttcgacaaaaaaccgtaaaaaaaaaaaaactcctcaatcgcaacgataaccataaacgcaaaataaaaaacgaaaaaacgacaaactaccaaactacgcgcgaactaacaacgcgaaaacacccgtacgacctcgaaccgaaaacgaaaacgaaaaacgaaatcgacccgtcttccaccaatcccgacctaccaaaaaacgataaccaatcacgtactactacgtaaaccaacgacgccgctctcaaaaactaaacccgaatattacccgaactacaataaaaaaaaaaaaatctaaaaacattactaaaaaattcgaatctcga

SEQ ID NO: 34029 - DNA, 1244 bp, Artificial Sequence
  chemically treated genomic DNA (Homo sapiens) CpG-island No: 34029
agttatagcggtgcgaacgagaggcggaagcgagaggcgtattaagtaaagttcggtgtttgcgttcggcgtttgtggcgttgtcgggagttaggtggttcgttcgagtcggaattttaggagtagcgggtgcggagttagagcggagttcgttagggattggtttcggcgaatattcggagcgcgaacgaagttcgaagggttcggtaacggatcggtcggtcggtttaggagggcgcgagcgaggtagggagcggcgtggagcgggtagcgggcggacgggcgggagcggagcggcgcggggcgaggggagcggagcggagcgcggcggcggggttcgtacggcggcgttgaggggcgtagagttgcgtcgaatcgagacggtcggtttggagtgcgagtcgggcggtcgtcggcgcggagtgaagtggtacggagtcgagggtagttgaggggttcgatattatgaggagtgcggcgtcgtcgtcgtagtcgttatcgttttagtgtttcgtatcgtttttagtcgggacgtcgggtagcgtttagcgggtcgggcggcggcgttcgggttgagagcgacggagcgcgggagcggcgcggagacggtattagagcgtttcgcgatttcggtttgagcggggtatcgcgtcggtcggtttgttttattatgtagttttcgaggtagagtttggacggcgtcgaggagcgtagagcggcgcgtagttcgttcgttttagacggtcgtttggtttcgcgtttgtttgttttttttagttcggatttttttgaaatatgtttaggggcgtttggatgtggttcgggaaagacgtcgtcgcgttgattatttgttgttgttgttgttgttgggtttttaggtcgagcgataaattttgcgtcgatttcgagcgggcgtagcgatggcgattgtttttggcgtttttgtttttttttatcgtgttgttcgttgattatttgtggttgtgcgcgggggttcggtttcgggttagggagttgagtagcgttatgcggtttttatggggggtcggtcgggagcggtagtcggtgttttttcgcgcggtgttgacgttgtcgtcgtcgtcgttcggcgagtttaatagcgtttttaggtatttgcggttttagatatagtaatttgattaaagtcgtttttttcggcggttttcggtcggtttgtcgcggcgttttagagtttatcgggttggacgtagtttgtattaaat

SEQ ID NO: 34030 - DNA, 1244 bp, Artificial Sequence
  chemically treated genomic DNA (Homo sapiens) CpG-island No: 34030
atttaatacaaactacgtccaacccgataaactctaaaacgccgcgacaaaccgaccgaaaaccgccgaaaaaaacgactttaatcaaattactatatctaaaaccgcaaatacctaaaaacgctattaaactcgccgaacgacgacgacgacaacgtcaacaccgcgcgaaaaaacaccgactaccgctcccgaccgaccccccataaaaaccgcataacgctactcaactccctaacccgaaaccgaacccccgcgcacaaccacaaataatcaacgaacaacacgataaaaaaaaacaaaaacgccaaaaacaatcgccatcgctacgcccgctcgaaatcgacgcaaaatttatcgctcgacctaaaaacccaacaacaacaacaacaacaaataatcaacgcgacgacgtctttcccgaaccacatccaaacgcccctaaacatatttcaaaaaaatccgaactaaaaaaaacaaacaaacgcgaaaccaaacgaccgtctaaaacgaacgaactacgcgccgctctacgctcctcgacgccgtccaaactctacctcgaaaactacataataaaacaaaccgaccgacgcgataccccgctcaaaccgaaatcgcgaaacgctctaataccgtctccgcgccgctcccgcgctccgtcgctctcaacccgaacgccgccgcccgacccgctaaacgctacccgacgtcccgactaaaaacgatacgaaacactaaaacgataacgactacgacgacgacgccgcactcctcataatatcgaacccctcaactaccctcgactccgtaccacttcactccgcgccgacgaccgcccgactcgcactccaaaccgaccgtctcgattcgacgcaactctacgcccctcaacgccgccgtacgaaccccgccgccgcgctccgctccgctcccctcgccccgcgccgctccgctcccgcccgtccgcccgctacccgctccacgccgctccctacctcgctcgcgccctcctaaaccgaccgaccgatccgttaccgaacccttcgaacttcgttcgcgctccgaatattcgccgaaaccaatccctaacgaactccgctctaactccgcacccgctactcctaaaattccgactcgaacgaaccacctaactcccgacaacgccacaaacgccgaacgcaaacaccgaactttacttaatacgcctctcgcttccgcctctcgttcgcaccgctataact

SEQ ID NO: 34031 - DNA, 1244 bp, Artificial Sequence
  chemically treated genomic DNA (Homo sapiens) CpG-island No: 34031
atttggtgtaagttgcgtttagttcggtgggttttggagcgtcgcggtagatcggtcgagagtcgtcggagggggcggttttggttaggttgttgtatttggggtcgtaggtgtttgggggcgttgttgggttcgtcgggcggcggcggcggtaacgttagtatcgcgcgaggaggtatcggttgtcgttttcggtcggttttttatgggggtcgtatggcgttgtttagttttttggttcggggtcgggttttcgcgtatagttatagatggttagcgagtagtacggtgaagaagagtagggacgttagggatagtcgttatcgttgcgttcgttcggagtcggcgtaaggtttgtcgttcggtttgggagtttagtagtagtagtagtagtagatagttagcgcggcggcgtttttttcgggttatatttaagcgtttttgaatatattttaggggggttcgggttggagggaataggtaggcgcgaggttagacggtcgtttggggcgggcgggttgcgcgtcgttttgcgtttttcggcgtcgtttaggttttatttcgggggttgtatggtgaggtaggtcggtcggcgcgatgtttcgtttaggtcggagtcgcggggcgttttggtgtcgttttcgcgtcgttttcgcgtttcgtcgtttttagttcgggcgtcgtcgttcggttcgttaggcgttgttcggcgtttcggttgggggcggtgcggggtattggggcggtggcggttgcggcggcggcgtcgtattttttatagtgtcgggttttttagttgttttcggtttcgtgttattttatttcgcgtcggcggtcgttcggttcgtattttaaatcggtcgtttcggttcggcgtagttttgcgttttttagcgtcgtcgtgcgggtttcgtcgtcgcgtttcgtttcgtttttttcgtttcgcgtcgtttcgttttcgttcgttcgttcgttgttcgttttacgtcgttttttgtttcgttcgcgtttttttaggtcggtcggtcggttcgttgtcgggtttttcgggtttcgttcgcgtttcgggtgttcgtcggggttagtttttggcgggtttcgttttggtttcgtattcgttgtttttggagtttcggttcgggcgggttatttggttttcggtagcgttataggcgtcggacgtagatatcgggttttatttagtgcgtttttcgttttcgtttttcgttcgtatcgttgtggtt

SEQ ID NO: 34032 - DNA, 1244 bp, Artificial Sequence
  chemically treated genomic DNA (Homo sapiens) CpG-island No: 34032
aaccacaacgatacgaacgaaaaacgaaaacgaaaaacgcactaaataaaacccgatatctacgtccgacgcctataacgctaccgaaaaccaaataacccgcccgaaccgaaactccaaaaacaacgaatacgaaaccaaaacgaaacccgccaaaaactaaccccgacgaacacccgaaacgcgaacgaaacccgaaaaacccgacaacgaaccgaccgaccgacctaaaaaaacgcgaacgaaacaaaaaacgacgtaaaacgaacaacgaacgaacgaacgaaaacgaaacgacgcgaaacgaaaaaaacgaaacgaaacgcgacgacgaaacccgcacgacgacgctaaaaaacgcaaaactacgccgaaccgaaacgaccgatttaaaatacgaaccgaacgaccgccgacgcgaaataaaataacacgaaaccgaaaacaactaaaaaacccgacactataaaaaatacgacgccgccgccgcaaccgccaccgccccaataccccgcaccgcccccaaccgaaacgccgaacaacgcctaacgaaccgaacgacgacgcccgaactaaaaacgacgaaacgcgaaaacgacgcgaaaacgacaccaaaacgccccgcgactccgacctaaacgaaacatcgcgccgaccgacctacctcaccatacaacccccgaaataaaacctaaacgacgccgaaaaacgcaaaacgacgcgcaacccgcccgccccaaacgaccgtctaacctcgcgcctacctattccctccaacccgaacccccctaaaatatattcaaaaacgcttaaatataacccgaaaaaaacgccgccgcgctaactatctactactactactactactaaactcccaaaccgaacgacaaaccttacgccgactccgaacgaacgcaacgataacgactatccctaacgtccctactcttcttcaccgtactactcgctaaccatctataactatacgcgaaaacccgaccccgaaccaaaaaactaaacaacgccatacgacccccataaaaaaccgaccgaaaacgacaaccgatacctcctcgcgcgatactaacgttaccgccgccgccgcccgacgaacccaacaacgcccccaaacacctacgaccccaaatacaacaacctaaccaaaaccgccccctccgacgactctcgaccgatctaccgcgacgctccaaaacccaccgaactaaacgcaacttacaccaaat

SEQ ID NO: 34033 - DNA, 536 bp, Artificial Sequence
  chemically treated genomic DNA (Homo sapiens) CpG-island No: 34033
ttttcgggtttcgcgagataaagggcggtgttttataaaggcggcggcggcggcggcgcggtgtttaggcgagggcgtatacggtcggcgagggcgacggttacggcgacgacgcgggttttttgcgaggaggtgcgtggatttcggggggatatgggcgtaattagggtcgggttcgtgggtttgcgggtttttcgttgagttatatttattcgggagagtaggaatgcggcggagatttggtagcggttatcgagttaattcggtgggaagatcgggggatttttcgcggggtaggggcggtggtttagtttcgggggtgttaggtcgattttttagcgtgttggcgggttcgcgtcgtttttatgcgtgatgtcggggatttttttgtatcgttttcggcggcgtattttttagagttttttaaggagttcgcgcgttttcgagcgattttcggatatttggtagattcgaaattttagttattagatgtttttttggattttttaaatatttaattattaggtaaggtaatg

SEQ ID NO: 34034 - DNA, 536 bp, Artificial Sequence
  chemically treated genomic DNA (Homo sapiens) CpG-island No: 34034
cattaccttacctaataattaaatatttaaaaaatccaaaaaaacatctaataactaaaatttcgaatctaccaaatatccgaaaatcgctcgaaaacgcgcgaactccttaaaaaactctaaaaaatacgccgccgaaaacgatacaaaaaaatccccgacatcacgcataaaaacgacgcgaacccgccaacacgctaaaaaatcgacctaacacccccgaaactaaaccaccgcccctaccccgcgaaaaatcccccgatcttcccaccgaattaactcgataaccgctaccaaatctccgccgcattcctactctcccgaataaatataactcaacgaaaaacccgcaaacccacgaacccgaccctaattacgcccatatccccccgaaatccacgcacctcctcgcaaaaaacccgcgtcgtcgccgtaaccgtcgccctcgccgaccgtatacgccctcgcctaaacaccgcgccgccgccgccgccgcctttataaaacaccgccctttatctcgcgaaacccgaaaa

SEQ ID NO: 34035 - DNA, 536 bp, Artificial Sequence
  chemically treated genomic DNA (Homo sapiens) CpG-island No: 34035
tattgttttgtttaatgattaagtatttagggagtttaggaaagtatttagtggttgaagtttcgaatttgttaggtgttcgggagtcgttcggggacgcgcgagttttttgaagggttttgggagatgcgtcgtcgagagcggtataagggggttttcggtattacgtataaaagcgacgcgggttcgttaatacgttagagagtcggtttagtattttcggagttgagttatcgtttttgtttcgcggaaagtttttcggtttttttatcgaattggttcggtggtcgttattaagttttcgtcgtatttttgttttttcgggtgagtatggtttagcgagagattcgtaggtttacgagttcggttttggttgcgtttatgttttttcggagtttacgtattttttcgtaaagagttcgcgtcgtcgtcgtagtcgtcgttttcgtcggtcgtgtgcgttttcgtttggatatcgcgtcgtcgtcgtcgtcgtttttataggatatcgttttttgtttcgcggggttcggggg

SEQ ID NO: 34036 - DNA, 536 bp, Artificial Sequence
  chemically treated genomic DNA (Homo sapiens) CpG-island No: 34036
cccccgaaccccgcgaaacaaaaaacgatatcctataaaaacgacgacgacgacgacgcgatatccaaacgaaaacgcacacgaccgacgaaaacgacgactacgacgacgacgcgaactctttacgaaaaaatacgtaaactccgaaaaaacataaacgcaaccaaaaccgaactcgtaaacctacgaatctctcgctaaaccatactcacccgaaaaaacaaaaatacgacgaaaacttaataacgaccaccgaaccaattcgataaaaaaaccgaaaaactttccgcgaaacaaaaacgataactcaactccgaaaatactaaaccgactctctaacgtattaacgaacccgcgtcgcttttatacgtaataccgaaaacccccttataccgctctcgacgacgcatctcccaaaacccttcaaaaaactcgcgcgtccccgaacgactcccgaacacctaacaaattcgaaacttcaaccactaaatactttcctaaactccctaaatacttaatcattaaacaaaacaata

SEQ ID NO: 34037 - DNA, 531 bp, Artificial Sequence
  chemically treated genomic DNA (Homo sapiens) CpG-island No: 34037
cgtgttcgttgaggaacggtagttgggggcgtgcgtcggtgttcgtgtgcgtgtcgaaagcgtaggcgatttggtttttttgttggttgtacgtgtttacggtatataggatgtcgtatattaggaagtagttttcgtaggagtttcgtcgtagtcgtgttttttacgtggtttttcggtgtacggagagatcgtcggggtttaagcgatttaggacgattatttcgggttgggttttatcgcggtcgtttacggcggggtagatgatttataggtcgttttcgtttacggtaaagttaatgttcgagtgttcgcgttatttttaaggtgtggtgtttttatatattacgtcgggtagtagcgtttaggaggttacgaagcgttgtcgtaggtcgtatttgatgatgtttttggtgaaggcgcggttgtagtagaaggcgttttggtatattacgtggtttgtgtcgatttagttgtagggtagtttgtatatgttattttagcggtttgtaggcgagggcgatggttatt

SEQ ID NO: 34038 - DNA, 531 bp, Artificial Sequence
  chemically treated genomic DNA (Homo sapiens) CpG-island No: 34038
aataaccatcgccctcgcctacaaaccgctaaaataacatatacaaactaccctacaactaaatcgacacaaaccacgtaatataccaaaacgccttctactacaaccgcgccttcaccaaaaacatcatcaaatacgacctacgacaacgcttcgtaacctcctaaacgctactacccgacgtaatatataaaaacaccacaccttaaaaataacgcgaacactcgaacattaactttaccgtaaacgaaaacgacctataaatcatctaccccgccgtaaacgaccgcgataaaacccaacccgaaataatcgtcctaaatcgcttaaaccccgacgatctctccgtacaccgaaaaaccacgtaaaaaacacgactacgacgaaactcctacgaaaactacttcctaatatacgacatcctatataccgtaaacacgtacaaccaacaaaaaaaccaaatcgcctacgctttcgacacgcacacgaacaccgacgcacgcccccaactaccgttcctcaacgaacacg

SEQ ID NO: 34039 - DNA, 531 bp, Artificial Sequence
  chemically treated genomic DNA (Homo sapiens) CpG-island No: 34039
ggtgattatcgttttcgtttgtaggtcgttggagtaatatgtataagttattttataattggatcggtataggttacgtggtgtattagggcgttttttattataatcgcgtttttattaagaatattattaagtacgatttacggtagcgtttcgtggttttttgggcgttgttgttcgacgtggtatatgaggatattatattttggaagtggcgcggatattcggatattgattttgtcgtggacgagagcggtttgtgggttatttatttcgtcgtggacgatcgcgatgaggtttagttcgaggtgatcgttttgagtcgtttggatttcggcgattttttcgtgtatcgggagattacgtggaagatacggttgcggcggaatttttacgggaattgttttttggtgtgcggtattttgtatgtcgtggatacgtataattagtaggaaggttaggtcgtttacgttttcgatacgtatacgggtatcgacgtacgtttttagttgtcgttttttaacgagtacg

SEQ ID NO: 34040 - DNA, 531 bp, Artificial Sequence
  chemically treated genomic DNA (Homo sapiens) CpG-island No: 34040
cgtactcgttaaaaaacgacaactaaaaacgtacgtcgatacccgtatacgtatcgaaaacgtaaacgacctaaccttcctactaattatacgtatccacgacatacaaaataccgcacaccaaaaaacaattcccgtaaaaattccgccgcaaccgtatcttccacgtaatctcccgatacacgaaaaaatcgccgaaatccaaacgactcaaaacgatcacctcgaactaaacctcatcgcgatcgtccacgacgaaataaataacccacaaaccgctctcgtccacgacaaaatcaatatccgaatatccgcgccacttccaaaatataatatcctcatataccacgtcgaacaacaacgcccaaaaaaccacgaaacgctaccgtaaatcgtacttaataatattcttaataaaaacgcgattataataaaaaacgccctaatacaccacgtaacctataccgatccaattataaaataacttatacatattactccaacgacctacaaacgaaaacgataatcacc

SEQ ID NO: 34041 - DNA, 1190 bp, Artificial Sequence
  chemically treated genomic DNA (Homo sapiens) CpG-island No: 34041
gtttcgcgcgtttgtcgtcgtttattttcggcgcgtatttggtagtttcgggttcgagtttcgttttgtcgttagttaggtgagaggggttaggtttcgttttcgtcggtttcgtttcgttttattgcgtttgcgtagtcggtcgtcggcgttaggcgtcggggcggcgcggtcgtcgtagttcggcgggcgtagtgcgcgtgcgttttgattgttggggggcgggcggcgttcgcggcgagggagcgggggcggggaggcgtcgtttggtttaggttggggtcggcgggagcgcgaacgagcgacggcggaattcgtgggtttgtggattgtagtttcggcggttagtaggtgaggttcgcgtagggcgggcgtgggtcgtgagggagtgcgggttgcgggcgggttagcggtgcggcggtttgttcgggggcgtaggtgagcgcggttcgcgcggggttcggcggagtattgtttagcgggcggcgttcgtatagcgttttttgtcggttgggtcgcggcggggattcgggttgggcgggtttgggtttcggggcgggcgcgcgtttttttgttcgtcggtttttattttttcgtgtttttattttcgtcgtttttcgttaatatggtcgttattttttcgtttttagtttttcggtcgtcgtcggttttttagcgcgcgttttgtttggagtcgggcggggaggtcggcgggtagggggcggcggcgttgcgtagtcgggcgcggggagggggcgttgcgttagaatgtaggcggggagggggaacgttgtataatttcgggtcggcgacgggggcggggcggggggaggggcgggatttcggcgcgacgggtcgggttatttcggggacgcgggtttgttttggggttattttttttaggttcgggggatggtcgcggattttgtaagttgtaggtttcgcggttcgcggcgtcggaacgtttatcggttagttttcgcgttcgcgtagttttttttttgatgcgtcgttttttcgtcgtttttcgtgggggcgcggcgaacgggttgcgtgttttggagagagataggtattttttttttttatcgtgagtgattttgggtgtattcgttaaggaatgtgttgaaacgaattgtgcgatgcgggaattgcgtagcgtttcgggtttggttttttcgagtatttta

SEQ ID NO: 34042 - DNA, 1190 bp, Artificial Sequence
  chemically treated genomic DNA (Homo sapiens) CpG-island No: 34042
taaaatactcgaaaaaaccaaacccgaaacgctacgcaattcccgcatcgcacaattcgtttcaacacattccttaacgaatacacccaaaatcactcacgataaaaaaaaaaaatacctatctctctccaaaacacgcaacccgttcgccgcgcccccacgaaaaacgacgaaaaaacgacgcatcaaaaaaaaaactacgcgaacgcgaaaactaaccgataaacgttccgacgccgcgaaccgcgaaacctacaacttacaaaatccgcgaccatcccccgaacctaaaaaaaataaccccaaaacaaacccgcgtccccgaaataacccgacccgtcgcgccgaaatcccgcccctccccccgccccgcccccgtcgccgacccgaaattatacaacgttccccctccccgcctacattctaacgcaacgccccctccccgcgcccgactacgcaacgccgccgccccctacccgccgacctccccgcccgactccaaacaaaacgcgcgctaaaaaaccgacgacgaccgaaaaactaaaaacgaaaaaataacgaccatattaacgaaaaacgacgaaaataaaaacacgaaaaaataaaaaccgacgaacaaaaaaacgcgcgcccgccccgaaacccaaacccgcccaacccgaatccccgccgcgacccaaccgacaaaaaacgctatacgaacgccgcccgctaaacaatactccgccgaaccccgcgcgaaccgcgctcacctacgcccccgaacaaaccgccgcaccgctaacccgcccgcaacccgcactccctcacgacccacgcccgccctacgcgaacctcacctactaaccgccgaaactacaatccacaaacccacgaattccgccgtcgctcgttcgcgctcccgccgaccccaacctaaaccaaacgacgcctccccgcccccgctccctcgccgcgaacgccgcccgccccccaacaatcaaaacgcacgcgcactacgcccgccgaactacgacgaccgcgccgccccgacgcctaacgccgacgaccgactacgcaaacgcaataaaacgaaacgaaaccgacgaaaacgaaacctaacccctctcacctaactaacgacaaaacgaaactcgaacccgaaactaccaaatacgcgccgaaaataaacgacgacaaacgcgcgaaac

SEQ ID NO: 34043 - DNA, 1190 bp, Artificial Sequence
  chemically treated genomic DNA (Homo sapiens) CpG-island No: 34043
taaaatgttcgagaaagttaaattcgaggcgttgcgtagttttcgtatcgtataattcgttttaatatattttttgacgaatatatttaaggttatttacgatggagaggaaaagtgtttgtttttttttagagtacgtaattcgttcgtcgcgtttttacggagggcggcgaagagacggcgtattaggaaaggggttgcgcgggcgcgaggattggtcggtgggcgtttcggcgtcgcgaatcgcggagtttgtaatttataaggttcgcggttatttttcgggtttgggaggggtggttttagggtaggttcgcgttttcggggtgattcgattcgtcgcgtcggggtttcgttttttttttcgtttcgttttcgtcgtcggttcgggattatgtaacgtttttttttttcgtttgtattttggcgtagcgtttttttttcgcgttcgattgcgtagcgtcgtcgttttttgttcgtcggttttttcgttcggttttaaataaagcgcgcgttaaggggtcggcggcggtcggggaattggggacgagagggtggcggttatgttggcggggggcggcggggatgggggtacggaggagtaggggtcggcgaataaaggagcgcgcgttcgtttcgaggtttaggttcgtttagttcgggttttcgtcgcggtttagtcggtagggggcgttatgcgggcgtcgttcgttggataatgtttcgtcgggtttcgcgcgggtcgcgtttatttgcgttttcgggtagatcgtcgtatcgttggttcgttcgtagttcgtatttttttacgatttacgttcgttttgcgcgggttttatttgttgatcgtcgaggttgtagtttataggtttacgggtttcgtcgtcgttcgttcgcgttttcgtcggttttagtttgagttagacggcgttttttcgttttcgttttttcgtcgcggacgtcgttcgttttttaatagttagggcgtacgcgtattgcgttcgtcgaattgcgacggtcgcgtcgtttcggcgtttggcgtcgacggtcgattgcgtaggcgtagtggggcggggcggggtcggcgagggcggggtttggttttttttatttggttggcggtagggcggggttcgagttcgggattgttaggtgcgcgtcgggaatgggcggcggtaggcgcgcggggt

SEQ ID NO: 34044 - DNA, 1190 bp, Artificial Sequence
  chemically treated genomic DNA (Homo sapiens) CpG-island No: 34044
accccgcgcgcctaccgccgcccattcccgacgcgcacctaacaatcccgaactcgaaccccgccctaccgccaaccaaataaaaaaaaccaaaccccgccctcgccgaccccgccccgccccactacgcctacgcaatcgaccgtcgacgccaaacgccgaaacgacgcgaccgtcgcaattcgacgaacgcaatacgcgtacgccctaactattaaaaaacgaacgacgtccgcgacgaaaaaacgaaaacgaaaaaacgccgtctaactcaaactaaaaccgacgaaaacgcgaacgaacgacgacgaaacccgtaaacctataaactacaacctcgacgatcaacaaataaaacccgcgcaaaacgaacgtaaatcgtaaaaaaatacgaactacgaacgaaccaacgatacgacgatctacccgaaaacgcaaataaacgcgacccgcgcgaaacccgacgaaacattatccaacgaacgacgcccgcataacgccccctaccgactaaaccgcgacgaaaacccgaactaaacgaacctaaacctcgaaacgaacgcgcgctcctttattcgccgacccctactcctccgtacccccatccccgccgccccccgccaacataaccgccaccctctcgtccccaattccccgaccgccgccgaccccttaacgcgcgctttatttaaaaccgaacgaaaaaaccgacgaacaaaaaacgacgacgctacgcaatcgaacgcgaaaaaaaaacgctacgccaaaatacaaacgaaaaaaaaaaacgttacataatcccgaaccgacgacgaaaacgaaacgaaaaaaaaaacgaaaccccgacgcgacgaatcgaatcaccccgaaaacgcgaacctaccctaaaaccacccctcccaaacccgaaaaataaccgcgaaccttataaattacaaactccgcgattcgcgacgccgaaacgcccaccgaccaatcctcgcgcccgcgcaacccctttcctaatacgccgtctcttcgccgccctccgtaaaaacgcgacgaacgaattacgtactctaaaaaaaaacaaacacttttcctctccatcgtaaataaccttaaatatattcgtcaaaaaatatattaaaacgaattatacgatacgaaaactacgcaacgcctcgaatttaactttctcgaacatttta

SEQ ID NO: 34045 - DNA, 550 bp, Artificial Sequence
  chemically treated genomic DNA (Homo sapiens) CpG-island No: 34045
gtaatcgggatgcggggacgatcgttatagcggttatagcggtaggcggggcgtagtcgttcgtatttattaggataagatgggaggacgcgtatacggcggggttttcgagcgcggttcgtcgttttagttcgtcggtttttcgtttattcgttttgaggttcgggttttggttcgtattggttgtcgttttcgttagtcgggttgggttcgggaggagattgagtcgttgtgagttcggcgtttcgagtttggcgttgttcggttttcgtcggtttttttttttgggttgtgcgttgtgcgttgggagcggggtcgtagcgcgtttagttttcgagttttttgttttacgttttttgggcgtagaggcgacgttggtagtcgttttttaggagattttttcgtagtgtggacgggggttaggatttgtaggcgagtaagggtagagaggagaaatcgtataggtcggtgacgcgtttaatttataaagtttgaaagtgttgttaattttggggttattttatgttgggtatcgtttttttaattattt

SEQ ID NO: 34046 - DNA, 550 bp, Artificial Sequence
  chemically treated genomic DNA (Homo sapiens) CpG-island No: 34046
aaataattaaaaaaacgatacccaacataaaataaccccaaaattaacaacactttcaaactttataaattaaacgcgtcaccgacctatacgatttctcctctctacccttactcgcctacaaatcctaacccccgtccacactacgaaaaaatctcctaaaaaacgactaccaacgtcgcctctacgcccaaaaaacgtaaaacaaaaaactcgaaaactaaacgcgctacgaccccgctcccaacgcacaacgcacaacccaaaaaaaaaaaccgacgaaaaccgaacaacgccaaactcgaaacgccgaactcacaacgactcaatctcctcccgaacccaacccgactaacgaaaacgacaaccaatacgaaccaaaacccgaacctcaaaacgaataaacgaaaaaccgacgaactaaaacgacgaaccgcgctcgaaaaccccgccgtatacgcgtcctcccatcttatcctaataaatacgaacgactacgccccgcctaccgctataaccgctataacgatcgtccccgcatcccgattac

SEQ ID NO: 34047 - DNA, 550 bp, Artificial Sequence
  chemically treated genomic DNA (Homo sapiens) CpG-island No: 34047
agataattggagaggcggtgtttagtataagatgattttaaagttgatagtatttttaggttttgtgaattaggcgcgttatcgatttgtacgattttttttttttgtttttgttcgtttgtaaattttgattttcgtttatattgcggagaaattttttaagagacggttgttagcgtcgtttttgcgtttaggaggcgtggagtaaaggattcgggagttgagcgcgttgcggtttcgtttttagcgtatagcgtatagtttagagggaggggtcggcgggggtcgggtagcgttagattcggagcgtcgggtttatagcggtttagttttttttcgaatttagttcggttggcgagagcggtagttagtgcgagttagagttcgggttttagagcgggtaggcggagggtcggcggattggagcggcgggtcgcgttcgggggtttcgtcgtgtgcgcgtttttttattttattttggtaagtgcgggcggttgcgtttcgtttgtcgttgtagtcgttgtggcggtcgttttcgtatttcggttgt

SEQ ID NO: 34048 - DNA, 550 bp, Artificial Sequence
  chemically treated genomic DNA (Homo sapiens) CpG-island No: 34048
acaaccgaaatacgaaaacgaccgccacaacgactacaacgacaaacgaaacgcaaccgcccgcacttaccaaaataaaataaaaaaacgcgcacacgacgaaacccccgaacgcgacccgccgctccaatccgccgaccctccgcctacccgctctaaaacccgaactctaactcgcactaactaccgctctcgccaaccgaactaaattcgaaaaaaaactaaaccgctataaacccgacgctccgaatctaacgctacccgacccccgccgacccctccctctaaactatacgctatacgctaaaaacgaaaccgcaacgcgctcaactcccgaatcctttactccacgcctcctaaacgcaaaaacgacgctaacaaccgtctcttaaaaaatttctccgcaatataaacgaaaatcaaaatttacaaacgaacaaaaacaaaaaaaaaaaatcgtacaaatcgataacgcgcctaattcacaaaacctaaaaatactatcaactttaaaatcatcttatactaaacaccgcctctccaattatct

SEQ ID NO: 34049 - DNA, 761 bp, Artificial Sequence
  chemically treated genomic DNA (Homo sapiens) CpG-island No: 34049
gggttttttcgcggtttatttttatgggtattaaagattacgatttcgataaagacgaaggggattaggttttgtttcgggagcgatcgttgttgtacgtggcggtatcgcgggttcgcgatgagtttgtcgtaagttggatcgattagtttagtttattgttgagcgtttttgtatcgttcgtggtagttagtatattttgagggcgatattcgaggttttgaatgtcggttaacggttgttcggaattattatttcggtgacgtgagaaagtaacgtttttttattgttatgggttgacgtagtcgattatattggcgcgcgtttcggcgaggcgtattagtttttgatcggcgttattttgcgattcgattatcgtagttagatttattttggtgaagcgaagattttggggtttttgtttgatcggtaagttttttggcgtatttatatacgttgttattgatttatttcggcggtaattcgttgtttttaatcgttttaagtattatgtcgattttgagttgattatcggtgattttgtcggagtatattaacgtaattttcgttttttcgtacgtttcgacgacgggaagaaagtgttgatttatttgggtcgataataggtttattattacgtcgtttattttgacgtttacgatcgttttttttgtcgttttgagttttttgataaacgattttagtttagttattattggtatagagtgttcgtcggtaagtagatttaataaagttttagt

SEQ ID NO: 34050 - DNA, 761 bp, Artificial Sequence
  chemically treated genomic DNA (Homo sapiens) CpG-island No: 34050
actaaaactttattaaatctacttaccgacgaacactctataccaataataactaaactaaaatcgtttatcaaaaaactcaaaacgacaaaaaaaacgatcgtaaacgtcaaaataaacgacgtaataataaacctattatcgacccaaataaatcaacactttcttcccgtcgtcgaaacgtacgaaaaaacgaaaattacgttaatatactccgacaaaatcaccgataatcaactcaaaatcgacataatacttaaaacgattaaaaacaacgaattaccgccgaaataaatcaataacaacgtatataaatacgccaaaaaacttaccgatcaaacaaaaaccccaaaatcttcgcttcaccaaaataaatctaactacgataatcgaatcgcaaaataacgccgatcaaaaactaatacgcctcgccgaaacgcgcgccaatataatcgactacgtcaacccataacaataaaaaaacgttactttctcacgtcaccgaaataataattccgaacaaccgttaaccgacattcaaaacctcgaatatcgccctcaaaatatactaactaccacgaacgatacaaaaacgctcaacaataaactaaactaatcgatccaacttacgacaaactcatcgcgaacccgcgataccgccacgtacaacaacgatcgctcccgaaacaaaacctaatccccttcgtctttatcgaaatcgtaatctttaatacccataaaaataaaccgcgaaaaaaccc

SEQ ID NO: 34051 - DNA, 761 bp, Artificial Sequence
  chemically treated genomic DNA (Homo sapiens) CpG-island No: 34051
attgaggttttgttgggtttgtttgtcggcgagtattttgtattagtggtagttgagttggagtcgtttattaagaagtttaagacgatagagaggacggtcgtaggcgttaaggtaggcggcgtgatggtgggtttgttgtcgatttaaatgagttagtatttttttttcgtcgtcgaagcgtgcgaggaaacgggaattacgttggtgtgtttcggtagaattatcggtaattagtttaaggtcgatatggtgtttgaggcggttaagggtagcgaattatcgtcggaatggattaatgataacgtgtataggtacgttaagaggtttgtcggttaagtaggagttttagaattttcgttttattagggtgaatttagttacgatgatcgggtcgtagagtgacgtcgattaagggttggtgcgtttcgtcgagacgcgcgttagtgtgatcggttacgttagtttatgataatgggaggacgttatttttttacgttatcgaggtggtgatttcgaatagtcgttagtcgatatttaaggtttcgggtgtcgtttttaagatgtgttggttgttacggacgatatagaagcgtttaataatgggttgggttggtcggtttaatttacgataagtttatcgcgggttcgcgatgtcgttacgtatagtagcgatcgttttcggagtagggtttgatttttttcgtttttatcgaagtcgtaatttttgatgtttatggggatagatcgcgaggagattt

SEQ ID NO: 34052 - DNA, 761 bp, Artificial Sequence
  chemically treated genomic DNA (Homo sapiens) CpG-island No: 34052
aaatctcctcgcgatctatccccataaacatcaaaaattacgacttcgataaaaacgaaaaaaatcaaaccctactccgaaaacgatcgctactatacgtaacgacatcgcgaacccgcgataaacttatcgtaaattaaaccgaccaacccaacccattattaaacgcttctatatcgtccgtaacaaccaacacatcttaaaaacgacacccgaaaccttaaatatcgactaacgactattcgaaatcaccacctcgataacgtaaaaaaataacgtcctcccattatcataaactaacgtaaccgatcacactaacgcgcgtctcgacgaaacgcaccaacccttaatcgacgtcactctacgacccgatcatcgtaactaaattcaccctaataaaacgaaaattctaaaactcctacttaaccgacaaacctcttaacgtacctatacacgttatcattaatccattccgacgataattcgctacccttaaccgcctcaaacaccatatcgaccttaaactaattaccgataattctaccgaaacacaccaacgtaattcccgtttcctcgcacgcttcgacgacgaaaaaaaaatactaactcatttaaatcgacaacaaacccaccatcacgccgcctaccttaacgcctacgaccgtcctctctatcgtcttaaacttcttaataaacgactccaactcaactaccactaatacaaaatactcgccgacaaacaaacccaacaaaacctcaat

SEQ ID NO: 34053 - DNA, 909 bp, Artificial Sequence
  chemically treated genomic DNA (Homo sapiens) CpG-island No: 34053
  unsure (292)
gcgcggagtagtttggaaatattttacgggagcggcgatttcggcgagggtattcgtttttttttcgggtcgcgtatcgggcgttgtttacgcgtaggtttttcgggggcgttcgggtgtttaggttatcggacgtgcgcgcgtttgacgcgcggttgtattgcgcgcgtttcgtaaatttggcgatttttttagttcggtcgggtattaacgcgggtcgttcgcggtgcggaaaaggcgtttttaaggaaggtcggtcggggtgcggggtttggaagggtttgggtatcgngcgcgtttatttttggggggtttcggcgtattcggagatcggcgtatttcgggcgtaggtttcgtgggggtgttcgttagtggggttcgtttttggttgattaggggtatcgacggtcgcgcgtgggtttttttcgtcgtgttgtttgcgggggacgaatggtttcgggagggggcgggaattagcggttcgggtttcgttttagttcgtgtgtagtttcgattcgaacggtttgggacgcgtttttattattcggcgttcggattttgcgcgtcgtttatcgttttcgtcgtttttagttttcgggcgggtagagtgggaagcgcggtttcgtatttttggtcggtttgcgtaggggtaaaggttatttcgtttttttttttcgggcgcggcgggaagggaggtgagtttgtggtcggtagtcgcgcgagggagtcgagttcggttcggttaattaatggggaggcgttcgggtcgtttagtttgtttttttgcgggtttagcgtagcggatttttcgggaggtgggaggcggcggttttatgggtgtttttaaatttggatgtgtgaggcgtatttaggagcggtagtgggaggcggttgagggttttttatgag

SEQ ID NO: 34054 - DNA, 909 bp, Artificial Sequence
  chemically treated genomic DNA (Homo sapiens) CpG-island No: 34054
  unsure (618)
ctcataaaaaaccctcaaccgcctcccactaccgctcctaaatacgcctcacacatccaaatttaaaaacacccataaaaccgccgcctcccacctcccgaaaaatccgctacgctaaacccgcaaaaaaacaaactaaacgacccgaacgcctccccattaattaaccgaaccgaactcgactccctcgcgcgactaccgaccacaaactcacctcccttcccgccgcgcccgaaaaaaaaaaacgaaataacctttacccctacgcaaaccgaccaaaaatacgaaaccgcgcttcccactctacccgcccgaaaactaaaaacgacgaaaacgataaacgacgcgcaaaatccgaacgccgaataataaaaacgcgtcccaaaccgttcgaatcgaaactacacacgaactaaaacgaaacccgaaccgctaattcccgccccctcccgaaaccattcgtcccccgcaaacaacacgacgaaaaaaacccacgcgcgaccgtcgatacccctaatcaaccaaaaacgaaccccactaacgaacacccccacgaaacctacgcccgaaatacgccgatctccgaatacgccgaaaccccccaaaaataaacgcgcncgatacccaaacccttccaaaccccgcaccccgaccgaccttccttaaaaacgccttttccgcaccgcgaacgacccgcgttaatacccgaccgaactaaaaaaatcgccaaatttacgaaacgcgcgcaatacaaccgcgcgtcaaacgcgcgcacgtccgataacctaaacacccgaacgcccccgaaaaacctacgcgtaaacaacgcccgatacgcgacccgaaaaaaaaacgaataccctcgccgaaatcgccgctcccgtaaaatatttccaaactactccgcgc

SEQ ID NO: 34055 - DNA, 909 bp, Artificial Sequence
  chemically treated genomic DNA (Homo sapiens) CpG-island No: 34055
  unsure (618)
tttatggagagtttttagtcgttttttattgtcgtttttgaatgcgttttatatatttagatttgaaagtatttatagggtcgtcgttttttatttttcgaggaattcgttgcgttgggttcgtagggaggtaggttggacggttcgggcgtttttttattggttggtcgggtcgggttcgattttttcgcgcggttgtcggttataggtttattttttttttcgtcgcgttcggggagaggaagcgaggtggtttttatttttgcgtaggtcggttaggaatgcggggtcgcgttttttattttattcgttcgagggttgaggacggcggaggcgataagcgacgcgtagagttcgggcgtcgagtggtggagacgcgttttaggtcgttcggatcggggttgtatacgggttggggcgaggttcgggtcgttggttttcgttttttttcggagttattcgtttttcgtagataatacgacgggagggatttacgcgcggtcgtcggtgtttttagttagttaaaagcgagttttattggcgggtatttttacgaggtttgcgttcgaggtgcgtcgattttcgggtgcgtcgaggttttttaagggtaggcgcgtncggtgtttaggtttttttagatttcgtatttcggtcggttttttttgggggcgtttttttcgtatcgcgagcggttcgcgttgatgttcggtcgggttgggggagtcgttaagtttgcgagacgcgcgtagtgtaatcgcgcgttaggcgcgcgtacgttcggtgatttgggtattcgaacgttttcgaggaatttgcgcgtgggtagcgttcggtgcgcggttcgggaagggagcgggtgttttcgtcggggtcgtcgttttcgtggggtgtttttaggttgtttcgcgt

SEQ ID NO: 34056 - DNA, 909 bp, Artificial Sequence
  chemically treated genomic DNA (Homo sapiens) CpG-island No: 34056
  unsure (292)
acgcgaaacaacctaaaaacaccccacgaaaacgacgaccccgacgaaaacacccgctcccttcccgaaccgcgcaccgaacgctacccacgcgcaaattcctcgaaaacgttcgaatacccaaatcaccgaacgtacgcgcgcctaacgcgcgattacactacgcgcgtctcgcaaacttaacgactcccccaacccgaccgaacatcaacgcgaaccgctcgcgatacgaaaaaaacgcccccaaaaaaaaccgaccgaaatacgaaatctaaaaaaacctaaacaccgnacgcgcctacccttaaaaaacctcgacgcacccgaaaatcgacgcacctcgaacgcaaacctcgtaaaaatacccgccaataaaactcgcttttaactaactaaaaacaccgacgaccgcgcgtaaatccctcccgtcgtattatctacgaaaaacgaataactccgaaaaaaaacgaaaaccaacgacccgaacctcgccccaacccgtatacaaccccgatccgaacgacctaaaacgcgtctccaccactcgacgcccgaactctacgcgtcgcttatcgcctccgccgtcctcaaccctcgaacgaataaaataaaaaacgcgaccccgcattcctaaccgacctacgcaaaaataaaaaccacctcgcttcctctccccgaacgcgacgaaaaaaaaaataaacctataaccgacaaccgcgcgaaaaaatcgaacccgacccgaccaaccaataaaaaaacgcccgaaccgtccaacctacctccctacgaacccaacgcaacgaattcctcgaaaaataaaaaacgacgaccctataaatactttcaaatctaaatatataaaacgcattcaaaaacgacaataaaaaacgactaaaaactctccataaa

SEQ ID NO: 34057 - DNA, 587 bp, Artificial Sequence
  chemically treated genomic DNA (Homo sapiens) CpG-island No: 34057
ggattttcgcgtgtcggtcgatgtagtagtcgtcgttgttcgggcgcggtgggtgcgggacgtcgtcgtcgtcgtttatcggatgtttattattcgcgttttcggtgcgttgttcgttaatttagtttttatcgtagtagtcgtttaggtttttcgtcgagtcgttgttgtcggggtcgttgtttaattcggcgtcgaagtataggcgggttatgttttttttgatcgattcgtagatgggtcgttcgaggtcgtcgtatacgtagtcgttgagtagcgtcgttttgggtatagttagtatgtttttaatgacggtgcggtattcgttcgtgtagcgtagttcgttgaagattttgtcgtagtaggttaggtagcggtttagcgttaggttgtagcggttgttacggtcgtagcgtcggcgggtttcggtgtagtttatgatttcgttcgcgtcggggtcgttcgcgtcgtcgtcgttcgttcggggtaggtacggtttaatggcgcgtttggtggatttgtagttttcgttttgcgcgtagatatagttttttagggcggggttcgcggcgcgtgtggttgagttg

SEQ ID NO: 34058 - DNA, 587 bp, Artificial Sequence
  chemically treated genomic DNA (Homo sapiens) CpG-island No: 34058
caactcaaccacacgcgccgcgaaccccgccctaaaaaactatatctacgcgcaaaacgaaaactacaaatccaccaaacgcgccattaaaccgtacctaccccgaacgaacgacgacgacgcgaacgaccccgacgcgaacgaaatcataaactacaccgaaacccgccgacgctacgaccgtaacaaccgctacaacctaacgctaaaccgctacctaacctactacgacaaaatcttcaacgaactacgctacacgaacgaataccgcaccgtcattaaaaacatactaactatacccaaaacgacgctactcaacgactacgtatacgacgacctcgaacgacccatctacgaatcgatcaaaaaaaacataacccgcctatacttcgacgccgaattaaacaacgaccccgacaacaacgactcgacgaaaaacctaaacgactactacgataaaaactaaattaacgaacaacgcaccgaaaacgcgaataataaacatccgataaacgacgacgacgacgtcccgcacccaccgcgcccgaacaacgacgactactacatcgaccgacacgcgaaaatcc

SEQ ID NO: 34059 - DNA, 587 bp, Artificial Sequence
  chemically treated genomic DNA (Homo sapiens) CpG-island No: 34059
tagtttaattatacgcgtcgcgggtttcgttttggaggattgtgtttgcgcgtaggacgagaattgtaagtttattaagcgcgttattgagtcgtgtttgtttcggacgagcggcggcggcgcgggcggtttcggcgcgggcggggttatgggttgtatcgaggttcgtcggcgttgcgatcgtgatagtcgttgtaatttggcgttgagtcgttatttgatttattgcggtaaagtttttaacgggttgcgttgtacggacgaatgtcgtatcgttattgaggatatgttggttatgtttaaggcggcgttgtttaacgattgcgtgtgcgacggtttcgagcggtttatttgcgagtcggttaaggagaatatggttcgtttgtgtttcggcgtcgagttgggtaacggtttcggtagtagcgattcgacggggggtttggacgattattacgatgaggattagattgacgagtagcgtatcgggggcgcgggtggtgagtattcgatggacgacgacgacggcgtttcgtatttatcgcgttcgggtagcggcgattgttgtatcggtcggtacgcggggattt

SEQ ID NO: 34060 - DNA, 587 bp, Artificial Sequence
  chemically treated genomic DNA (Homo sapiens) CpG-island No: 34060
aaatccccgcgtaccgaccgatacaacaatcgccgctacccgaacgcgataaatacgaaacgccgtcgtcgtcgtccatcgaatactcaccacccgcgcccccgatacgctactcgtcaatctaatcctcatcgtaataatcgtccaaaccccccgtcgaatcgctactaccgaaaccgttacccaactcgacgccgaaacacaaacgaaccatattctccttaaccgactcgcaaataaaccgctcgaaaccgtcgcacacgcaatcgttaaacaacgccgccttaaacataaccaacatatcctcaataacgatacgacattcgtccgtacaacgcaacccgttaaaaactttaccgcaataaatcaaataacgactcaacgccaaattacaacgactatcacgatcgcaacgccgacgaacctcgatacaacccataaccccgcccgcgccgaaaccgcccgcgccgccgccgctcgtccgaaacaaacacgactcaataacgcgcttaataaacttacaattctcgtcctacgcgcaaacacaatcctccaaaacgaaacccgcgacgcgtataattaaacta

SEQ ID NO: 34061 - DNA, 518 bp, Artificial Sequence
  chemically treated genomic DNA (Homo sapiens) CpG-island No: 34061
tcgggatcgggtttggcgttcgtcgtcggttgtaagcgtaagtattattttggttaggaggaggaggaagacgacgaggaggatgcgggcgggttgggggtcgagtttttcgggggcgtttcgttcgttttttgtaagcgcgttcgtttcgaggatttttgttcggattcgttttcggacgcgtttaatattttaaatttgatttttatttttggtttcggtttttcggggttggtgagtcgatagtcggatttttcggagtagtcgtcgtcgtttaacgggtagttgtgcgttaagtaggcgttcgttagtttcggcgtttggattcgagttattgtcgttttttagggattttcgagggtatagggattcggggtttcgcggggttggggttagataaagattcggtaaaggggcgagaggagggaacgagcgggcgttcggttattcggggttgaatttggggttaacgcggggtacgtcgtttaatttttaataattgtaaaaaaaaaaaaaaa

SEQ ID NO: 34062 - DNA, 518 bp, Artificial Sequence
  chemically treated genomic DNA (Homo sapiens) CpG-island No: 34062
tttttttttttttttacaattattaaaaattaaacgacgtaccccgcgttaaccccaaattcaaccccgaataaccgaacgcccgctcgttccctcctctcgcccctttaccgaatctttatctaaccccaaccccgcgaaaccccgaatccctataccctcgaaaatccctaaaaaacgacaataactcgaatccaaacgccgaaactaacgaacgcctacttaacgcacaactacccgttaaacgacgacgactactccgaaaaatccgactatcgactcaccaaccccgaaaaaccgaaaccaaaaataaaaatcaaatttaaaatattaaacgcgtccgaaaacgaatccgaacaaaaatcctcgaaacgaacgcgcttacaaaaaacgaacgaaacgcccccgaaaaactcgacccccaacccgcccgcatcctcctcgtcgtcttcctcctcctcctaaccaaaataatacttacgcttacaaccgacgacgaacgccaaacccgatcccga

SEQ ID NO: 34063 - DNA, 518 bp, Artificial Sequence
  chemically treated genomic DNA (Homo sapiens) CpG-island No: 34063
tttttttttttttttataattattaaaaattaagcggcgtgtttcgcgttggttttaagtttagtttcgagtggtcgggcgttcgttcgtttttttttttcgtttttttgtcgagtttttgtttggttttagtttcgcggggtttcgggtttttgtgttttcgggggtttttagaaggcgataatggttcgagtttaggcgtcgaggttggcgagcgtttgtttggcgtatagttgttcgttgagcggcggcggttgtttcgaggagttcggttgtcggtttattagtttcgagaagtcggagttaaagatggagattaagtttgagatgttggacgcgttcggggacgagttcgggtagaagttttcgaagcgggcgcgtttgtagggggcgaacggggcgttttcggggggttcggtttttagttcgttcgtatttttttcgtcgttttttttttttttttggttagggtaatatttgcgtttgtagtcggcggcggacgttaggttcggtttcgg

SEQ ID NO: 34064 - DNA, 518 bp, Artificial Sequence
  chemically treated genomic DNA (Homo sapiens) CpG-island No: 34064
ccgaaaccgaacctaacgtccgccgccgactacaaacgcaaatattaccctaaccaaaaaaaaaaaaaaaacgacgaaaaaaatacgaacgaactaaaaaccgaaccccccgaaaacgccccgttcgccccctacaaacgcgcccgcttcgaaaacttctacccgaactcgtccccgaacgcgtccaacatctcaaacttaatctccatctttaactccgacttctcgaaactaataaaccgacaaccgaactcctcgaaacaaccgccgccgctcaacgaacaactatacgccaaacaaacgctcgccaacctcgacgcctaaactcgaaccattatcgccttctaaaaacccccgaaaacacaaaaacccgaaaccccgcgaaactaaaaccaaacaaaaactcgacaaaaaaacgaaaaaaaaaaacgaacgaacgcccgaccactcgaaactaaacttaaaaccaacgcgaaacacgccgcttaatttttaataattataaaaaaaaaaaaaaa

SEQ ID NO: 34065 - DNA, 600 bp, Artificial Sequence
  chemically treated genomic DNA (Homo sapiens) CpG-island No: 34065
cgcgttttcgcgttttcgtcgtcgttaagttggagcgggtcgaagtcggtcgcgttggtcggtatgttcggcgtcgcgtacgttaggtgttggtgttggtggtggggcggttgttgttgttgttgttgttgttggcgtcggtagagttcggcgtagcgttcgtttaggtagagttggcgcgcgttgcggagtacgtaggatattaggaggtttttgtgtagtttgatgtcgtcgcgttgggttcgggagttgtggattttgcgtagggagatgttgattaggttttgggcgtgttagggcgtattttatgttttcgcggagacggcggcggagtagtcgtcgtcgttgttgttgttaacgtttttgttgtttttgtttttagtcggtcgtcggggcgcgtcgggtaggggtaacggagttcgggttagaggttcggttgcgtttcgaaaggagtcgttattatgcgtcgcgcgttattcgcgggttcgcgttttttagacggcgttaaagtaatgagtttcggtcggtttcggttttagttatttagtcgggtgttcgggtttcgttttatatgagaagagttaataggagttttgagag

SEQ ID NO: 34066 - DNA, 600 bp, Artificial Sequence
  chemically treated genomic DNA (Homo sapiens) CpG-island No: 34066
ctctcaaaactcctattaactcttctcatataaaacgaaacccgaacacccgactaaataactaaaaccgaaaccgaccgaaactcattactttaacgccgtctaaaaaacgcgaacccgcgaataacgcgcgacgcataataacgactcctttcgaaacgcaaccgaacctctaacccgaactccgttacccctacccgacgcgccccgacgaccgactaaaaacaaaaacaacaaaaacgttaacaacaacaacgacgacgactactccgccgccgtctccgcgaaaacataaaatacgccctaacacgcccaaaacctaatcaacatctccctacgcaaaatccacaactcccgaacccaacgcgacgacatcaaactacacaaaaacctcctaatatcctacgtactccgcaacgcgcgccaactctacctaaacgaacgctacgccgaactctaccgacgccaacaacaacaacaacaacaacaaccgccccaccaccaacaccaacacctaacgtacgcgacgccgaacataccgaccaacgcgaccgacttcgacccgctccaacttaacgacgacgaaaacgcgaaaacgcg

SEQ ID NO: 34067 - DNA, 600 bp, Artificial Sequence
  chemically treated genomic DNA (Homo sapiens) CpG-island No: 34067
tttttagagtttttattggttttttttatgtggggcggggttcgggtattcggttaaatagttggggtcggggtcggtcgagatttattgttttggcgtcgtttggggagcgcgagttcgcgggtggcgcgcggcgtatggtgacggtttttttcggagcgtagtcgaatttttgattcggatttcgttatttttgttcggcgcgtttcggcggtcggttggaggtagaaatagtagaagcgttaatagtagtagcggcggcggttgtttcgtcgtcgttttcgcgggagtatggagtgcgttttggtacgtttagagtttgattagtatttttttgcgtaagatttatagttttcgaatttagcgcggcggtattaagttgtataagaattttttggtgttttacgtgtttcgtaacgcgcgttagttttatttgagcgagcgttacgtcgagttttatcggcgttagtagtagtagtaatagtagtagtcgttttattattagtattagtatttagcgtacgcggcgtcgggtatgtcggttagcgcggtcgatttcggttcgttttaatttggcggcggcggggacgcggaggcgcg

SEQ ID NO: 34068 - DNA, 600 bp, Artificial Sequence
  chemically treated genomic DNA (Homo sapiens) CpG-island No: 34068
cgcgcctccgcgtccccgccgccgccaaattaaaacgaaccgaaatcgaccgcgctaaccgacatacccgacgccgcgtacgctaaatactaatactaataataaaacgactactactattactactactactaacgccgataaaactcgacgtaacgctcgctcaaataaaactaacgcgcgttacgaaacacgtaaaacaccaaaaaattcttatacaacttaataccgccgcgctaaattcgaaaactataaatcttacgcaaaaaaatactaatcaaactctaaacgtaccaaaacgcactccatactcccgcgaaaacgacgacgaaacaaccgccgccgctactactattaacgcttctactatttctacctccaaccgaccgccgaaacgcgccgaacaaaaataacgaaatccgaatcaaaaattcgactacgctccgaaaaaaaccgtcaccatacgccgcgcgccacccgcgaactcgcgctccccaaacgacgccaaaacaataaatctcgaccgaccccgaccccaactatttaaccgaatacccgaaccccgccccacataaaaaaaaccaataaaaactctaaaaa

SEQ ID NO: 34069 - DNA, 621 bp, Artificial Sequence
  chemically treated genomic DNA (Homo sapiens) CpG-island No: 34069
tcgggtcgaatagcggtcgtaggacgcggttttcgttttcggacgtaatcgtacggttcgtttaggtcgtttagggtttttaggttcgggattcgtcgtatttattacggttttggtagcgaaggttaatattttcgttgttcgttcgcggatacgtagttcgtttcgttttatatatcgggtaaagttcgcgtcgtcgtcgtcgcggttggggtcggtgggtttttgttagagttttcgggttaaggtcgttgagttatagtcgttagtcggtagaggtagtttcgcgtttattttttgggtcgagcgggttgcgggaaggtattcggggaggaggattcgcgaggcggggtttgggtcggtagcgggtttcgggcgggtaacggtgttcgggaggttggttgtggggcggggacggggtatcgatggggcggagtttttttgaggagggataggaggggcggggacggaggggcggggcgtcgttcggtagcgggtcgtagtaggttggttgcgagtcgggggcgggattacggcgggcggggatagaggggtagggtcgagggcgagttattgagatttgtggaggaggaaggaggaggttatcgtttagttgttttt

SEQ ID NO: 34070 - DNA, 621 bp, Artificial Sequence
  chemically treated genomic DNA (Homo sapiens) CpG-island No: 34070
aaaaacaactaaacgataacctcctccttcctcctccacaaatctcaataactcgccctcgaccctacccctctatccccgcccgccgtaatcccgcccccgactcgcaaccaacctactacgacccgctaccgaacgacgccccgcccctccgtccccgcccctcctatccctcctcaaaaaaactccgccccatcgataccccgtccccgccccacaaccaacctcccgaacaccgttacccgcccgaaacccgctaccgacccaaaccccgcctcgcgaatcctcctccccgaataccttcccgcaacccgctcgacccaaaaaataaacgcgaaactacctctaccgactaacgactataactcaacgaccttaacccgaaaactctaacaaaaacccaccgaccccaaccgcgacgacgacgacgcgaactttacccgatatataaaacgaaacgaactacgtatccgcgaacgaacaacgaaaatattaaccttcgctaccaaaaccgtaataaatacgacgaatcccgaacctaaaaaccctaaacgacctaaacgaaccgtacgattacgtccgaaaacgaaaaccgcgtcctacgaccgctattcgacccga

SEQ ID NO: 34071 - DNA, 621 bp, Artificial Sequence
  chemically treated genomic DNA (Homo sapiens) CpG-island No: 34071
agagatagttggacggtgattttttttttttttttttataggttttaatgattcgttttcggttttgtttttttgttttcgttcgtcgtggtttcgttttcgattcgtagttagtttattgcgattcgttatcgggcgacgtttcgttttttcgttttcgttttttttgtttttttttaaggagatttcgttttatcgatgtttcgttttcgttttatagttaatttttcgggtatcgttgttcgttcggggttcgttatcggtttaggtttcgtttcgcgagttttttttttcgggtgttttttcgtagttcgttcggtttagagggtgggcgcggggttgtttttatcggttggcggttgtaatttagcgattttggttcgaaggttttagtaaggatttatcgattttagtcgcggcggcggcggcgcggattttgttcggtgtgtggggcggagcggattgcgtgttcgcggacgggtagcgaagatgttagttttcgttgttaggatcgtggtgagtgcggcggatttcgggtttgagggttttggacggtttgggcgggtcgtgcggttgcgttcgggaacggagatcgcgttttgcggtcgttgttcgattcgg

SEQ ID NO: 34072 - DNA, 621 bp, Artificial Sequence
  chemically treated genomic DNA (Homo sapiens) CpG-island No: 34072
ccgaatcgaacaacgaccgcaaaacgcgatctccgttcccgaacgcaaccgcacgacccgcccaaaccgtccaaaaccctcaaacccgaaatccgccgcactcaccacgatcctaacaacgaaaactaacatcttcgctacccgtccgcgaacacgcaatccgctccgccccacacaccgaacaaaatccgcgccgccgccgccgcgactaaaatcgataaatccttactaaaaccttcgaaccaaaatcgctaaattacaaccgccaaccgataaaaacaaccccgcgcccaccctctaaaccgaacgaactacgaaaaaacacccgaaaaaaaaaactcgcgaaacgaaacctaaaccgataacgaaccccgaacgaacaacgatacccgaaaaattaactataaaacgaaaacgaaacatcgataaaacgaaatctccttaaaaaaaaacaaaaaaaacgaaaacgaaaaaacgaaacgtcgcccgataacgaatcgcaataaactaactacgaatcgaaaacgaaaccacgacgaacgaaaacaaaaaaacaaaaccgaaaacgaatcattaaaacctataaaaaaaaaaaaaaaaaatcaccgtccaactatctct

SEQ ID NO: 34073 - DNA, 815 bp, Artificial Sequence
  chemically treated genomic DNA (Homo sapiens) CpG-island No: 34073
gcgaggcgggtttagtcgtcgttttttagtgaggggacggacgagtttagttaggttaaggcgaaagagcgacgcgtattttaattagacggttttattaatgggtttgcgcgtttttcgcggcgttcgtttttgtatcggtttttcggcgatcgcgttgtttttttttaggtcgtcgcggcggcgttcgttcgcgtttttattcgggttttggcgcggtgttttttcggtagcgacgggcgcgagggtcggggtatttttacggtcgcgacggtttttttcgcgagcgcgaggtgggtatggcggacgcggtagcgagcgcgggttcgtcgttattttatttcgcggagattcgcggtagcgggtgggtagaatgggagagtcgtgcgtcggttcgcgtttgttcggttaacgcgggttgggattggtggggcggtttgttttttttagcgggcgggtggtttcggggggtcggcgggttgttagcggaagtcgcgggcgttcggggtacgggggaggggtgtcgcgtggtcgtcgcggggtcggttttaatttttttcgtttttcgtttagttttttatcgatagggcgggggagggggggttattttttatattttttatttcgttttttttttcgttttaattaaatttggggcgggcggaaggttcgtttttcggtcggcgtttgttggtcggcgtcgtttttgattgtggcgtgattggttgtaggcgtcgttaggtgtttttgacgttattttcgttattaagtttgtgggtcggggagattttggttttgggggttgggatgaagga

SEQ ID NO: 34074 - DNA, 815 bp, Artificial Sequence
  chemically treated genomic DNA (Homo sapiens) CpG-island No: 34074
tccttcatcccaacccccaaaaccaaaatctccccgacccacaaacttaataacgaaaataacgtcaaaaacacctaacgacgcctacaaccaatcacgccacaatcaaaaacgacgccgaccaacaaacgccgaccgaaaaacgaaccttccgcccgccccaaatttaattaaaacgaaaaaaaaaacgaaataaaaaatataaaaaataaccccccctcccccgccctatcgataaaaaactaaacgaaaaacgaaaaaaattaaaaccgaccccgcgacgaccacgcgacacccctcccccgtaccccgaacgcccgcgacttccgctaacaacccgccgaccccccgaaaccacccgcccgctaaaaaaaacaaaccgccccaccaatcccaacccgcgttaaccgaacaaacgcgaaccgacgcacgactctcccattctacccacccgctaccgcgaatctccgcgaaataaaataacgacgaacccgcgctcgctaccgcgtccgccatacccacctcgcgctcgcgaaaaaaaccgtcgcgaccgtaaaaataccccgaccctcgcgcccgtcgctaccgaaaaaacaccgcgccaaaacccgaataaaaacgcgaacgaacgccgccgcgacgacctaaaaaaaaacaacgcgatcgccgaaaaaccgatacaaaaacgaacgccgcgaaaaacgcgcaaacccattaataaaaccgtctaattaaaatacgcgtcgctctttcgccttaacctaactaaactcgtccgtcccctcactaaaaaacgacgactaaacccgcctcgc

SEQ ID NO: 34075 - DNA, 815 bp, Artificial Sequence
  chemically treated genomic DNA (Homo sapiens) CpG-island No: 34075
ttttttattttaatttttaaggttaaggttttttcggtttataaatttgatagcggaagtgacgttagaggtatttggcggcgtttataattagttacgttatagttagaggcggcgtcggttaataggcgtcggtcggaaggcgggtttttcgttcgttttaagtttgattgaagcggggggaagggcggggtaaggaatgtgaagaatgattttttttttttcgttttgtcggtgaggagttgggcgggaagcggagggggttggagtcggtttcgcggcggttacgcggtatttttttttcgtgtttcgagcgttcgcgattttcgttagtagttcgtcggtttttcggggttattcgttcgttggagggggtaggtcgttttattagttttagttcgcgttagtcggataggcgcgggtcggcgtacggtttttttattttgtttattcgttgtcgcgagttttcgcgaaataaaatggcgacggattcgcgttcgttgtcgcgttcgttatatttatttcgcgttcgcggagagggtcgtcgcggtcgtgggaatgtttcggttttcgcgttcgtcgttgtcgggagagtatcgcgttaggattcggatggaggcgcgggcgggcgtcgtcgcggcggtttgagggaaagtagcgcggtcgtcgggaggtcgatgtaggggcgggcgtcgcggaaagcgcgtaagtttattggtgaagtcgtttgattgaagtgcgcgtcgttttttcgttttggtttagttgagttcgttcgtttttttattggagggcggcggttgggttcgtttcgt

SEQ ID NO: 34076 - DNA, 815 bp, Artificial Sequence
  chemically treated genomic DNA (Homo sapiens) CpG-island No: 34076
acgaaacgaacccaaccgccgccctccaataaaaaaacgaacgaactcaactaaaccaaaacgaaaaaacgacgcgcacttcaatcaaacgacttcaccaataaacttacgcgctttccgcgacgcccgcccctacatcgacctcccgacgaccgcgctactttccctcaaaccgccgcgacgacgcccgcccgcgcctccatccgaatcctaacgcgatactctcccgacaacgacgaacgcgaaaaccgaaacattcccacgaccgcgacgaccctctccgcgaacgcgaaataaatataacgaacgcgacaacgaacgcgaatccgtcgccattttatttcgcgaaaactcgcgacaacgaataaacaaaataaaaaaaccgtacgccgacccgcgcctatccgactaacgcgaactaaaactaataaaacgacctaccccctccaacgaacgaataaccccgaaaaaccgacgaactactaacgaaaatcgcgaacgctcgaaacacgaaaaaaaaataccgcgtaaccgccgcgaaaccgactccaaccccctccgcttcccgcccaactcctcaccgacaaaacgaaaaaaaaaaaatcattcttcacattccttaccccgcccttccccccgcttcaatcaaacttaaaacgaacgaaaaacccgccttccgaccgacgcctattaaccgacgccgcctctaactataacgtaactaattataaacgccgccaaatacctctaacgtcacttccgctatcaaatttataaaccgaaaaaaccttaaccttaaaaattaaaataaaaaa

SEQ ID NO: 34077 - DNA, 631 bp, Artificial Sequence
  chemically treated genomic DNA (Homo sapiens) CpG-island No: 34077
ttaaggttagatttataagttaggtatatatttatacgtttacgttcgcgcgttgtcggagtttcggggtttgttggttagtatatttttatattcgcggcgcggttttcgggtaatttataggaagttttttatcgagatgcggacgatagagttttttacgaaaggttcggacgattgtaatagcggtagttgcggggtcgaatttttttttttgttcgggattttcgacgaagggtttttcgggagagtttttttggaaggttgggggtttggagttgacgtttttttgttcggagtcgttattttggtttttttagcgttttatagcgattttcgtttttatcgttcggtagtttaggcgtttaagcgtttatttatttaggcgtttcgttttcgcgcgaattgtcgcgaattgttatcgcgcgttcgttttcgcgatttcgcgtcgcgtttgcgtagtttaggttcggcgacgttagtaggttcgtttcgtttttttcgcgtttcgtcgtgttgtgcgaggtttagattaagggcgagatagtaggtaggattgggtggagacgttcggggacgtggtaattggagtttttttttcgtattttcggtatttagttttttttttttt

SEQ ID NO: 34078 - DNA, 631 bp, Artificial Sequence
  chemically treated genomic DNA (Homo sapiens) CpG-island No: 34078
aaaaaaaaaaaaactaaataccgaaaatacgaaaaaaaaactccaattaccacgtccccgaacgtctccacccaatcctacctactatctcgcccttaatctaaacctcgcacaacacgacgaaacgcgaaaaaaacgaaacgaacctactaacgtcgccgaacctaaactacgcaaacgcgacgcgaaatcgcgaaaacgaacgcgcgataacaattcgcgacaattcgcgcgaaaacgaaacgcctaaataaataaacgcttaaacgcctaaactaccgaacgataaaaacgaaaatcgctataaaacgctaaaaaaaccaaaataacgactccgaacaaaaaaacgtcaactccaaacccccaaccttccaaaaaaactctcccgaaaaacccttcgtcgaaaatcccgaacaaaaaaaaaaattcgaccccgcaactaccgctattacaatcgtccgaacctttcgtaaaaaactctatcgtccgcatctcgataaaaaacttcctataaattacccgaaaaccgcgccgcgaatataaaaatatactaaccaacaaaccccgaaactccgacaacgcgcgaacgtaaacgtataaatatatacctaacttataaatctaaccttaa

SEQ ID NO: 34079 - DNA, 631 bp, Artificial Sequence
  chemically treated genomic DNA (Homo sapiens) CpG-island No: 34079
aaaaaaaaaggaattgaatgtcgaaaatacggagaagaaattttagttgttacgttttcgaacgtttttatttagttttgtttgttgtttcgtttttagtttgggtttcgtatagtacggcggagcgcgggaggggcggggcgggtttgttgacgtcgtcggatttgaattgcgtaggcgcggcgcgagatcgcgggagcgagcgcgcggtaatagttcgcggtagttcgcgcgggagcggggcgtttgggtggatgggcgtttgggcgtttgggttgtcggacggtgggaacggaagtcgttgtgggacgttgaggaagttaggatggcgatttcgagtaagaagacgttaattttaagtttttagttttttaagagagttttttcgagagatttttcgtcggaggtttcgagtaagaggaagaattcggtttcgtagttgtcgttgttgtagtcgttcgggtttttcgtggaaggttttatcgttcgtatttcgatggagaattttttgtaagttgttcggaggtcgcgtcgcgggtgtggaggtgtgttggttagtaggtttcggggtttcggtagcgcgcgggcgtgggcgtgtgggtgtgtatttggtttgtgggtttggttttga

SEQ ID NO: 34080 - DNA, 631 bp, Artificial Sequence
  chemically treated genomic DNA (Homo sapiens) CpG-island No: 34080
tcaaaaccaaacccacaaaccaaatacacacccacacgcccacgcccgcgcgctaccgaaaccccgaaacctactaaccaacacacctccacacccgcgacgcgacctccgaacaacttacaaaaaattctccatcgaaatacgaacgataaaaccttccacgaaaaacccgaacgactacaacaacgacaactacgaaaccgaattcttcctcttactcgaaacctccgacgaaaaatctctcgaaaaaactctcttaaaaaactaaaaacttaaaattaacgtcttcttactcgaaatcgccatcctaacttcctcaacgtcccacaacgacttccgttcccaccgtccgacaacccaaacgcccaaacgcccatccacccaaacgccccgctcccgcgcgaactaccgcgaactattaccgcgcgctcgctcccgcgatctcgcgccgcgcctacgcaattcaaatccgacgacgtcaacaaacccgccccgcccctcccgcgctccgccgtactatacgaaacccaaactaaaaacgaaacaacaaacaaaactaaataaaaacgttcgaaaacgtaacaactaaaatttcttctccgtattttcgacattcaattccttttttttt

SEQ ID NO: 34081 - DNA, 572 bp, Artificial Sequence
  chemically treated genomic DNA (Homo sapiens) CpG-island No: 34081
attagttttcgttttatttcgtagatagtttggcgtcgggatatcggggacgtttgcgtagaagaattcgtttggttttttggttttaacggtaataatgttttttttcgaaagatagttagagtagttcgggggtattagtatacgtttgcgcgtttttcgacgttttggcgcgtttttggtgtttaattttttttacgtgagcgcgttcgttattacgatattcgttgacggggtttttttatttgagtcgggtttcgtttttttttttttcgttgaaggaggcggtgattttttttcgatcggattcggtagtgttagaggaggtgggaacgttttgattagcgttttcgttacgggatttttttttttttttattcgttttttttttatttcgtttttagttttttagtttttttagttagttcgtcgtagtattttgagaatacggcggcggcgttcgaggataagcggaagtgacgtaatgtaagagcgtttatttcgttttatttcgttttttttagttgggttgtaattaattagtaatgggaagggcggggtcggggtaggag

SEQ ID NO: 34082 - DNA, 572 bp, Artificial Sequence
  chemically treated genomic DNA (Homo sapiens) CpG-island No: 34082
ctcctaccccgaccccgcccttcccattactaattaattacaacccaactaaaaaaaacgaaataaaacgaaataaacgctcttacattacgtcacttccgcttatcctcgaacgccgccgccgtattctcaaaatactacgacgaactaactaaaaaaactaaaaaactaaaaacgaaataaaaaaaaaacgaataaaaaaaaaaaaaaatcccgtaacgaaaacgctaatcaaaacgttcccacctcctctaacactaccgaatccgatcgaaaaaaaatcaccgcctccttcaacgaaaaaaaaaaaaacgaaacccgactcaaataaaaaaaccccgtcaacgaatatcgtaataacgaacgcgctcacgtaaaaaaaattaaacaccaaaaacgcgccaaaacgtcgaaaaacgcgcaaacgtatactaatacccccgaactactctaactatctttcgaaaaaaaacattattaccgttaaaaccaaaaaaccaaacgaattcttctacgcaaacgtccccgatatcccgacgccaaactatctacgaaataaaacgaaaactaat

SEQ ID NO: 34083 - DNA, 572 bp, Artificial Sequence
  chemically treated genomic DNA (Homo sapiens) CpG-island No: 34083
tttttatttcggtttcgttttttttattgttgattggttgtagtttaattgggagaggcggaatggggcggagtaggcgtttttgtattacgttattttcgtttattttcgggcgtcgtcgtcgtgtttttagagtgttgcggcgaattggttggaggagttaggggattagaggcggggtgggaggggggcgggtggaagggggaggaagtttcgtaacggagacgttggttaggacgtttttattttttttgatattgtcgagttcgatcggagaggggttatcgttttttttagcgaggaggaggggggcggagttcgatttaggtgaggagatttcgttagcgagtatcgtgatggcgggcgcgtttacgtggggaaggttgagtattaggggcgcgttaaggcgtcggggagcgcgtagacgtgtattggtgttttcggattattttggttgtttttcggaggggagtattgttatcgttggagttaaggggttaggcgggtttttttgcgtaggcgttttcggtgtttcgacgttaggttgtttgcggggtggggcgggggttggt

SEQ ID NO: 34084 - DNA, 572 bp, Artificial Sequence
  chemically treated genomic DNA (Homo sapiens) CpG-island No: 34084
accaacccccgccccaccccgcaaacaacctaacgtcgaaacaccgaaaacgcctacgcaaaaaaacccgcctaaccccttaactccaacgataacaatactcccctccgaaaaacaaccaaaataatccgaaaacaccaatacacgtctacgcgctccccgacgccttaacgcgcccctaatactcaaccttccccacgtaaacgcgcccgccatcacgatactcgctaacgaaatctcctcacctaaatcgaactccgcccccctcctcctcgctaaaaaaaacgataacccctctccgatcgaactcgacaatatcaaaaaaaataaaaacgtcctaaccaacgtctccgttacgaaacttcctcccccttccacccgcccccctcccaccccgcctctaatcccctaactcctccaaccaattcgccgcaacactctaaaaacacgacgacgacgcccgaaaataaacgaaaataacgtaatacaaaaacgcctactccgccccattccgcctctcccaattaaactacaaccaatcaacaataaaaaaaacgaaaccgaaataaaaa

SEQ ID NO: 34085 - DNA, 753 bp, Artificial Sequence
  chemically treated genomic DNA (Homo sapiens) CpG-island No: 34085
cgtttttcgaggtttagcgttaggcgcgggcgttagattggcggaggggtggtgcgaggggcgggggagggtcggttttttacgtgggggttgacgtcggttgtttagtaacgtttgtttgattttggggttataaaacgagtttatcgtgagcgtagcggagtagtagtagttttagttcggtgtagaagtttagtagtcggcgtgtcgtcgttcggttattttagcgttttttttttcgttttgcgtttttgttttaattcgcgttgtcgtcggatttcggtttatttagtagcgttcggcgtttattaggcggacgtttaggagaatttttgttttcgtcgcggtttttggagagttgatcgtttatttgtttcggttcgtttgaggacgggggtgtttttatgcggtttttatattttttatttcgtcgtcgtcgtcgtttcggagtttcgtatagtgtgttttagttttagtagggcgtataattttggaagtttcgcggcgtttcgagaggcggtagagttcgcgttttagtttcgggtcgggtcgggttagaatcgtagcgtttgggggaagttagagagtcggtaatcgtttcggggatgtaaggcgatagatataggattttcgagttcgtattagtatttttcggttgtttttcggggtgggggcgggtttcgtatacggtaagattttttgttttcgtttaggtttaagatttaagatatagatattgatatgtatatatat

SEQ ID NO: 34086 - DNA, 753 bp, Artificial Sequence
  chemically treated genomic DNA (Homo sapiens) CpG-island No: 34086
atatatatacatatcaatatctatatcttaaatcttaaacctaaacgaaaacaaaaaatcttaccgtatacgaaacccgcccccaccccgaaaaacaaccgaaaaatactaatacgaactcgaaaatcctatatctatcgccttacatccccgaaacgattaccgactctctaacttcccccaaacgctacgattctaacccgacccgacccgaaactaaaacgcgaactctaccgcctctcgaaacgccgcgaaacttccaaaattatacgccctactaaaactaaaacacactatacgaaactccgaaacgacgacgacgacgaaataaaaaatataaaaaccgcataaaaacacccccgtcctcaaacgaaccgaaacaaataaacgatcaactctccaaaaaccgcgacgaaaacaaaaattctcctaaacgtccgcctaataaacgccgaacgctactaaataaaccgaaatccgacgacaacgcgaattaaaacaaaaacgcaaaacgaaaaaaaaaacgctaaaataaccgaacgacgacacgccgactactaaacttctacaccgaactaaaactactactactccgctacgctcacgataaactcgttttataaccccaaaatcaaacaaacgttactaaacaaccgacgtcaacccccacgtaaaaaaccgaccctcccccgcccctcgcaccacccctccgccaatctaacgcccgcgcctaacgctaaacctcgaaaaacg

SEQ ID NO: 34087 - DNA, 753 bp, Artificial Sequence
  chemically treated genomic DNA (Homo sapiens) CpG-island No: 34087
atatatatatatattaatatttgtattttgaattttgagtttgagcgaaagtaagaggttttatcgtgtgcggggttcgtttttatttcgggaggtagtcgaagggtgttgatgcgagttcgggggttttatgtttgtcgttttatattttcgaagcgattatcgattttttggttttttttagacgttgcggttttggttcggttcggttcggggttggggcgcggattttgtcgtttttcggagcgtcgcgagatttttaaagttgtgcgttttgttggggttggggtatattgtgcggagtttcgggacggcggcggcggcggggtgaggagtgtgggggtcgtatgaaggtattttcgtttttaggcgggtcggggtaggtgaacgattagttttttaggagtcgcgacggaggtaggggtttttttgggcgttcgtttggtgggcgtcgagcgttgttggatgggtcggggttcgacgatagcgcgagttggggtaggagcgtaaggcggggaagaaggcgttggagtggtcgggcggcggtacgtcggttgttgggtttttgtatcgagttggagttgttgttgtttcgttgcgtttacggtggattcgttttatagttttaggattaagtaagcgttgttgagtagtcggcgttagtttttacgtgggaagtcgattttttttcgtttttcgtattattttttcgttagtttagcgttcgcgtttagcgttggatttcggggagcg

SEQ ID NO: 34088 - DNA, 753 bp, Artificial Sequence
  chemically treated genomic DNA (Homo sapiens) CpG-island No: 34088
cgctccccgaaatccaacgctaaacgcgaacgctaaactaacgaaaaaataatacgaaaaacgaaaaaaaatcgacttcccacgtaaaaactaacgccgactactcaacaacgcttacttaatcctaaaactataaaacgaatccaccgtaaacgcaacgaaacaacaacaactccaactcgatacaaaaacccaacaaccgacgtaccgccgcccgaccactccaacgccttcttccccgccttacgctcctaccccaactcgcgctatcgtcgaaccccgacccatccaacaacgctcgacgcccaccaaacgaacgcccaaaaaaacccctacctccgtcgcgactcctaaaaaactaatcgttcacctaccccgacccgcctaaaaacgaaaataccttcatacgacccccacactcctcaccccgccgccgccgccgtcccgaaactccgcacaatataccccaaccccaacaaaacgcacaactttaaaaatctcgcgacgctccgaaaaacgacaaaatccgcgccccaaccccgaaccgaaccgaaccaaaaccgcaacgtctaaaaaaaaccaaaaaatcgataatcgcttcgaaaatataaaacgacaaacataaaacccccgaactcgcatcaacacccttcgactacctcccgaaataaaaacgaaccccgcacacgataaaacctcttactttcgctcaaactcaaaattcaaaatacaaatattaatatatatatatat

SEQ ID NO: 34089 - DNA, 1733 bp, Artificial Sequence
  chemically treated genomic DNA (Homo sapiens) CpG-island No: 34089
ttatcgagagcgtttgaagcgcgagttaggcgtagttcgcgggattcgggttatgggtcgttagcggttttttagttcgggttcggtttttttgcggttttttttttatgtgagtcgtagttaggcgagcggggcgtcggaggaagaggaggatttacgggcgtcgggtcggaaggtagttggtagtaggtttaggttagcgggcgttcgcgtttatgtttcgttaggagtagtcgttggtcgagggtagttttgcgtttatgggttttttgtagtcggacgcgggtaacgcgagttggaacgggatcgaggcgtcggggggcggcgttcgggttattttttattttttgtaggtgacgttgacgttggtgtgtttggtcggtttgtttatgttgtttatcgtgttcggtaacgtgttcgttattatcgtcgtgtttacgagtcgcgcgtttaaggcgttttaaaatttttttttggtgtttttggtttcggtcgatattttggtggttacgttcgttatttttttttcgttggttaacgaggttatgggttattggtatttcggtaaggtttggtgcgagatttatttggcgttcgacgtgtttttttgtacgtcgtttatcgtgtatttgtgcgttattagtttggatcgttattggtttattatataggttatcgagtataatttgaagcgtacgtcgcgtcgtattaaggttattattattatcgtgtgggttatttcggtcgttatttttttttcgtcgtttatttttatcgagaagaagggcggcggcggcggttcgtagtcggtcgagtcgcgttgcgagattaacgattagaagtggtacgttatttcgtcgtgtatcggtttttttttcgttttttgttttattatgattttggtttacgtgcgtatttattagatcgttaagcgtcgtattcgcgtgttatttagtcgtcggggttcggacgtcgtcgtcgcgtcgtcggggggtatcgagcgtaggtttaacggtttgggtttcgagcgtagcgcgggttcggggggcgtagaggtcgaatcgttgtttatttagtttaacggcgtttttggcgagttcgcgtcggtcgggtcgcgcgatatcgacgcgttggatttggaggagagttcgtttttcgattacgtcgagcggtttttagggtttcgtagattcgagcgcggttttcggggtaaaggtaaggttcgagcgagttaggtgaagtcgggcgatagtttgtcgcggcgcgggtcgggggcgacggggatcgggacgtcggttgtagggtcgggggaggagcgcgtcggggttgttaaggcgtcgcgttggcgcgggcggtagaatcgcgagaagcgttttacgttcgtgttggtcgtggttatcggagtgttcgtggtgtgttggtttttttttttttttatttatacgtttacggtcgtcgggtgtttcgtgttacgtacgttttttaaattttttttttggttcggttattgtaatagttcgttgaattcggttatttatattatttttaattacgattttcgtcgcgtttttaagaagattttttgtcggggggataggaagcggatcgtgtgaggttttcgttggcgttcgcgtagatttacgttgattgtaggtagcggggggtatcgaggggtgtttagttttagggtatttagaaattcgggcgttgtttgttttgcgttttttcgtttg

SEQ ID NO: 34090 - DNA, 1733 bp, Artificial Sequence
  chemically treated genomic DNA (Homo sapiens) CpG-island No: 34090
caaacgaaaaaacgcaaaacaaacaacgcccgaatttctaaataccctaaaactaaacacccctcgataccccccgctacctacaatcaacgtaaatctacgcgaacgccaacgaaaacctcacacgatccgcttcctatccccccgacaaaaaatcttcttaaaaacgcgacgaaaatcgtaattaaaaataatataaataaccgaattcaacgaactattacaataaccgaaccaaaaaaaaaatttaaaaaacgtacgtaacacgaaacacccgacgaccgtaaacgtataaataaaaaaaaaaaaaaaccaacacaccacgaacactccgataaccacgaccaacacgaacgtaaaacgcttctcgcgattctaccgcccgcgccaacgcgacgccttaacaaccccgacgcgctcctcccccgaccctacaaccgacgtcccgatccccgtcgcccccgacccgcgccgcgacaaactatcgcccgacttcacctaactcgctcgaaccttacctttaccccgaaaaccgcgctcgaatctacgaaaccctaaaaaccgctcgacgtaatcgaaaaacgaactctcctccaaatccaacgcgtcgatatcgcgcgacccgaccgacgcgaactcgccaaaaacgccgttaaactaaataaacaacgattcgacctctacgccccccgaacccgcgctacgctcgaaacccaaaccgttaaacctacgctcgataccccccgacgacgcgacgacgacgtccgaaccccgacgactaaataacacgcgaatacgacgcttaacgatctaataaatacgcacgtaaaccaaaatcataataaaacaaaaaacgaaaaaaaaaccgatacacgacgaaataacgtaccacttctaatcgttaatctcgcaacgcgactcgaccgactacgaaccgccgccgccgcccttcttctcgataaaaataaacgacgaaaaaaaaataacgaccgaaataacccacacgataataataataaccttaatacgacgcgacgtacgcttcaaattatactcgataacctatataataaaccaataacgatccaaactaataacgcacaaatacacgataaacgacgtacaaaaaaacacgtcgaacgccaaataaatctcgcaccaaaccttaccgaaataccaataacccataacctcgttaaccaacgaaaaaaaaataacgaacgtaaccaccaaaatatcgaccgaaaccaaaaacaccaaaaaaaaattttaaaacgccttaaacgcgcgactcgtaaacacgacgataataacgaacacgttaccgaacacgataaacaacataaacaaaccgaccaaacacaccaacgtcaacgtcacctacaaaaaataaaaaataacccgaacgccgccccccgacgcctcgatcccgttccaactcgcgttacccgcgtccgactacaaaaaacccataaacgcaaaactaccctcgaccaacgactactcctaacgaaacataaacgcgaacgcccgctaacctaaacctactaccaactaccttccgacccgacgcccgtaaatcctcctcttcctccgacgccccgctcgcctaactacgactcacataaaaaaaaaaccgcaaaaaaaccgaacccgaactaaaaaaccgctaacgacccataacccgaatcccgcgaactacgcctaactcgcgcttcaaacgctctcgataa

SEQ ID NO: 34091 - DNA, 1733 bp, Artificial Sequence
  chemically treated genomic DNA (Homo sapiens) CpG-island No: 34091
tagacgaggaaacgtagagtaggtagcgttcgggtttttgagtgttttggggttaagtatttttcgatgtttttcgttgtttgtagttagcgtgagtttacgcgggcgttagcggaaattttatacgattcgttttttgttttttcgatagaggatttttttgaaggcgcggcggaaatcgtggttgaagatggtgtagatgatcgggtttaacgagttgttgtagtagtcgaattagaagaagaatttgaagagcgtgcgtggtacggagtattcgacggtcgtgagcgtgtaggtgaagaagaaggggaattagtatattacgaatatttcgatgattacggttagtacgaacgtgaagcgtttttcgcggttttgtcgttcgcgttagcgcgacgttttggtagtttcgacgcgtttttttttcggttttgtagtcggcgtttcgattttcgtcgttttcggttcgcgtcgcggtaggttgtcgttcggttttatttggttcgttcgggttttgtttttgtttcggggatcgcgttcgggtttgcggggttttggaggtcgttcggcgtggtcggaagacgagtttttttttaggtttagcgcgtcggtgtcgcgcggttcggtcggcgcgggttcgttaggggcgtcgttgagttgggtgggtagcggttcggtttttgcgtttttcgggttcgcgttgcgttcggggtttagatcgttgggtttgcgttcggtgtttttcggcggcgcggcgacggcgttcggatttcggcggttgggtggtacgcgggtgcgacgtttggcgatttggtagatgcgtacgtagattaggattatgatgaggtagggagcgaagaaggagtcgatgtacgacgagatgacgtattatttttggtcgttgatttcgtagcgcggttcggtcggttgcgggtcgtcgtcgtcgttttttttttcgatggagatgagcggcgggaaggagatgacggtcgagatgatttatacggtgatgatgatggttttgatgcggcgcggcgtgcgttttaggttgtattcgatggtttgtgtgatggattagtagcggtttaggttgatggcgtataggtgtacgatggacgacgtgtagaagagtacgtcgagcgttaggtagatttcgtattaagttttgtcgaagtattagtagtttatgatttcgttggttagcgagaaagggatgacgagcgtggttattaggatgtcggtcgaggttagagatattaggaagaggttttggggcgttttgagcgcgcggttcgtgaatacggcgatgatgacgagtacgttgtcgaatacggtgagtagtatgagtaggtcggttaggtatattagcgttagcgttatttgtagggagtaaggggtggttcgggcgtcgtttttcggcgtttcggtttcgttttagttcgcgttgttcgcgttcggttgtagggagtttatgggcgtaaagttgttttcggttaacggttgtttttggcggaatatgaacgcgggcgttcgttggtttgggtttgttgttagttgtttttcggttcggcgttcgtgggttttttttttttttcggcgtttcgttcgtttggttgcggtttatatagggagggggtcgtagggaggtcgggttcgaattggaggatcgttagcggtttatggttcgggtttcgcgaattgcgtttggttcgcgttttagacgttttcggtgg

SEQ ID NO: 34092 - DNA, 1733 bp, Artificial Sequence
  chemically treated genomic DNA (Homo sapiens) CpG-island No: 34092
ccaccgaaaacgtctaaaacgcgaaccaaacgcaattcgcgaaacccgaaccataaaccgctaacgatcctccaattcgaacccgacctccctacgaccccctccctatataaaccgcaaccaaacgaacgaaacgccgaaaaaaaaaaaaaacccacgaacgccgaaccgaaaaacaactaacaacaaacccaaaccaacgaacgcccgcgttcatattccgccaaaaacaaccgttaaccgaaaacaactttacgcccataaactccctacaaccgaacgcgaacaacgcgaactaaaacgaaaccgaaacgccgaaaaacgacgcccgaaccaccccttactccctacaaataacgctaacgctaatatacctaaccgacctactcatactactcaccgtattcgacaacgtactcgtcatcatcgccgtattcacgaaccgcgcgctcaaaacgccccaaaacctcttcctaatatctctaacctcgaccgacatcctaataaccacgctcgtcatccctttctcgctaaccaacgaaatcataaactactaatacttcgacaaaacttaatacgaaatctacctaacgctcgacgtactcttctacacgtcgtccatcgtacacctatacgccatcaacctaaaccgctactaatccatcacacaaaccatcgaatacaacctaaaacgcacgccgcgccgcatcaaaaccatcatcatcaccgtataaatcatctcgaccgtcatctccttcccgccgctcatctccatcgaaaaaaaaaacgacgacgacgacccgcaaccgaccgaaccgcgctacgaaatcaacgaccaaaaataatacgtcatctcgtcgtacatcgactccttcttcgctccctacctcatcataatcctaatctacgtacgcatctaccaaatcgccaaacgtcgcacccgcgtaccacccaaccgccgaaatccgaacgccgtcgccgcgccgccgaaaaacaccgaacgcaaacccaacgatctaaaccccgaacgcaacgcgaacccgaaaaacgcaaaaaccgaaccgctacccacccaactcaacgacgcccctaacgaacccgcgccgaccgaaccgcgcgacaccgacgcgctaaacctaaaaaaaaactcgtcttccgaccacgccgaacgacctccaaaaccccgcaaacccgaacgcgatccccgaaacaaaaacaaaacccgaacgaaccaaataaaaccgaacgacaacctaccgcgacgcgaaccgaaaacgacgaaaatcgaaacgccgactacaaaaccgaaaaaaaaacgcgtcgaaactaccaaaacgtcgcgctaacgcgaacgacaaaaccgcgaaaaacgcttcacgttcgtactaaccgtaatcatcgaaatattcgtaatatactaattccccttcttcttcacctacacgctcacgaccgtcgaatactccgtaccacgcacgctcttcaaattcttcttctaattcgactactacaacaactcgttaaacccgatcatctacaccatcttcaaccacgatttccgccgcgccttcaaaaaaatcctctatcgaaaaaacaaaaaacgaatcgtataaaatttccgctaacgcccgcgtaaactcacgctaactacaaacaacgaaaaacatcgaaaaatacttaaccccaaaacactcaaaaacccgaacgctacctactctacgtttcctcgtcta

SEQ ID NO: 34093 - DNA, 771 bp, Artificial Sequence
  chemically treated genomic DNA (Homo sapiens) CpG-island No: 34093
tattaggcgtcgttttcgtttttcgtagcgtttaggttttcgttttcgtcgcggagttatagtcggagttggagtcgaggcggcggcgggacgcggtcggtcggataaattttttgttaggttgcggatagcgggcggtaggagtcggcgcgagcggttttaggaatttacggtttttgcgcgttttcgcgattttttttcgcgttcggcgaatatagtcgggcgtttcggagggcggcgggtatgcgttcgggagatgcggagttttcgttgtagcgcgatatgcgcgattagatcggttttttttaaggtgagcgcgcgtgcggatagggattttgcgtttttgtggggaattgtgtatttcgggaggtttaagtaggtcggggcgttgtttcggtcgttgtcgcgggagggaggggtcgtttcggggtttagagttcggatttcggtttcgtcgttttcgcggcgcgtttagtattagcggatggggttcgtacgattttcgatttcggtttgtggcgcgtttttttattcggagtttttagtttaatttggcgattatagtggtagtgtttacgttttttttcggtaaataggaggagggcgcgcgtgtttgcgggtggttatagtgcgcgggggtcggcggtagggcggcgtacgtgaaagcgggcgatatagagagggggtgtaggtcgcgcgtggggggttgcgtttattcgaggttggaggttggagtttttgaagaaagtggttcgagttgtgttaattttg

SEQ ID NO: 34094 - DNA, 771 bp, Artificial Sequence
  chemically treated genomic DNA (Homo sapiens) CpG-island No: 34094
caaaattaacacaactcgaaccactttcttcaaaaactccaacctccaacctcgaataaacgcaaccccccacgcgcgacctacaccccctctctatatcgcccgctttcacgtacgccgccctaccgccgacccccgcgcactataaccacccgcaaacacgcgcgccctcctcctatttaccgaaaaaaaacgtaaacactaccactataatcgccaaattaaactaaaaactccgaataaaaaaacgcgccacaaaccgaaatcgaaaatcgtacgaaccccatccgctaatactaaacgcgccgcgaaaacgacgaaaccgaaatccgaactctaaaccccgaaacgacccctccctcccgcgacaacgaccgaaacaacgccccgacctacttaaacctcccgaaatacacaattccccacaaaaacgcaaaatccctatccgcacgcgcgctcaccttaaaaaaaaccgatctaatcgcgcatatcgcgctacaacgaaaactccgcatctcccgaacgcatacccgccgccctccgaaacgcccgactatattcgccgaacgcgaaaaaaaatcgcgaaaacgcgcaaaaaccgtaaattcctaaaaccgctcgcgccgactcctaccgcccgctatccgcaacctaacaaaaaatttatccgaccgaccgcgtcccgccgccgcctcgactccaactccgactataactccgcgacgaaaacgaaaacctaaacgctacgaaaaacgaaaacgacgcctaata

SEQ ID NO: 34095 - DNA, 771 bp, Artificial Sequence
  chemically treated genomic DNA (Homo sapiens) CpG-island No: 34095
tagagttggtataattcgagttattttttttaaaggttttagtttttagtttcgagtgggcgtagttttttacgcgcggtttgtattttttttttgtgtcgttcgtttttacgtacgtcgttttgtcgtcggttttcgcgtattgtagttattcgtagatacgcgcgttttttttttgtttatcgagagggagcgtgagtattgttattgtggtcgttaagttgggttggggatttcgggtgaggggacgcgttataggtcggggtcgggggtcgtacgggttttattcgttggtattgggcgcgtcgcgggggcggcggggtcggggttcggattttgagtttcggagcggtttttttttttcgcggtagcggtcgaggtagcgtttcggtttgtttgggtttttcggggtgtatagttttttataggggcgtagggtttttgttcgtacgcgcgtttattttggggggggtcggtttggtcgcgtatatcgcgttgtagcggaggtttcgtatttttcgggcgtatgttcgtcgtttttcggggcgttcggttgtattcgtcgggcgcgaagaagggtcgcggggacgcgtagagatcgtgggtttttgaagtcgttcgcgtcggtttttgtcgttcgttgttcgtagtttagtaggaaatttgttcggtcggtcgcgtttcgtcgtcgtttcggttttagtttcggttgtggtttcgcggcgggggcgggggtttgggcgttgcgaggagcgggggcgacgtttggtg

SEQ ID NO: 34096 - DNA, 771 bp, Artificial Sequence
  chemically treated genomic DNA (Homo sapiens) CpG-island No: 34096
caccaaacgtcgcccccgctcctcgcaacgcccaaacccccgcccccgccgcgaaaccacaaccgaaactaaaaccgaaacgacgacgaaacgcgaccgaccgaacaaatttcctactaaactacgaacaacgaacgacaaaaaccgacgcgaacgacttcaaaaacccacgatctctacgcgtccccgcgacccttcttcgcgcccgacgaatacaaccgaacgccccgaaaaacgacgaacatacgcccgaaaaatacgaaacctccgctacaacgcgatatacgcgaccaaaccgaccccccccaaaataaacgcgcgtacgaacaaaaaccctacgcccctataaaaaactatacaccccgaaaaacccaaacaaaccgaaacgctacctcgaccgctaccgcgaaaaaaaaaaaccgctccgaaactcaaaatccgaaccccgaccccgccgcccccgcgacgcgcccaataccaacgaataaaacccgtacgacccccgaccccgacctataacgcgtcccctcacccgaaatccccaacccaacttaacgaccacaataacaatactcacgctccctctcgataaacaaaaaaaaaacgcgcgtatctacgaataactacaatacgcgaaaaccgacgacaaaacgacgtacgtaaaaacgaacgacacaaaaaaaaaatacaaaccgcgcgtaaaaaactacgcccactcgaaactaaaaactaaaacctttaaaaaaaataactcgaattataccaactcta

SEQ ID NO: 34097 - DNA, 511 bp, Artificial Sequence
  chemically treated genomic DNA (Homo sapiens) CpG-island No: 34097
gttattcgttttcgtgggtttttttttcgttttgttttgttttgcggcgttttttgtcggtttcgcgtgttttttgcggttgtttttttttttcgggttcgttcgtttcgcgcggttgttttggagagggacgcgtaggttacgttatcgcggacgggtcggattcggtttttggacgcggaatagagattttttgatttagttatttttagattgagtttcgtagagtgcgtttttatttttttgtttcgacgaaggttttagagacgttgcggataatattagtatgtcgagcgagtagagcgcgtcgggggttttatttagggtttcgcgttcggggatttagaagttttttggcgcggtgattaaaaagggagagcgcgcggttaaagagaagttagcgatcgttttgtttttcgtgggggaggaggagtttaaaagttttggtacgttggcgtcggggtttggggatcgggtttttaggttgcgttttttcgggtttttattagtt

SEQ ID NO: 34098 - DNA, 511 bp, Artificial Sequence
  chemically treated genomic DNA (Homo sapiens) CpG-island No: 34098
aactaataaaaacccgaaaaaacgcaacctaaaaacccgatccccaaaccccgacgccaacgtaccaaaacttttaaactcctcctcccccacgaaaaacaaaacgatcgctaacttctctttaaccgcgcgctctccctttttaatcaccgcgccaaaaaacttctaaatccccgaacgcgaaaccctaaataaaacccccgacgcgctctactcgctcgacatactaatattatccgcaacgtctctaaaaccttcgtcgaaacaaaaaaataaaaacgcactctacgaaactcaatctaaaaataactaaatcaaaaaatctctattccgcgtccaaaaaccgaatccgacccgtccgcgataacgtaacctacgcgtccctctccaaaacaaccgcgcgaaacgaacgaacccgaaaaaaaaaaacaaccgcaaaaaacacgcgaaaccgacaaaaaacgccgcaaaacaaaacaaaacgaaaaaaaaacccacgaaaacgaataac

SEQ ID NO: 34099 - DNA, 511 bp, Artificial Sequence
  chemically treated genomic DNA (Homo sapiens) CpG-island No: 34099
agttagtgggaattcgggaagacgtagtttggaagttcgatttttaaatttcggcgttagcgtattagggtttttgggtttttttttttttacgggaggtagaacggtcgttggtttttttttggtcgcgcgttttttttttttggttatcgcgttagaagatttttgggttttcggacgcggggttttgggtgaggttttcggcgcgttttgttcgttcgatatgttggtgttgttcgtagcgtttttgggattttcgtcggggtaggaaggtaagaacgtattttacggggtttagtttgggggtggttgaattaggggatttttgtttcgcgtttagggatcggattcgattcgttcgcggtggcgtagtttacgcgtttttttttaagataatcgcgcgaggcgggcgggttcgagggaaaggggtaatcgtagagagtacgcggggtcgatagggggcgtcgtagggtagagtaaggcgaggggagagtttacgagggcgggtggt

SEQ ID NO: 34100 - DNA, 511 bp, Artificial Sequence
  chemically treated genomic DNA (Homo sapiens) CpG-island No: 34100
accacccgccctcgtaaactctcccctcgccttactctaccctacgacgccccctatcgaccccgcgtactctctacgattacccctttccctcgaacccgcccgcctcgcgcgattatcttaaaaaaaaacgcgtaaactacgccaccgcgaacgaatcgaatccgatccctaaacgcgaaacaaaaatcccctaattcaaccacccccaaactaaaccccgtaaaatacgttcttaccttcctaccccgacgaaaatcccaaaaacgctacgaacaacaccaacatatcgaacgaacaaaacgcgccgaaaacctcacccaaaaccccgcgtccgaaaacccaaaaatcttctaacgcgataaccaaaaaaaaaaaacgcgcgaccaaaaaaaaaccaacgaccgttctacctcccgtaaaaaaaaaaaaacccaaaaaccctaatacgctaacgccgaaatttaaaaatcgaacttccaaactacgtcttcccgaattcccactaact

SEQ ID NO: 34101 - DNA, 640 bp, Artificial Sequence
  chemically treated genomic DNA (Homo sapiens) CpG-island No: 34101
gcgttcgggttacgtattttttaggtgcgtgtttcgtggggattgcgtttcggttggtcgttcgtttcgagtcgaagtcggacgtcggtaggtttttaagcggggtgtttatcgggtcggtttttttgggcgttggtaggttgtcgcgtttaatgtggataggagtgtcgggtcgagggtaagggaagaacgtggtttttttcgattttttcggttttttttattttttttaagtttttttaattttaaagagtagtttcgcggtgtttgcgaagtttttaacgggggaggcggcgttgggagtaggtcgggagcgcgggcgggggtttagcgggtgtagcgggaggaaggggcgggggcgcgcggttttaaggcgttagtgcggaagcgtttagcgggtcgggggttttttttcgcggggtttttcggggcggattcgggtgcggcggtcgagatgcgggcggtggagggggtaggtttcgattttttcgtttttttcgcgtcgcgggtcgtcggtttgagttgggaaaggcgcggcgggcggttggcgaggaaggaggtttttgtttttttattttgtttttcgggttaggtttttagttggagtcgtattgtcgttcgggggtcggggcgaaggttt

SEQ ID NO: 34102 - DNA, 640 bp, Artificial Sequence
  chemically treated genomic DNA (Homo sapiens) CpG-island No: 34102
aaaccttcgccccgacccccgaacgacaatacgactccaactaaaaacctaacccgaaaaacaaaataaaaaaacaaaaacctccttcctcgccaaccgcccgccgcgcctttcccaactcaaaccgacgacccgcgacgcgaaaaaaacgaaaaaatcgaaacctaccccctccaccgcccgcatctcgaccgccgcacccgaatccgccccgaaaaaccccgcgaaaaaaaacccccgacccgctaaacgcttccgcactaacgccttaaaaccgcgcgcccccgccccttcctcccgctacacccgctaaacccccgcccgcgctcccgacctactcccaacgccgcctcccccgttaaaaacttcgcaaacaccgcgaaactactctttaaaattaaaaaaacttaaaaaaaataaaaaaaaccgaaaaaatcgaaaaaaaccacgttcttcccttaccctcgacccgacactcctatccacattaaacgcgacaacctaccaacgcccaaaaaaaccgacccgataaacaccccgcttaaaaacctaccgacgtccgacttcgactcgaaacgaacgaccaaccgaaacgcaatccccacgaaacacgcacctaaaaaatacgtaacccgaacgc

SEQ ID NO: 34103 - DNA, 640 bp, Artificial Sequence
  chemically treated genomic DNA (Homo sapiens) CpG-island No: 34103
ggattttcgtttcggttttcgagcggtagtgcggttttagttggaggtttggttcgggaagtaaagtgaaaggatagaggttttttttttcgttagtcgttcgtcgcgttttttttagtttaggtcggcggttcgcggcgcggagggagcgaaagagtcggggtttgttttttttatcgttcgtatttcggtcgtcgtattcgggttcgtttcgggaggtttcgcgggagggaattttcggttcgttgggcgttttcgtattgacgttttggggtcgcgcgttttcgtttttttttttcgttatattcgttgggttttcgttcgcgttttcggtttgtttttagcgtcgtttttttcgttagaaatttcgtagatatcgcgaagttgttttttggagttggagaaatttaggaagaatgggaaaagtcgaggaagtcggggaggattacgttttttttttgttttcggttcgatatttttgtttatattggacgcggtagtttgttagcgtttaggagagtcgattcggtggatatttcgtttggggatttgtcggcgttcggtttcggttcgaggcgggcggttagtcggggcgtaatttttacgggatacgtatttaggggatgcgtgattcggacgt

SEQ ID NO: 34104 - DNA, 640 bp, Artificial Sequence
  chemically treated genomic DNA (Homo sapiens) CpG-island No: 34104
acgtccgaatcacgcatcccctaaatacgtatcccgtaaaaattacgccccgactaaccgcccgcctcgaaccgaaaccgaacgccgacaaatccccaaacgaaatatccaccgaatcgactctcctaaacgctaacaaactaccgcgtccaatataaacaaaaatatcgaaccgaaaacaaaaaaaaaacgtaatcctccccgacttcctcgacttttcccattcttcctaaatttctccaactccaaaaaacaacttcgcgatatctacgaaatttctaacgaaaaaaacgacgctaaaaacaaaccgaaaacgcgaacgaaaacccaacgaatataacgaaaaaaaaaaacgaaaacgcgcgaccccaaaacgtcaatacgaaaacgcccaacgaaccgaaaattccctcccgcgaaacctcccgaaacgaacccgaatacgacgaccgaaatacgaacgataaaaaaaacaaaccccgactctttcgctccctccgcgccgcgaaccgccgacctaaactaaaaaaaacgcgacgaacgactaacgaaaaaaaaaacctctatcctttcactttacttcccgaaccaaacctccaactaaaaccgcactaccgctcgaaaaccgaaacgaaaatcc

SEQ ID NO: 34105 - DNA, 612 bp, Artificial Sequence
  chemically treated genomic DNA (Homo sapiens) CpG-island No: 34105
ttgcggcggcggttttggttgtaaatcgtcgtcgtgtggttgttattggtaatcgagtttttgtcgagcgcgtagtttcgtagtttttggaacgaaggtggtaagggaagcggttgtcgcggcgcggtcgcgtcggtttggtagtttatagggttttcgttttcgttcgcgtttcgtagttttttcgggttttgattgtagttgtgcggtaaagacggtcgaagggtttttaggtgggggtttcgttgtttcgaaagcgttaagtgattggcggttttcgcgaagagtaatatggtagttcgggttttaagaatgggatttttgcgttttttgcgggcggggggggcgggttttagtttttaggtcgggagtgagttttgttcgcgttttcgatttttagttaggtcgagttaagggagtcgcgcgcgttgtttcgtttcgttttcggttttcggttttttgttttttattgggcgggcgttttacgtttcgggggttttttatgaaaatttcgaagtttcggttattcgaggtggtgatatcggttttgttagtatttaatagaaatgattggtatttttcgttttcggtggggatcgggtagagtaggag

SEQ ID NO: 34106 - DNA, 612 bp, Artificial Sequence
  chemically treated genomic DNA (Homo sapiens) CpG-island No: 34106
ctcctactctacccgatccccaccgaaaacgaaaaataccaatcatttctattaaatactaacaaaaccgatatcaccacctcgaataaccgaaacttcgaaattttcataaaaaacccccgaaacgtaaaacgcccgcccaataaaaaacaaaaaaccgaaaaccgaaaacgaaacgaaacaacgcgcgcgactcccttaactcgacctaactaaaaatcgaaaacgcgaacaaaactcactcccgacctaaaaactaaaacccgccccccccgcccgcaaaaaacgcaaaaatcccattcttaaaacccgaactaccatattactcttcgcgaaaaccgccaatcacttaacgctttcgaaacaacgaaacccccacctaaaaacccttcgaccgtctttaccgcacaactacaatcaaaacccgaaaaaactacgaaacgcgaacgaaaacgaaaaccctataaactaccaaaccgacgcgaccgcgccgcgacaaccgcttcccttaccaccttcgttccaaaaactacgaaactacgcgctcgacaaaaactcgattaccaataacaaccacacgacgacgatttacaaccaaaaccgccgccgcaa

SEQ ID NO: 34107 - DNA, 612 bp, Artificial Sequence
  chemically treated genomic DNA (Homo sapiens) CpG-island No: 34107
tttttgttttgttcggtttttatcggggacggggaatgttagttatttttgttgagtgttagtagggtcggtgttattatttcgggtggtcgaggtttcgaggtttttatgaaaagttttcgaagcgtgaggcgttcgtttagtggagaataaagggtcgagggtcgaaggcgaggcgaggtagcgcgcgcggtttttttggttcgatttagttgggagtcgggggcgcgggtagggtttattttcggtttagaaattggagttcgtttttttcgttcgtaggggacgtagggattttatttttgaagttcgagttgttatgttgtttttcgcggaggtcgttagttatttgacgttttcgagatagcgaagtttttatttgagagtttttcggtcgtttttgtcgtatagttgtagttaaggttcggagggattgcgggacgcgggcgggagcgagagttttgtgggttgttaagtcggcgcggtcgcgtcgcggtagtcgttttttttgttattttcgttttaggggttgcggggttgcgcgttcggtagaggttcggttgttagtagtaattatacgacggcgatttgtagttagggtcgtcgtcgtag

SEQ ID NO: 34108 - DNA, 612 bp, Artificial Sequence
  chemically treated genomic DNA (Homo sapiens) CpG-island No: 34108
ctacgacgacgaccctaactacaaatcgccgtcgtataattactactaacaaccgaacctctaccgaacgcgcaaccccgcaacccctaaaacgaaaataacaaaaaaaacgactaccgcgacgcgaccgcgccgacttaacaacccacaaaactctcgctcccgcccgcgtcccgcaatccctccgaaccttaactacaactatacgacaaaaacgaccgaaaaactctcaaataaaaacttcgctatctcgaaaacgtcaaataactaacgacctccgcgaaaaacaacataacaactcgaacttcaaaaataaaatccctacgtcccctacgaacgaaaaaaacgaactccaatttctaaaccgaaaataaaccctacccgcgcccccgactcccaactaaatcgaaccaaaaaaaccgcgcgcgctacctcgcctcgccttcgaccctcgaccctttattctccactaaacgaacgcctcacgcttcgaaaacttttcataaaaacctcgaaacctcgaccacccgaaataataacaccgaccctactaacactcaacaaaaataactaacattccccgtccccgataaaaaccgaacaaaacaaaaa

SEQ ID NO: 34109 - DNA, 877 bp, Artificial Sequence
  chemically treated genomic DNA (Homo sapiens) CpG-island No: 34109
ttgttttcgaattaggtttttttggcgcgtggggttttttcggcgtttggtttcgattcgcgtcgtagttaggatattacggtaatttggggtcgttttgtaaggagtttcgattttcgggtagtgtagggatattcgacggcgcgcgatgtttcggcggtttcgcgagtttggcgcgttgagagttttagtagttcgagttttcgagttcgggcgttttcgcgtcgtcgtttcgtttagtgcgtttaggtatcgcggtcgtgacgttacgttcgggattggtcgttgtagtaagacggtcgcgtttcggtttcggtaggttgttcgggagacgcgggtatatagagaagcggtttcggtcggaggtcgagtcgtcgttacgatcgtttttttggtggattcgtaggtcgagcggttttttcgtagagttcgaggagggtagacggcggcgggggcgttatgagttagaggtaggtgttgtaaggtagggtcgaggcgggtaggtgttttaattagttggcgtcgaggagattcgggtgcggtgggttttatcgattttttttttcgtagtgttcgagtaatattagaaggttaggatttagttcgtgtagatggtggcggagttggcgattagattttaaaatatcgagacgttgtagaacgcgggtgagttcggagttcgaattttcgtcgtttttcgcgtattgagttttcgacgttttcgtttcgttgttttgttcgtggagtttttggggagtcgtagtgtggggatcggagttcgtaaaagtatttattttttttagcgggtttttgggggttaggtcgagagggtgaagtttttagatggttgtgggaggtgcgcgttgtttttgttttt

SEQ ID NO: 34110 - DNA, 877 bp, Artificial Sequence
  chemically treated genomic DNA (Homo sapiens) CpG-island No: 34110
aaaaacaaaaacaacgcgcacctcccacaaccatctaaaaacttcaccctctcgacctaacccccaaaaacccgctaaaaaaaataaatacttttacgaactccgatccccacactacgactccccaaaaactccacgaacaaaacaacgaaacgaaaacgtcgaaaactcaatacgcgaaaaacgacgaaaattcgaactccgaactcacccgcgttctacaacgtctcgatattttaaaatctaatcgccaactccgccaccatctacacgaactaaatcctaaccttctaatattactcgaacactacgaaaaaaaaaatcgataaaacccaccgcacccgaatctcctcgacgccaactaattaaaacacctacccgcctcgaccctaccttacaacacctacctctaactcataacgcccccgccgccgtctaccctcctcgaactctacgaaaaaaccgctcgacctacgaatccaccaaaaaaacgatcgtaacgacgactcgacctccgaccgaaaccgcttctctatatacccgcgtctcccgaacaacctaccgaaaccgaaacgcgaccgtcttactacaacgaccaatcccgaacgtaacgtcacgaccgcgatacctaaacgcactaaacgaaacgacgacgcgaaaacgcccgaactcgaaaactcgaactactaaaactctcaacgcgccaaactcgcgaaaccgccgaaacatcgcgcgccgtcgaatatccctacactacccgaaaatcgaaactccttacaaaacgaccccaaattaccgtaatatcctaactacgacgcgaatcgaaaccaaacgccgaaaaaaccccacgcgccaaaaaaacctaattcgaaaacaa

SEQ ID NO: 34111 - DNA, 877 bp, Artificial Sequence
  chemically treated genomic DNA (Homo sapiens) CpG-island No: 34111
ggaaatagggataacgcgtattttttataattatttggaagttttattttttcggtttgatttttaaagattcgttgaaaagaatggatgtttttgcgaatttcggtttttatattgcggttttttaagagttttacgggtagggtagcggggcggaggcgtcggggatttagtgcgcggggggcgacgggggttcgggtttcgggtttattcgcgttttgtagcgtttcgatgttttggggtttagtcgttagtttcgttattatttgtacgaattgggttttggttttttggtattgttcgaatattgcgggagagagagtcggtggagtttatcgtattcgggttttttcggcgttagttagttagggtatttgttcgtttcggttttattttgtagtatttgtttttgatttatggcgttttcgtcgtcgtttgtttttttcgagttttgcggggaagtcgttcggtttgcgagtttattaagggggcgatcgtggcgacgattcggttttcgatcggagtcgtttttttgtgtattcgcgtttttcgggtaatttatcggaatcggaacgcggtcgttttgttgtaacggttagtttcgggcgtgacgttacggtcgcggtgtttgggcgtattgagcggggcggcggcgcgaagacgttcgagttcgaggattcggattgttggggtttttagcgcgttaggttcgcggagtcgtcgggatatcgcgcgtcgtcgagtatttttgtattgttcggaggtcggagttttttataaagcgattttagattgtcgtggtattttgattgcggcgcgggtcgggattaagcgtcgggagagttttacgcgttaagggagtttggttcgagggtag

SEQ ID NO: 34112 - DNA, 877 bp, Artificial Sequence
  chemically treated genomic DNA (Homo sapiens) CpG-island No: 34112
ctaccctcgaaccaaactcccttaacgcgtaaaactctcccgacgcttaatcccgacccgcgccgcaatcaaaataccacgacaatctaaaatcgctttataaaaaactccgacctccgaacaatacaaaaatactcgacgacgcgcgatatcccgacgactccgcgaacctaacgcgctaaaaaccccaacaatccgaatcctcgaactcgaacgtcttcgcgccgccgccccgctcaatacgcccaaacaccgcgaccgtaacgtcacgcccgaaactaaccgttacaacaaaacgaccgcgttccgattccgataaattacccgaaaaacgcgaatacacaaaaaaacgactccgatcgaaaaccgaatcgtcgccacgatcgcccccttaataaactcgcaaaccgaacgacttccccgcaaaactcgaaaaaaacaaacgacgacgaaaacgccataaatcaaaaacaaatactacaaaataaaaccgaaacgaacaaataccctaactaactaacgccgaaaaaacccgaatacgataaactccaccgactctctctcccgcaatattcgaacaataccaaaaaaccaaaacccaattcgtacaaataataacgaaactaacgactaaaccccaaaacatcgaaacgctacaaaacgcgaataaacccgaaacccgaacccccgtcgccccccgcgcactaaatccccgacgcctccgccccgctaccctacccgtaaaactcttaaaaaaccgcaatataaaaaccgaaattcgcaaaaacatccattcttttcaacgaatctttaaaaatcaaaccgaaaaaataaaacttccaaataattataaaaaatacgcgttatccctatttcc

SEQ ID NO: 34113 - DNA, 551 bp, Artificial Sequence
  chemically treated genomic DNA (Homo sapiens) CpG-island No: 34113
attcgtgtagtagcggcggttttcgcgttttttttggttagagttaggcgtaggtcggtttgcggtgtcgtcgtttattggtcgcggcgcgggcgttgttatgttggttggaagcggatttttttgtgtcgtggaaattggcggtggtcgcggtcgtcgagtcggtttgcgtagttttttgcgttttttcgtttggattttggtattgagaggcggtggtcggcgggatggagaaaagtaggatgaatttgtttaaggggtcggatacgttttgtttcgataaggacgagtttatgaaggtgcgcgcggcgttcgtttttcggagtcgggttatgagggtgtttttgttttgtgttttttgtggcggttttttcggtcggttgtttttgtttgcgtacgtttagtgttaggtttttcgtcgagatttcgttgtatttcgtaatgagttttttggcgttaggtttggcgggtgtagtttggagaaagtatttttgtaaaatcgtgcgtgttatatggaaaggtttgaaagttttgggtaagtggttttgagt

SEQ ID NO: 34114 - DNA, 551 bp, Artificial Sequence
  chemically treated genomic DNA (Homo sapiens) CpG-island No: 34114
actcaaaaccacttacccaaaactttcaaacctttccatataacacgcacgattttacaaaaatactttctccaaactacacccgccaaacctaacgccaaaaaactcattacgaaatacaacgaaatctcgacgaaaaacctaacactaaacgtacgcaaacaaaaacaaccgaccgaaaaaaccgccacaaaaaacacaaaacaaaaacaccctcataacccgactccgaaaaacgaacgccgcgcgcaccttcataaactcgtccttatcgaaacaaaacgtatccgaccccttaaacaaattcatcctacttttctccatcccgccgaccaccgcctctcaataccaaaatccaaacgaaaaaacgcaaaaaactacgcaaaccgactcgacgaccgcgaccaccgccaatttccacgacacaaaaaaatccgcttccaaccaacataacaacgcccgcgccgcgaccaataaacgacgacaccgcaaaccgacctacgcctaactctaaccaaaaaaaacgcgaaaaccgccgctactacacgaat

SEQ ID NO: 34115 - DNA, 551 bp, Artificial Sequence
  chemically treated genomic DNA (Homo sapiens) CpG-island No: 34115
gtttaaaattatttgtttagaatttttaggtttttttatgtaatacgtacgattttatagaagtgttttttttaggttgtattcgttaaatttgacgttaaaagatttattgcgaagtgtagcgaggtttcggcggaggatttgatattgagcgtgcgtaggtaggagtagtcgatcgaagagatcgttatagagggtatagggtagaggtatttttatggttcggtttcggggagcggacgtcgcgcgtatttttatgaattcgtttttgtcgaagtagagcgtgttcggttttttgggtaggtttattttatttttttttatttcgtcggttatcgttttttagtgttaagatttaagcgagaaaacgtaggaggttgcgtagatcgattcggcggtcgcggttatcgttagtttttacggtataggggggttcgtttttagttaatatggtagcgttcgcgtcgcggttaatgaacgacggtatcgtaagtcggtttgcgtttggttttggttaagaggggcgcgggggtcgtcgttgttgtacgggt

SEQ ID NO: 34116 - DNA, 551 bp, Artificial Sequence
  chemically treated genomic DNA (Homo sapiens) CpG-island No: 34116
acccgtacaacaacgacgacccccgcgcccctcttaaccaaaaccaaacgcaaaccgacttacgataccgtcgttcattaaccgcgacgcgaacgctaccatattaactaaaaacgaacccccctataccgtaaaaactaacgataaccgcgaccgccgaatcgatctacgcaacctcctacgttttctcgcttaaatcttaacactaaaaaacgataaccgacgaaataaaaaaaaataaaataaacctacccaaaaaaccgaacacgctctacttcgacaaaaacgaattcataaaaatacgcgcgacgtccgctccccgaaaccgaaccataaaaatacctctaccctataccctctataacgatctcttcgatcgactactcctacctacgcacgctcaatatcaaatcctccgccgaaacctcgctacacttcgcaataaatcttttaacgtcaaatttaacgaatacaacctaaaaaaaacacttctataaaatcgtacgtattacataaaaaaacctaaaaattctaaacaaataattttaaac

SEQ ID NO: 34117 - DNA, 1290 bp, Artificial Sequence
  chemically treated genomic DNA (Homo sapiens) CpG-island No: 34117
gggcggcgagggtatcggagcggatgcgggttttggggtagacgcgggcgttggggcgggggtagacgggttattggaatttttagcgcgttcgtcgtttagggtggcgttggtcgtttttcgttataggtgttttagtaggcgcgcgtttacggcgggttttaggatacggtaggcgggtagtacgcgggttaggcgcgttatataggcgttgtagttttcgcggtagttgtcgtaaggtattgcgggcggagagtcgcgtgaggcgcggggtagggtgtcgggtgcggggtgtagagcgcgcggtagggtagggagggtttatttacggggcgttgtcgtgggttatgaggacgtaggtagtttttgtaggaagcgtacggttatttttaggacgtttgttttttttagtttcgagtagttggagttttgcgttcggttacgaggaagagcgatagagaattattaagatagaattttggtcggttatcgtgcgtattttcgttttagtcgggagttgggtgtggggcgcgtcgtggtttgttgggggttcgtttcgacgcgtttattttatttaggtttcgtttcgggcgtcgcgcggaattttttggtgggtttttttcgtaggagtatttcgtttttttgttttcgtttcgcgttttaggattttttgtttttcgttcgggcgcgtttatttttcggtttagtagcggtaggatgagttttttaagttggtttaggttttggttgatgcgcgcgcgtcggcgtttttttagtagcggttttaggttttgcggacgggcggcgcggtggttagacgggttttcggagtttttagtttcgtttttagttttcggtatttattttgcgtagtttcgtcgcgttttttgttcggcgaggtagttttatgtttcgcggggaagcggtggtagttgcgagttttacgtaaagggaaatcgaggttcgaaatgaggtttcgggcgcggttcgggttggtgttagacgagtgcgcgtttcgttcgcggtcgagttttaagggagcggttcgttcgtttcgtttcgtttcgcggagttcggtcgttcgttggttttattttttgtttttgtttttgcgtagggtggagtcgggaggggagatcgcgacgttttcggggatttcgtttttcgtttttgcgttttgtttatcgcggggtggcggtttttagtttttttcgagtatttgcgggagagtggtaaaggcgttatcgggggttttcgttgcgtgatttcgagggtaggagggttaggtgg

SEQ ID NO: 34118 - DNA, 1290 bp, Artificial Sequence
  chemically treated genomic DNA (Homo sapiens) CpG-island No: 34118
ccacctaaccctcctaccctcgaaatcacgcaacgaaaacccccgataacgcctttaccactctcccgcaaatactcgaaaaaaactaaaaaccgccaccccgcgataaacaaaacgcaaaaacgaaaaacgaaatccccgaaaacgtcgcgatctcccctcccgactccaccctacgcaaaaacaaaaacaaaaaataaaaccaacgaacgaccgaactccgcgaaacgaaacgaaacgaacgaaccgctcccttaaaactcgaccgcgaacgaaacgcgcactcgtctaacaccaacccgaaccgcgcccgaaacctcatttcgaacctcgatttccctttacgtaaaactcgcaactaccaccgcttccccgcgaaacataaaactacctcgccgaacaaaaaacgcgacgaaactacgcaaaataaataccgaaaactaaaaacgaaactaaaaactccgaaaacccgtctaaccaccgcgccgcccgtccgcaaaacctaaaaccgctactaaaaaaacgccgacgcgcgcgcatcaaccaaaacctaaaccaacttaaaaaactcatcctaccgctactaaaccgaaaaataaacgcgcccgaacgaaaaacaaaaaatcctaaaacgcgaaacgaaaacaaaaaaacgaaatactcctacgaaaaaaacccaccaaaaaattccgcgcgacgcccgaaacgaaacctaaataaaataaacgcgtcgaaacgaacccccaacaaaccacgacgcgccccacacccaactcccgactaaaacgaaaatacgcacgataaccgaccaaaattctatcttaataattctctatcgctcttcctcgtaaccgaacgcaaaactccaactactcgaaactaaaaaaaacaaacgtcctaaaaataaccgtacgcttcctacaaaaactacctacgtcctcataacccacgacaacgccccgtaaataaaccctccctaccctaccgcgcgctctacaccccgcacccgacaccctaccccgcgcctcacgcgactctccgcccgcaataccttacgacaactaccgcgaaaactacaacgcctatataacgcgcctaacccgcgtactacccgcctaccgtatcctaaaacccgccgtaaacgcgcgcctactaaaacacctataacgaaaaacgaccaacgccaccctaaacgacgaacgcgctaaaaattccaataacccgtctacccccgccccaacgcccgcgtctaccccaaaacccgcatccgctccgataccctcgccgccc

SEQ ID NO: 34119 - DNA, 1290 bp, Artificial Sequence
  chemically treated genomic DNA (Homo sapiens) CpG-island No: 34119
ttatttggtttttttgttttcggggttacgtagcgaaggttttcgatggcgtttttattattttttcgtaggtgttcggggaaaattgggggtcgttatttcgcggtagataggacgtaaaggcggggagcgggattttcgggggcgtcgcggttttttttttcggttttattttgcgtaggaataaaggtaggaggtgggattagcgggcggtcggatttcgcggggcggggcggggcgggcgagtcgtttttttaaagttcggtcgcgggcggggcgcgtattcgtttggtattagttcgggtcgcgttcgggattttatttcggatttcggtttttttttgcgtggggttcgtagttgttatcgttttttcgcggagtatggggttgtttcgtcgggtaggggacgcggcggagttgcgtaaggtgggtatcggggattgggggcggggttggggatttcggggattcgtttaattatcgcgtcgttcgttcgtagagtttgaagtcgttgttggagaagcgtcggcgcgcgcgtattaattagagtttgagttagtttaaggggtttattttgtcgttgttgggtcgggaggtgagcgcgttcgggcggagggtagagggttttggggcgcggagcgggggtagggggacggggtgtttttgcgggaggaatttattagggggtttcgcgcggcgttcgaggcggagtttgggtggggtgggcgcgtcggagcggatttttagtaggttacggcgcgttttatatttagttttcgattagagcgagggtgcgtacggtagtcggttaaagttttgttttggtggttttttgtcgttttttttcgtggtcgggcgtagaattttaattgttcgaagttagagaaggtagacgttttggaaatgatcgtgcgttttttgtaggagttgtttgcgtttttatggtttacggtagcgtttcgtgagtgagttttttttgttttgtcgcgcgttttgtatttcgtattcggtattttatttcgcgttttacgcggtttttcgttcgtagtgttttgcgatagttatcgcgagggttatagcgtttgtgtggcgcgtttggttcgcgtgttgttcgtttgtcgtgttttggagttcgtcgtgagcgcgcgtttgttggagtatttgtggcggagagcggttagcgttattttggacggcgggcgcgttggggattttagtggttcgtttgttttcgttttagcgttcgcgtttgttttagagttcgtattcgtttcggtgttttcgtcgttt

SEQ ID NO: 34120 - DNA, 1290 bp, Artificial Sequence
  chemically treated genomic DNA (Homo sapiens) CpG-island No: 34120
aaacgacgaaaacaccgaaacgaatacgaactctaaaacaaacgcgaacgctaaaacgaaaacaaacgaaccactaaaatccccaacgcgcccgccgtccaaaataacgctaaccgctctccgccacaaatactccaacaaacgcgcgctcacgacgaactccaaaacacgacaaacgaacaacacgcgaaccaaacgcgccacacaaacgctataaccctcgcgataactatcgcaaaacactacgaacgaaaaaccgcgtaaaacgcgaaataaaataccgaatacgaaatacaaaacgcgcgacaaaacaaaaaaaactcactcacgaaacgctaccgtaaaccataaaaacgcaaacaactcctacaaaaaacgcacgatcatttccaaaacgtctaccttctctaacttcgaacaattaaaattctacgcccgaccacgaaaaaaaacgacaaaaaaccaccaaaacaaaactttaaccgactaccgtacgcaccctcgctctaatcgaaaactaaatataaaacgcgccgtaacctactaaaaatccgctccgacgcgcccaccccacccaaactccgcctcgaacgccgcgcgaaaccccctaataaattcctcccgcaaaaacaccccgtccccctacccccgctccgcgccccaaaaccctctaccctccgcccgaacgcgctcacctcccgacccaacaacgacaaaataaaccccttaaactaactcaaactctaattaatacgcgcgcgccgacgcttctccaacaacgacttcaaactctacgaacgaacgacgcgataattaaacgaatccccgaaatccccaaccccgcccccaatccccgatacccaccttacgcaactccgccgcgtcccctacccgacgaaacaaccccatactccgcgaaaaaacgataacaactacgaaccccacgcaaaaaaaaaccgaaatccgaaataaaatcccgaacgcgacccgaactaataccaaacgaatacgcgccccgcccgcgaccgaactttaaaaaaacgactcgcccgccccgccccgccccgcgaaatccgaccgcccgctaatcccacctcctacctttattcctacgcaaaataaaaccgaaaaaaaaaaccgcgacgcccccgaaaatcccgctccccgcctttacgtcctatctaccgcgaaataacgacccccaattttccccgaacacctacgaaaaaataataaaaacgccatcgaaaaccttcgctacgtaaccccgaaaacaaaaaaaccaaataa

SEQ ID NO: 34121 - DNA, 511 bp, Artificial Sequence
  chemically treated genomic DNA (Homo sapiens) CpG-island No: 34121
tttacgacgtgatggacgcggttttagcgcggcgttggaaggagttcgtgcgtacgttggggttgcgcgaggtagagatcgaagtcgtggaggtggagatcggtcgttttcgagattagtagtacgagatgtttaagcgttggcgttagtagtagttcgcgggtttcggagtcgtttacgcggttttggagcgtatggggttggacggttgcgtggaagatttgcgtagtcgtttgtagcgcggttcgtgatacggcgtttatttgttatttaggcgttttggtggtttttgtagaagttttaagtacggttatttatgcgtgtagatattttatgttatttattaagtcgttggtacggttttgcgtagtagtattagtcggttttatttttgttcgttttttatcgttttagttaaggcgaagaagtacgaacgaatgtcgagagggggtgaagatattttttaatttttcggtcggagtttggttgagatcgcggtattaaatttgtg

SEQ ID NO: 34122 - DNA, 511 bp, Artificial Sequence
  chemically treated genomic DNA (Homo sapiens) CpG-island No: 34122
cacaaatttaataccgcgatctcaaccaaactccgaccgaaaaattaaaaaatatcttcaccccctctcgacattcgttcgtacttcttcgccttaactaaaacgataaaaaacgaacaaaaataaaaccgactaatactactacgcaaaaccgtaccaacgacttaataaataacataaaatatctacacgcataaataaccgtacttaaaacttctacaaaaaccaccaaaacgcctaaataacaaataaacgccgtatcacgaaccgcgctacaaacgactacgcaaatcttccacgcaaccgtccaaccccatacgctccaaaaccgcgtaaacgactccgaaacccgcgaactactactaacgccaacgcttaaacatctcgtactactaatctcgaaaacgaccgatctccacctccacgacttcgatctctacctcgcgcaaccccaacgtacgcacgaactccttccaacgccgcgctaaaaccgcgtccatcacgtcgtaaa

SEQ ID NO: 34123 - DNA, 511 bp, Artificial Sequence
  chemically treated genomic DNA (Homo sapiens) CpG-island No: 34123
tatagatttaatatcgcgattttagttaaatttcggtcgagaagttgagaaatgtttttattttttttcgatattcgttcgtgttttttcgttttggttggagcgatagggggcgagtaggggtggggtcggttggtgttgttacgtagggtcgtgttagcggtttaataagtgatataaaatgtttatacgtataagtaatcgtatttagggtttttgtaagggttattagagcgtttaggtggtaagtgggcgtcgtgttacgggtcgcgttgtaggcggttgcgtaagttttttacgtagtcgtttagttttatgcgttttagggtcgcgtaaacggtttcgaggttcgcgggttgttgttggcgttagcgtttgagtatttcgtattgttggtttcggaagcggtcgatttttatttttacggtttcgatttttgtttcgcgtagttttagcgtgcgtacgaattttttttagcgtcgcgttgggatcgcgtttattacgtcgtaga

SEQ ID NO: 34124 - DNA, 511 bp, Artificial Sequence
  chemically treated genomic DNA (Homo sapiens) CpG-island No: 34124
tctacgacgtaataaacgcgatcccaacgcgacgctaaaaaaaattcgtacgcacgctaaaactacgcgaaacaaaaatcgaaaccgtaaaaataaaaatcgaccgcttccgaaaccaacaatacgaaatactcaaacgctaacgccaacaacaacccgcgaacctcgaaaccgtttacgcgaccctaaaacgcataaaactaaacgactacgtaaaaaacttacgcaaccgcctacaacgcgacccgtaacacgacgcccacttaccacctaaacgctctaataacccttacaaaaaccctaaatacgattacttatacgtataaacattttatatcacttattaaaccgctaacacgaccctacgtaacaacaccaaccgaccccacccctactcgccccctatcgctccaaccaaaacgaaaaaacacgaacgaatatcgaaaaaaaataaaaacatttctcaacttctcgaccgaaatttaactaaaatcgcgatattaaatctata

SEQ ID NO: 34125 - DNA, 539 bp, Artificial Sequence
  chemically treated genomic DNA (Homo sapiens) CpG-island No: 34125
gatgcggagaatgtcggtttcggttataagttcgttaaagggttcgagtatggcgttgtgttcgcgggagtatttttagttttcgcgggggtagtagtacgagttggcggtcgttagttaaggcggggaagataagagaggggagggaggcgcgtttttttttggtttagttttcgtcgtggcgtcgggagttttttgtatgtttcgggtggtgtaatggtttcgcggggttgcgtttgtagggagggatcgcgtttggtcggcggggggtgacgttggggtgaggtttcggtttgagtcgtcgttttaggttttgggtagtgtttattttggtcggtggcgtggggtacggtcggtcgttggtcgttgttgcggcggtaagaataggttagtagacggggtttttatgtttggtttgttcgtttattatattatttaaggaatttgcgaaaggcgttgaagttgagaggcgcggtggttttttttaatttattcgagggcggttattgaggtttttttttttagatttatgatttttt

SEQ ID NO: 34126 - DNA, 539 bp, Artificial Sequence
  chemically treated genomic DNA (Homo sapiens) CpG-island No: 34126
aaaaaatcataaatctaaaaaaaaaaacctcaataaccgccctcgaataaattaaaaaaaaccaccgcgcctctcaacttcaacgcctttcgcaaattccttaaataatataataaacgaacaaaccaaacataaaaaccccgtctactaacctattcttaccgccgcaacaacgaccaacgaccgaccgtaccccacgccaccgaccaaaataaacactacccaaaacctaaaacgacgactcaaaccgaaacctcaccccaacgtcaccccccgccgaccaaacgcgatccctccctacaaacgcaaccccgcgaaaccattacaccacccgaaacatacaaaaaactcccgacgccacgacgaaaactaaaccaaaaaaaaacgcgcctccctcccctctcttatcttccccgccttaactaacgaccgccaactcgtactactacccccgcgaaaactaaaaatactcccgcgaacacaacgccatactcgaaccctttaacgaacttataaccgaaaccgacattctccgcatc

SEQ ID NO: 34127 - DNA, 539 bp, Artificial Sequence
  chemically treated genomic DNA (Homo sapiens) CpG-island No: 34127
aaggggttatgagtttgggaggagaggttttaatagtcgttttcggatgggttggggagggttatcgcgttttttagttttaacgtttttcgtaagttttttgggtggtgtaatgagcgaataagttaggtatggagatttcgtttgttggtttgtttttgtcgtcgtagtagcgattagcgatcggtcgtgttttacgttatcgattaaagtggatattgtttagagtttggagcggcggtttaggtcgaagttttattttagcgttatttttcgtcggttagacgcggtttttttttgtagacgtagtttcgcggagttattatattattcgggatatgtaaaaggttttcggcgttacggcgggagttaggttagagggagacgcgtttttttttttttttttgtttttttcgttttagttgacggtcgttagttcgtgttgttattttcgcgagggttggaggtattttcgcgagtataacgttatattcgggttttttggcgagtttatgatcgaagtcgatatttttcgtatt

SEQ ID NO: 34128 - DNA, 539 bp, Artificial Sequence
  chemically treated genomic DNA (Homo sapiens) CpG-island No: 34128
aatacgaaaaatatcgacttcgatcataaactcgccaaaaaacccgaatataacgttatactcgcgaaaatacctccaaccctcgcgaaaataacaacacgaactaacgaccgtcaactaaaacgaaaaaaacaaaaaaaaaaaaaaaaacgcgtctccctctaacctaactcccgccgtaacgccgaaaaccttttacatatcccgaataatataataactccgcgaaactacgtctacaaaaaaaaaccgcgtctaaccgacgaaaaataacgctaaaataaaacttcgacctaaaccgccgctccaaactctaaacaatatccactttaatcgataacgtaaaacacgaccgatcgctaatcgctactacgacgacaaaaacaaaccaacaaacgaaatctccatacctaacttattcgctcattacaccacccaaaaaacttacgaaaaacgttaaaactaaaaaacgcgataaccctccccaacccatccgaaaacgactattaaaacctctcctcccaaactcataacccctt

SEQ ID NO: 34129 - DNA, 583 bp, Artificial Sequence
  chemically treated genomic DNA (Homo sapiens) CpG-island No: 34129
tcggtcggcggattttcggtttcggtttttttggtattttttattatttcgatttagggtaggcgatacgacgggggagcggaggagtagtagtagtaacgtaggtttaaagtagggtaagcgttagagacgtttcgcggatcgtattttcggtttttgttaggaagaagtagttgtgattcgttattaaatttcgcgatttttgtttcgaaggttcggtttcgtttttcgttgcgggtgttattttcgcggttagggcgggaattgtagtgcgtttgcgtttgttcgaattttttcgggagattatttttcgcggtatttgatttttaggtttcgttttttgtacgtcgtttacggtatttgacgtttaggtttcgttttttgtatgtttttgttggtaaatagttttgggggtcgttcgattttgtaggtagtgttcgcgtgggaggggaggtgtagtcgttagcgttgtcggcggttttcgttacgtgaattagtgagaggtttaaattttttttttaggttttagtgttatatttttttatacgggtatttcgagggttcggattggaaaggcgagtta

SEQ ID NO: 34130 - DNA, 583 bp, Artificial Sequence
  chemically treated genomic DNA (Homo sapiens) CpG-island No: 34130
taactcgcctttccaatccgaaccctcgaaatacccgtataaaaaaatataacactaaaacctaaaaaaaaaatttaaacctctcactaattcacgtaacgaaaaccgccgacaacgctaacgactacacctcccctcccacgcgaacactacctacaaaatcgaacgacccccaaaactatttaccaacaaaaacatacaaaaaacgaaacctaaacgtcaaataccgtaaacgacgtacaaaaaacgaaacctaaaaatcaaataccgcgaaaaataatctcccgaaaaaattcgaacaaacgcaaacgcactacaattcccgccctaaccgcgaaaataacacccgcaacgaaaaacgaaaccgaaccttcgaaacaaaaatcgcgaaatttaataacgaatcacaactacttcttcctaacaaaaaccgaaaatacgatccgcgaaacgtctctaacgcttaccctactttaaacctacgttactactactactcctccgctcccccgtcgtatcgcctaccctaaatcgaaataataaaaaataccaaaaaaaccgaaaccgaaaatccgccgaccga

SEQ ID NO: 34131 - DNA, 583 bp, Artificial Sequence
  chemically treated genomic DNA (Homo sapiens) CpG-island No: 34131
tggttcgtttttttagttcgggttttcggggtgttcgtgtgaaaagatgtgatattgaagtttggggaagaagtttgaattttttattaatttacgtaacgggagtcgtcggtagcgttgacggttgtatttttttttttacgcggatattatttgtaggatcggacgatttttagaattgtttgttaataaagatatgtagggggcggagtttgagcgttagatatcgtgagcggcgtgtagagggcggagtttaggagttagatatcgcgagaagtagtttttcgaagaggttcggataagcgtaggcgtattataattttcgttttggtcgcgaaggtggtattcgtagcgggaggcggggtcgggttttcgggataaagatcgcgagatttaatggcgagttatagttatttttttttggtagagatcggaagtgcggttcgcggagcgtttttggcgtttattttgttttgggtttgcgttgttgttgttgttttttcgttttttcgtcgtatcgtttgttttggatcgaagtgatgggggatgttaaggaggtcggagtcgagggttcgtcggtcgg

SEQ ID NO: 34132 - DNA, 583 bp, Artificial Sequence
  chemically treated genomic DNA (Homo sapiens) CpG-island No: 34132
ccgaccgacgaaccctcgactccgacctccttaacatcccccatcacttcgatccaaaacaaacgatacgacgaaaaaacgaaaaaacaacaacaacaacgcaaacccaaaacaaaataaacgccaaaaacgctccgcgaaccgcacttccgatctctaccaaaaaaaaataactataactcgccattaaatctcgcgatctttatcccgaaaacccgaccccgcctcccgctacgaataccaccttcgcgaccaaaacgaaaattataatacgcctacgcttatccgaacctcttcgaaaaactacttctcgcgatatctaactcctaaactccgccctctacacgccgctcacgatatctaacgctcaaactccgccccctacatatctttattaacaaacaattctaaaaatcgtccgatcctacaaataatatccgcgtaaaaaaaaaaatacaaccgtcaacgctaccgacgactcccgttacgtaaattaataaaaaattcaaacttcttccccaaacttcaatatcacatcttttcacacgaacaccccgaaaacccgaactaaaaaaacgaacca

SEQ ID NO: 34133 - DNA, 642 bp, Artificial Sequence
  chemically treated genomic DNA (Homo sapiens) CpG-island No: 34133
tcgggaggtttatcgttggcgacggagttggcgttgcggcggtataaggcgattagagcggtggttaagagtttttagcgtagtatgaatttttattgagttttcgagtttgggataaacgtatttttcggggaagagtcggttttcgtttaggtacgaagggacgcgcgttcgttgggggaagttagaatttaggtgtttacgatattaggattttagtttcgtcgtcgtagtcgtcgtcgttgttttatatcgaaaaatagggtacggttattttttttttgtttttttcgcgagagtttttttaggagtgaagagagagaaaatatcgcgataagtgagttattcgttttttttttcgtattttttatttttagaattattaggcgtcggcgttttcgaggtagtgtgttttcgtttagagttggagttttttagttgttagtcgatttcgaattcgtattttcgttaatcgcgttttttgtgggcggtcggaaattatagttttcgttggatatgttcggtgtatgttataaataattatttaaatttttcggatttgagtttttcgtagaggaatgtagaatgacgttacggtacgtaggatgtgatgttatcgagatgtagaggatatttagttaa

SEQ ID NO: 34134 - DNA, 642 bp, Artificial Sequence
  chemically treated genomic DNA (Homo sapiens) CpG-island No: 34134
ttaactaaatatcctctacatctcgataacatcacatcctacgtaccgtaacgtcattctacattcctctacgaaaaactcaaatccgaaaaatttaaataattatttataacatacaccgaacatatccaacgaaaactataatttccgaccgcccacaaaaaacgcgattaacgaaaatacgaattcgaaatcgactaacaactaaaaaactccaactctaaacgaaaacacactacctcgaaaacgccgacgcctaataattctaaaaataaaaaatacgaaaaaaaaaacgaataactcacttatcgcgatattttctctctcttcactcctaaaaaaactctcgcgaaaaaaacaaaaaaaaaataaccgtaccctatttttcgatataaaacaacgacgacgactacgacgacgaaactaaaatcctaatatcgtaaacacctaaattctaacttcccccaacgaacgcgcgtcccttcgtacctaaacgaaaaccgactcttccccgaaaaatacgtttatcccaaactcgaaaactcaataaaaattcatactacgctaaaaactcttaaccaccgctctaatcgccttataccgccgcaacgccaactccgtcgccaacgataaacctcccga

SEQ ID NO: 34135 - DNA, 642 bp, Artificial Sequence
  chemically treated genomic DNA (Homo sapiens) CpG-island No: 34135
ttgattgagtattttttgtatttcggtgatattatattttgcgtgtcgtggcgttattttgtatttttttgcgggaggtttagattcggagggtttaagtggttgtttataatatgtatcgaatatatttaacggaggttgtggttttcgatcgtttataaaaagcgcggttggcgggagtgcgggttcggggtcggttggtagttgggagattttagttttgggcggaaatatattgtttcggaggcgtcggcgtttagtgattttgggaatagaaggtgcgagggagggagcgggtggtttatttatcgcggtgttttttttttttttatttttgggggagttttcgcgagaggagtaagaggaagatggtcgtgttttgtttttcggtgtaaggtagcgacggcggttgcgacggcgagattgagattttggtgtcgtgggtatttgagttttagttttttttagcgagcgcgcgttttttcgtgtttaggcgagagtcggttttttttcgggagatgcgtttgttttaggttcgggggtttagtgggagtttatgttgcgttggaggtttttggttatcgttttaatcgttttgtgtcgtcgtagcgttagtttcgtcgttagcggtgagtttttcga

SEQ ID NO: 34136 - DNA, 642 bp, Artificial Sequence
  chemically treated genomic DNA (Homo sapiens) CpG-island No: 34136
tcgaaaaactcaccgctaacgacgaaactaacgctacgacgacacaaaacgattaaaacgataaccaaaaacctccaacgcaacataaactcccactaaacccccgaacctaaaacaaacgcatctcccgaaaaaaaaccgactctcgcctaaacacgaaaaaacgcgcgctcgctaaaaaaaactaaaactcaaatacccacgacaccaaaatctcaatctcgccgtcgcaaccgccgtcgctaccttacaccgaaaaacaaaacacgaccatcttcctcttactcctctcgcgaaaactcccccaaaaataaaaaaaaaaaaaacaccgcgataaataaaccacccgctccctccctcgcaccttctattcccaaaatcactaaacgccgacgcctccgaaacaatatatttccgcccaaaactaaaatctcccaactaccaaccgaccccgaacccgcactcccgccaaccgcgctttttataaacgatcgaaaaccacaacctccgttaaatatattcgatacatattataaacaaccacttaaaccctccgaatctaaacctcccgcaaaaaaatacaaaataacgccacgacacgcaaaatataatatcaccgaaatacaaaaaatactcaatcaa

SEQ ID NO: 34137 - DNA, 1085 bp, Artificial Sequence
  chemically treated genomic DNA (Homo sapiens) CpG-island No: 34137
ttttcgcggagggcgcgcgcggggtttagtcgttgggtgtagggttcggcgggtagtcgggttttttttttttttcggtacgtcgggcgggcgtcggtcgtttttagtagtttacggagtcggcgggcggcgcggattttaagttcgagaagtagtcgaattcgttttggtttaggaagagttcgggtagttcgcgtacgcggtgtagttcgagttttagttttagcgacgttagcgttttttcgtcgatgagttcggcgtttatgtcgtttagggcgtgcgcgggcggcggcggggttgcggcgtttggcgtcggttgcgggttcggggggtttttcggagcgttggggggcgcggtcgcgcggtcggggtacggcgtcgttataggttgtaggtgcgcgatgttcgcggtcggcggaggtacggtcggaaagggttggaaggaggacggcggttcgaaggtttcgtacgttagggtttcgggttggcggggcggcggcggttttagcggagtttttcgcggttttagtttattgtttaggttcgggttcgcgtacggcggtagagttcggagcgtatgagggttatgggcggtcgcggcggacggcggtttttgtattaggcggtagttttcggcgagtattaggtggtcggttatggcggtaggtcggttgtttgcggggatagcgcgcggtggttagcgtcggttttttcggttcgggttagcggttgttttgcggcgggagattcgggtatcgtgcggtttttgtagttcggtcgggcggagtaaaattaaattcgattggtgtttcggtttagtttattattgcgtattttgcggtcgtagtttggggttataaaggttcgtaatttgtagtgtttcgaaattttcgcgtcgcgtagttgggttcggcgtatttttatatttagaggcggggttttttcgttttcggacgtttattggttgggcgagacgtttttgggcgggtcgcgtacgtttgtatttaggttttggtttcgttttttttattggaatttcgttttttgggatttcggttacgttttaggttttgagtatcgttttg

SEQ ID NO: 34138 - DNA, 1085 bp, Artificial Sequence
  chemically treated genomic DNA (Homo sapiens) CpG-island No: 34138
caaaacgatactcaaaacctaaaacgtaaccgaaatcccaaaaaacgaaattccaataaaaaaaacgaaaccaaaacctaaatacaaacgtacgcgacccgcccaaaaacgtctcgcccaaccaataaacgtccgaaaacgaaaaaaccccgcctctaaatataaaaatacgccgaacccaactacgcgacgcgaaaatttcgaaacactacaaattacgaacctttataaccccaaactacgaccgcaaaatacgcaataataaactaaaccgaaacaccaatcgaatttaattttactccgcccgaccgaactacaaaaaccgcacgatacccgaatctcccgccgcaaaacaaccgctaacccgaaccgaaaaaaccgacgctaaccaccgcgcgctatccccgcaaacaaccgacctaccgccataaccgaccacctaatactcgccgaaaactaccgcctaatacaaaaaccgccgtccgccgcgaccgcccataaccctcatacgctccgaactctaccgccgtacgcgaacccgaacctaaacaataaactaaaaccgcgaaaaactccgctaaaaccgccgccgccccgccaacccgaaaccctaacgtacgaaaccttcgaaccgccgtcctccttccaaccctttccgaccgtacctccgccgaccgcgaacatcgcgcacctacaacctataacgacgccgtaccccgaccgcgcgaccgcgccccccaacgctccgaaaaaccccccgaacccgcaaccgacgccaaacgccgcaaccccgccgccgcccgcgcacgccctaaacgacataaacgccgaactcatcgacgaaaaaacgctaacgtcgctaaaactaaaactcgaactacaccgcgtacgcgaactacccgaactcttcctaaaccaaaacgaattcgactacttctcgaacttaaaatccgcgccgcccgccgactccgtaaactactaaaaacgaccgacgcccgcccgacgtaccgaaaaaaaaaaaaaacccgactacccgccgaaccctacacccaacgactaaaccccgcgcgcgccctccgcgaaaa

SEQ ID NO: 34139 - DNA, 1085 bp, Artificial Sequence
  chemically treated genomic DNA (Homo sapiens) CpG-island No: 34139
tagggcggtgtttagagtttggggcgtggtcggagttttaaggggcggggttttagtgggaggggcggggttaagatttagatgtaggcgtgcgcggttcgtttagaagcgtttcgtttagttaatgagcgttcgagggcggggaagtttcgtttttgggtataagaatacgtcgagtttagttacgcgacgcggaggtttcggagtattataggttgcgggtttttgtgattttaggttgcggtcgtaaggtgcgtagtagtgggttgggtcggggtattagtcgggtttggttttgtttcgttcggtcgagttgtagggatcgtacggtgttcgggtttttcgtcgtagagtagtcgttggttcgggtcgggggagtcggcgttgattatcgcgcgttgttttcgtaggtagtcggtttgtcgttatggtcgattatttgatgttcgtcgagggttatcgtttggtgtagaggtcgtcgttcgtcgcggtcgtttatggtttttatgcgtttcggattttgtcgtcgtacgcgggttcgggtttggatagtgggttgaggtcgcggggggtttcgttggggtcgtcgtcgtttcgttaattcggggttttggcgtacggggttttcgggtcgtcgttttttttttagtttttttcggtcgtgttttcgtcggtcgcgggtatcgcgtatttgtagtttgtggcgacgtcgtatttcggtcgcgcggtcgcgttttttaacgtttcgggaggtttttcgggttcgtagtcggcgttaagcgtcgtagtttcgtcgtcgttcgcgtacgttttgggcggtatggacgtcgaatttatcgacgaggaggcgttgacgtcgttggagttggagttcgggttgtatcgcgtgcgcgagttgttcgagttttttttgggttagagcgagttcgattgtttttcggatttggggttcgcgtcgttcgtcggtttcgtgagttgttgagggcggtcggcgttcgttcggcgtgtcggagaggagaaagggttcgattgttcgtcggattttgtatttagcgattgggtttcgcgcgcgtttttcgcgaggg

SEQ ID NO: 34140 - DNA, 1085 bp, Artificial Sequence
  chemically treated genomic DNA (Homo sapiens) CpG-island No: 34140
ccctcgcgaaaaacgcgcgcgaaacccaatcgctaaatacaaaatccgacgaacaatcgaaccctttctcctctccgacacgccgaacgaacgccgaccgccctcaacaactcacgaaaccgacgaacgacgcgaaccccaaatccgaaaaacaatcgaactcgctctaacccaaaaaaaactcgaacaactcgcgcacgcgatacaacccgaactccaactccaacgacgtcaacgcctcctcgtcgataaattcgacgtccataccgcccaaaacgtacgcgaacgacgacgaaactacgacgcttaacgccgactacgaacccgaaaaacctcccgaaacgttaaaaaacgcgaccgcgcgaccgaaatacgacgtcgccacaaactacaaatacgcgatacccgcgaccgacgaaaacacgaccgaaaaaaactaaaaaaaaaacgacgacccgaaaaccccgtacgccaaaaccccgaattaacgaaacgacgacgaccccaacgaaaccccccgcgacctcaacccactatccaaacccgaacccgcgtacgacgacaaaatccgaaacgcataaaaaccataaacgaccgcgacgaacgacgacctctacaccaaacgataaccctcgacgaacatcaaataatcgaccataacgacaaaccgactacctacgaaaacaacgcgcgataatcaacgccgactcccccgacccgaaccaacgactactctacgacgaaaaacccgaacaccgtacgatccctacaactcgaccgaacgaaacaaaaccaaacccgactaataccccgacccaacccactactacgcaccttacgaccgcaacctaaaatcacaaaaacccgcaacctataatactccgaaacctccgcgtcgcgtaactaaactcgacgtattcttatacccaaaaacgaaacttccccgccctcgaacgctcattaactaaacgaaacgcttctaaacgaaccgcgcacgcctacatctaaatcttaaccccgcccctcccactaaaaccccgccccttaaaactccgaccacgccccaaactctaaacaccgcccta

SEQ ID NO: 34141 - DNA, 559 bp, Artificial Sequence
  chemically treated genomic DNA (Homo sapiens) CpG-island No: 34141
gttaaggagtcgtaggattttagtatgtttgcggtaattattatttcgttttcgaatttaacgtcgaggattgaggtttcggttattatggggtttttaaagagtgagaacggtgggagttgagaggggggatggattgcgtttttttttcgcgtattgagttgcgtttttgattttttataattttttttaattattttgtattttttaggatttcgcgttttgagtttttttgtcgttcgcgcgttttcggggttttcgttttattttttcgggtttttaaaattagtcggtagtattaggttttacggtttttttcgttacgtaaacgaaagcgtcgagaatttattgggttcgcgtgattggatttttgtaaagtgtagacgtcggatttatgaaggaatcgggagtggacggaatgcggtaaaattgttttggggtcggatttttcgtttaaagttcggatcgcgattttaaaaacgtttttattttagttacggtagtagaaaaaatgaaagcgtttgcgttaacggaagcggaagtgattttttagtgttat

SEQ ID NO: 34142 - DNA, 559 bp, Artificial Sequence
  chemically treated genomic DNA (Homo sapiens) CpG-island No: 34142
ataacactaaaaaatcacttccgcttccgttaacgcaaacgctttcattttttctactaccgtaactaaaataaaaacgtttttaaaatcgcgatccgaactttaaacgaaaaatccgaccccaaaacaattttaccgcattccgtccactcccgattccttcataaatccgacgtctacactttacaaaaatccaatcacgcgaacccaataaattctcgacgctttcgtttacgtaacgaaaaaaaccgtaaaacctaatactaccgactaattttaaaaacccgaaaaaataaaacgaaaaccccgaaaacgcgcgaacgacaaaaaaactcaaaacgcgaaatcctaaaaaatacaaaataattaaaaaaaattataaaaaatcaaaaacgcaactcaatacgcgaaaaaaaaacgcaatccatcccccctctcaactcccaccgttctcactctttaaaaaccccataataaccgaaacctcaatcctcgacgttaaattcgaaaacgaaataataattaccgcaaacatactaaaatcctacgactccttaac

SEQ ID NO: 34143 - DNA, 559 bp, Artificial Sequence
  chemically treated genomic DNA (Homo sapiens) CpG-island No: 34143
atgatattgaaggattattttcgttttcgttggcgtaagcgtttttattttttttgttatcgtgattaagatggaagcgtttttggggtcgcggttcggattttgggcggggggttcggttttaggatagttttatcgtatttcgtttattttcgatttttttatggattcggcgtttgtattttatagaggtttaattacgcggatttagtaagttttcggcgttttcgtttgcgtagcgggagggatcgtggggtttggtgttgtcggttggttttgagagttcgggaaggtgaggcggggatttcgggggcgcgcgaacggtaggggagtttagggcgcggagttttggagaatgtagaataattggaaggaattatagaaaattagaagcgtagtttagtgcgcggaaagagggcgtagtttatttttttttttagtttttatcgtttttattttttaggaattttatggtgatcgggattttagttttcggcgttaagttcgagggcggagtggtgattgtcgtagatatgttgggattttacggttttttggt

SEQ ID NO: 34144 - DNA, 559 bp, Artificial Sequence
  chemically treated genomic DNA (Homo sapiens) CpG-island No: 34144
accaaaaaaccgtaaaatcccaacatatctacgacaatcaccactccgccctcgaacttaacgccgaaaactaaaatcccgatcaccataaaattcctaaaaaataaaaacgataaaaactaaaaaaaaaaataaactacgccctctttccgcgcactaaactacgcttctaattttctataattccttccaattattctacattctccaaaactccgcgccctaaactcccctaccgttcgcgcgcccccgaaatccccgcctcaccttcccgaactctcaaaaccaaccgacaacaccaaaccccacgatccctcccgctacgcaaacgaaaacgccgaaaacttactaaatccgcgtaattaaacctctataaaatacaaacgccgaatccataaaaaaatcgaaaataaacgaaatacgataaaactatcctaaaaccgaaccccccgcccaaaatccgaaccgcgaccccaaaaacgcttccatcttaatcacgataacaaaaaaaataaaaacgcttacgccaacgaaaacgaaaataatccttcaatatcat

SEQ ID NO: 34145 - DNA, 749 bp, Artificial Sequence
  chemically treated genomic DNA (Homo sapiens) CpG-island No: 34145
acgggtacgcggagcggtattatttttttcgtacgtgtatcgtttttttttataagaggtattcgtgaattttaggagtaggcggatggcgtgcgttagttggggaagatagcggtttagcgattgcgtagtttttatttatttttaattttcgttcgttaacgtttttcggttcggggttgtcgagtttttgcgttttgtcggggcggtggttaagcggtttttaggttcggtttcggcgtggtttttttcgtttttttttatagggttcgcgattttagaggttgggtaggggtcgatattcgtggttcggtagttcgaaaaggttttcgcgtagagttgtttttgttggagatcgcggatttagagattcgtttttttcgcgttagtttttttgatcgagcggttttatcgttgagacggtatttattttacgaatattttagtattcgagaattatagacgattcgtacgatatggtgacgggttttcgagttttcgaggattagggaaattgtgagcgggaggggttttatattcgatataagggggcggggtttacgcgcgggcgttttgatttcgttttcgtttcgtttttcgttttttgttttcgcggttttatagggtcgtgcgtaggcgcgattaatgtcggcgttggggtttagggtttggcgatttcgaggcgggattcgggtaggagtgttgtaggagagtaaaggattcgaggttgaggtttttttttttttcgt

SEQ ID NO: 34146 - DNA, 749 bp, Artificial Sequence
  chemically treated genomic DNA (Homo sapiens) CpG-island No: 34146
acgaaaaaaaaaaaaacctcaacctcgaatcctttactctcctacaacactcctacccgaatcccgcctcgaaatcgccaaaccctaaaccccaacgccgacattaatcgcgcctacgcacgaccctataaaaccgcgaaaacaaaaaacgaaaaacgaaacgaaaacgaaatcaaaacgcccgcgcgtaaaccccgcccccttatatcgaatataaaacccctcccgctcacaatttccctaatcctcgaaaactcgaaaacccgtcaccatatcgtacgaatcgtctataattctcgaatactaaaatattcgtaaaataaataccgtctcaacgataaaaccgctcgatcaaaaaaactaacgcgaaaaaaacgaatctctaaatccgcgatctccaacaaaaacaactctacgcgaaaaccttttcgaactaccgaaccacgaatatcgacccctacccaacctctaaaatcgcgaaccctataaaaaaaaacgaaaaaaaccacgccgaaaccgaacctaaaaaccgcttaaccaccgccccgacaaaacgcaaaaactcgacaaccccgaaccgaaaaacgttaacgaacgaaaattaaaaataaataaaaactacgcaatcgctaaaccgctatcttccccaactaacgcacgccatccgcctactcctaaaattcacgaatacctcttataaaaaaaaacgatacacgtacgaaaaaaataataccgctccgcgtacccgt

SEQ ID NO: 34147 - DNA, 749 bp, Artificial Sequence
  chemically treated genomic DNA (Homo sapiens) CpG-island No: 34147
gcggggaagggaggagttttaatttcgggttttttgtttttttgtagtatttttgttcgggtttcgtttcggggtcgttaggttttgaattttaacgtcggtattagtcgcgtttgcgtacggttttgtggagtcgcggaggtaagggacggagaacggggcggaggcggagttagggcgttcgcgcgtgggtttcgtttttttatgtcgggtataaagtttttttcgtttatagtttttttagttttcgaaggttcggaagttcgttattatgtcgtgcgagtcgtttatggttttcgggtattgggatattcgtggggtgagtgtcgttttaacggtagagtcgttcggttaaagagattgacgcggagagggcgggtttttgggttcgcgatttttagtaggagtagttttacgcgggagttttttcgagttgtcgagttacggatgtcgatttttgtttagtttttgggatcgcgggttttgtggggaggggcggaggagattacgtcggagtcgggtttaggggtcgtttaattatcgtttcggtaggacgtagggattcggtagtttcgggtcggggaacgttagcgggcgggggttgggaatgggtgggagttgcgtagtcgttgaatcgttgttttttttagttggcgtacgttattcgtttgtttttggagtttacggatattttttatgaggagaaacggtatacgtgcggggaaggtaatgtcgtttcgcgtgttcgt

SEQ ID NO: 34148 - DNA, 749 bp, Artificial Sequence
  chemically treated genomic DNA (Homo sapiens) CpG-island No: 34148
acgaacacgcgaaacgacattaccttccccgcacgtataccgtttctcctcataaaaaatatccgtaaactccaaaaacaaacgaataacgtacgccaactaaaaaaaacaacgattcaacgactacgcaactcccacccattcccaacccccgcccgctaacgttccccgacccgaaactaccgaatccctacgtcctaccgaaacgataattaaacgacccctaaacccgactccgacgtaatctcctccgcccctccccacaaaacccgcgatcccaaaaactaaacaaaaatcgacatccgtaactcgacaactcgaaaaaactcccgcgtaaaactactcctactaaaaatcgcgaacccaaaaacccgccctctccgcgtcaatctctttaaccgaacgactctaccgttaaaacgacactcaccccacgaatatcccaatacccgaaaaccataaacgactcgcacgacataataacgaacttccgaaccttcgaaaactaaaaaaactataaacgaaaaaaactttatacccgacataaaaaaacgaaacccacgcgcgaacgccctaactccgcctccgccccgttctccgtcccttacctccgcgactccacaaaaccgtacgcaaacgcgactaataccgacgttaaaattcaaaacctaacgaccccgaaacgaaacccgaacaaaaatactacaaaaaaacaaaaaacccgaaattaaaactcctcccttccccgc

SEQ ID NO: 34149 - DNA, 514 bp, Artificial Sequence
  chemically treated genomic DNA (Homo sapiens) CpG-island No: 34149
tataggtatataggatacgttgggtttattttttcgtgtttcgacggtattataggtgcgaagttcgttcggggaggtagtgtttgttgttcgcgtagatttatttgcggcgtcggggatcgttcgtggtttcgatttttttacgaggcgcggaaggcggttatcggtaggttttcggtgttcgcgaagagtcggcgtaggggtggggttgtgggagggggcggggtttgttgcgcgttacggttgtcgtagtcgtcgtatcgggtcgtcgcggtcgtcgaatcggggggcggggggtcggggtgagcgttaagatggtcgtttcggttcgggttggtgagtgtgcgcgagggcgcgcggtcgcggcgattggcggagtgaggatttttgcgggagcggacgtgcgacggtagttttcggggtcgggaggtatttgggggtttattttcgtcgcgtagggcgttggggggttattgagagagggagagtttggggttgcgggcgcgcggaaggg

SEQ ID NO: 34150 - DNA, 514 bp, Artificial Sequence
  chemically treated genomic DNA (Homo sapiens) CpG-island No: 34150
cccttccgcgcgcccgcaaccccaaactctccctctctcaataaccccccaacgccctacgcgacgaaaataaacccccaaatacctcccgaccccgaaaactaccgtcgcacgtccgctcccgcaaaaatcctcactccgccaatcgccgcgaccgcgcgccctcgcgcacactcaccaacccgaaccgaaacgaccatcttaacgctcaccccgaccccccgccccccgattcgacgaccgcgacgacccgatacgacgactacgacaaccgtaacgcgcaacaaaccccgccccctcccacaaccccacccctacgccgactcttcgcgaacaccgaaaacctaccgataaccgccttccgcgcctcgtaaaaaaatcgaaaccacgaacgatccccgacgccgcaaataaatctacgcgaacaacaaacactacctccccgaacgaacttcgcacctataataccgtcgaaacacgaaaaaataaacccaacgtatcctatatacctata

SEQ ID NO: 34151 - DNA, 514 bp, Artificial Sequence
  chemically treated genomic DNA (Homo sapiens) CpG-island No: 34151
ttttttcgcgcgttcgtagttttaggtttttttttttttagtgattttttagcgttttgcgcggcgagaataggtttttaggtgtttttcggtttcgggggttgtcgtcgtacgttcgttttcgtaggggtttttatttcgttaatcgtcgcggtcgcgcgttttcgcgtatatttattagttcgagtcggggcggttattttagcgtttatttcggtttttcgtttttcggttcggcggtcgcgacgattcggtgcggcggttacgatagtcgtgacgcgtagtaggtttcgtttttttttatagttttatttttgcgtcggtttttcgcgggtatcgagaatttgtcggtggtcgtttttcgcgtttcgtgggggggtcggggttacggacggttttcggcgtcgtaagtgggtttgcgcgaataataagtattgttttttcgggcgggtttcgtatttgtagtgtcgtcgggatacgggagggtaaatttagcgtgttttgtgtgtttgtg

SEQ ID NO: 34152 - DNA, 514 bp, Artificial Sequence
  chemically treated genomic DNA (Homo sapiens) CpG-island No: 34152
cacaaacacacaaaacacgctaaatttaccctcccgtatcccgacgacactacaaatacgaaacccgcccgaaaaaacaatacttattattcgcgcaaacccacttacgacgccgaaaaccgtccgtaaccccgacccccccacgaaacgcgaaaaacgaccaccgacaaattctcgatacccgcgaaaaaccgacgcaaaaataaaactataaaaaaaaacgaaacctactacgcgtcacgactatcgtaaccgccgcaccgaatcgtcgcgaccgccgaaccgaaaaacgaaaaaccgaaataaacgctaaaataaccgccccgactcgaactaataaatatacgcgaaaacgcgcgaccgcgacgattaacgaaataaaaacccctacgaaaacgaacgtacgacgacaacccccgaaaccgaaaaacacctaaaaacctattctcgccgcgcaaaacgctaaaaaatcactaaaaaaaaaaaaacctaaaactacgaacgcgcgaaaaaa

SEQ ID NO: 34153 - DNA, 639 bp, Artificial Sequence
  chemically treated genomic DNA (Homo sapiens) CpG-island No: 34153
tttcgaggtataaggattttaagtcgttcggaattgtcggtcgttagatgatatcggttgcgtcgatgtagagtttcgggagttttagggtattatttgttttagcggagggattttgcgtgcgtcgaagcgatcgtgatcgcgtagggatttgacgtcgttgacgtcgggtcggcggcgtagcgacgtcgtaggaggcggtggcggcgagggcgggcgggggatgcgggtcgggaagtagtttcgggtgcgcggtttcggatgttggttgtttttgttgtcgtcgtcgttttcggggttgttcggggtttcgatcgttcgtagtaggtatcgttgggatttttttcgggggggcggagacgtacggagcggtcgggggttcggtcgggtcgtttcggtttgcgtagtttgaggtaagtgtttttcgttagggcggtcgggtttgggcggcgggcgaggaggcggggttgtggtatttttcgggacggaggtaggggttgtttttcgcgagacgtttttttttttttagtcgtagtcgcgttgcggggtgggcggcgggtggggtagggggtttgggtttcggttggggtttggcggacgtcgagggttgggtttttttttttttcgcggcgtttttta

SEQ ID NO: 34154 - DNA, 639 bp, Artificial Sequence
  chemically treated genomic DNA (Homo sapiens) CpG-island No: 34154
taaaaaacgccgcgaaaaaaaaaaaaacccaaccctcgacgtccgccaaaccccaaccgaaacccaaaccccctaccccacccgccgcccaccccgcaacgcgactacgactaaaaaaaaaaaaacgtctcgcgaaaaacaacccctacctccgtcccgaaaaataccacaaccccgcctcctcgcccgccgcccaaacccgaccgccctaacgaaaaacacttacctcaaactacgcaaaccgaaacgacccgaccgaacccccgaccgctccgtacgtctccgcccccccgaaaaaaatcccaacgatacctactacgaacgatcgaaaccccgaacaaccccgaaaacgacgacgacaacaaaaacaaccaacatccgaaaccgcgcacccgaaactacttcccgacccgcatcccccgcccgccctcgccgccaccgcctcctacgacgtcgctacgccgccgacccgacgtcaacgacgtcaaatccctacgcgatcacgatcgcttcgacgcacgcaaaatccctccgctaaaacaaataataccctaaaactcccgaaactctacatcgacgcaaccgatatcatctaacgaccgacaattccgaacgacttaaaatccttatacctcgaaa

SEQ ID NO: 34155 - DNA, 639 bp, Artificial Sequence
  chemically treated genomic DNA (Homo sapiens) CpG-island No: 34155
tgagaagcgtcgcgggggagggaaggatttagttttcggcgttcgttaggttttagtcggggtttaggttttttgttttattcgtcgtttatttcgtaacgcggttgcggttggaagagagagggcgtttcgcggaggatagtttttgttttcgtttcgggagatgttatagtttcgttttttcgttcgtcgtttaggttcggtcgttttggcggggggtatttattttaggttgcgtaggtcgggacggttcggtcgagttttcggtcgtttcgtgcgttttcgttttttcgggaaaggttttaacggtgtttattgcgagcggtcgaggtttcgagtagtttcgagagcggcggcggtagtaagagtagttaatattcggggtcgcgtattcggaattatttttcgattcgtatttttcgttcgttttcgtcgttatcgttttttgcggcgtcgttgcgtcgtcggttcggcgttagcggcgttaagtttttgcgcggttacggtcgtttcgacgtacgtaggattttttcgttgggataagtagtgttttgagattttcgaggttttgtatcggcgtagtcggtgttatttagcggtcggtagtttcgagcgatttggggtttttgtgtttcggag

SEQ ID NO: 34156 - DNA, 639 bp, Artificial Sequence
  chemically treated genomic DNA (Homo sapiens) CpG-island No: 34156
ctccgaaacacaaaaaccccaaatcgctcgaaactaccgaccgctaaataacaccgactacgccgatacaaaacctcgaaaatctcaaaacactacttatcccaacgaaaaaatcctacgtacgtcgaaacgaccgtaaccgcgcaaaaacttaacgccgctaacgccgaaccgacgacgcaacgacgccgcaaaaaacgataacgacgaaaacgaacgaaaaatacgaatcgaaaaataattccgaatacgcgaccccgaatattaactactcttactaccgccgccgctctcgaaactactcgaaacctcgaccgctcgcaataaacaccgttaaaacctttcccgaaaaaacgaaaacgcacgaaacgaccgaaaactcgaccgaaccgtcccgacctacgcaacctaaaataaataccccccgccaaaacgaccgaacctaaacgacgaacgaaaaaacgaaactataacatctcccgaaacgaaaacaaaaactatcctccgcgaaacgccctctctcttccaaccgcaaccgcgttacgaaataaacgacgaataaaacaaaaaacctaaaccccgactaaaacctaacgaacgccgaaaactaaatccttccctcccccgcgacgcttctca

SEQ ID NO: 34157 - DNA, 1029 bp, Artificial Sequence
  chemically treated genomic DNA (Homo sapiens) CpG-island No: 34157
gcgttcggttattttatttttttgtttcgttaggtcgttggtttgtttttggttttttttcgcgatttttcggtcgtgtaggtttcgcggtagcgaagcggttggggttggcgtttcgtttttttagcgttttattttttttttcggttttcgtcggtcgtagtcgtttttcgtagtcggggttttcgtcgggattgacgcgttgggggaggagcggtttttcgttgcgcgtttttaaggaatattacggtagggttcgtttttggtttcggtcgttagttttagttttttaggttcggagttcggattggcggaggtcgcgagggagggagtacgagcgaggaggtacgcgttcgtcggttcgtattcggttcgtcgtagtcgtcgtcgtcgtcgtcgtcgtcgtagtagttatggtcgagcgtcgcgttttcgtttagaagattagtaggtaaatattcggcgtggggcgcgtcgtcgtcgtcgttcgagaaagagtcgcggagtttttttaggtttggtttaggaggcgggtgggtgtggcggggtcggtatcgggatttcgcggtttggttcgcggcggggcggaaggggttcggggtggttgagggggtagcggaggtttcgcgtcgttttcgaatttcggtttttagttcgcgttcgtcgttgagtttcggtagggagcggagagggtcgcggattttagcgcgttcgtttttttttgtttttcggcggttcgggtttggatttttgcggaggtttatggaagggcggtcggtcgttttttaaattttttgtgtttttattttcgggttcgtcgggggtcgtcgcggcgtttcgttttttttcgttttttcgtttattttttttggtttttagagggtgcggggttcgtttttttttattttaataaaaggagaaacgcgcggcggttcggggcgggtgggaggtcgttttttttttacgcgtttttttttttttgagaaatttgataggaattttttttgtattttcgggttaggtttaaag

SEQ ID NO: 34158 - DNA, 1029 bp, Artificial Sequence
  chemically treated genomic DNA (Homo sapiens) CpG-island No: 34158
ctttaaacctaacccgaaaatacaaaaaaaattcctatcaaatttctcaaaaaaaaaaaaacgcgtaaaaaaaaaacgacctcccacccgccccgaaccgccgcgcgtttctccttttattaaaataaaaaaaaacgaaccccgcaccctctaaaaaccaaaaaaaataaacgaaaaaacgaaaaaaaacgaaacgccgcgacgacccccgacgaacccgaaaataaaaacacaaaaaatttaaaaaacgaccgaccgcccttccataaacctccgcaaaaatccaaacccgaaccgccgaaaaacaaaaaaaaacgaacgcgctaaaatccgcgaccctctccgctccctaccgaaactcaacgacgaacgcgaactaaaaaccgaaattcgaaaacgacgcgaaacctccgctaccccctcaaccaccccgaaccccttccgccccgccgcgaaccaaaccgcgaaatcccgataccgaccccgccacacccacccgcctcctaaaccaaacctaaaaaaactccgcgactctttctcgaacgacgacgacgacgcgccccacgccgaatatttacctactaatcttctaaacgaaaacgcgacgctcgaccataactactacgacgacgacgacgacgacgacgactacgacgaaccgaatacgaaccgacgaacgcgtacctcctcgctcgtactccctccctcgcgacctccgccaatccgaactccgaacctaaaaaactaaaactaacgaccgaaaccaaaaacgaaccctaccgtaatattccttaaaaacgcgcaacgaaaaaccgctcctcccccaacgcgtcaatcccgacgaaaaccccgactacgaaaaacgactacgaccgacgaaaaccgaaaaaaaaaataaaacgctaaaaaaacgaaacgccaaccccaaccgcttcgctaccgcgaaacctacacgaccgaaaaatcgcgaaaaaaaaccaaaaacaaaccaacgacctaacgaaacaaaaaaataaaataaccgaacgc

SEQ ID NO: 34159 - DNA, 1029 bp, Artificial Sequence
  chemically treated genomic DNA (Homo sapiens) CpG-island No: 34159
ttttgaatttggttcgagggtgtaaagagggtttttgttagattttttaggaagagagagacgcgtgaaggaggggcggttttttattcgtttcgagtcgtcgcgcgtttttttttttgttggggtggaggagggcggatttcgtattttttaggggttaagaggggtgggcggagagacgggagggggcgaaacgtcgcggcggttttcgacgagttcgggggtgggaatataaagaatttgggaagcggtcgatcgtttttttataaattttcgtagaagtttaggttcgggtcgtcgaggagtaggaggaggcgggcgcgttggagttcgcggtttttttcgttttttgtcgaggtttagcggcgggcgcgggttgaaggtcggggttcgagggcggcgcgaggttttcgttatttttttagttatttcgaatttttttcgtttcgtcgcgagttaggtcgcgggatttcggtgtcggtttcgttatatttattcgttttttaggttaggtttgggaggatttcgcggttttttttcgggcggcggcggcggcgcgttttacgtcggatatttatttgttgattttttgggcgaaggcgcggcgttcggttatggttgttgcggcgacggcgacggcggcggcggttgcggcgggtcgggtgcggatcggcgggcgcgtgttttttcgttcgtgttttttttttcgcggttttcgttagttcgggtttcggatttgggaggttggggttggcggtcggagttaggaacgagttttgtcgtaatgttttttagaggcgcgtaacgagaaatcgttttttttttagcgcgttaatttcggcgggaatttcggttgcggaaggcggttgcggtcggcgggagtcgaggggaagaatggagcgttgaggaagcgaggcgttagttttagtcgtttcgttgtcgcggagtttgtacgatcgagaggtcgcggagagaagttagagataggttagcgatttggcgaggtaagaaaataagataatcgaacgt

SEQ ID NO: 34160 - DNA, 1029 bp, Artificial Sequence
  chemically treated genomic DNA (Homo sapiens) CpG-island No: 34160
acgttcgattatcttattttcttacctcgccaaatcgctaacctatctctaacttctctccgcgacctctcgatcgtacaaactccgcgacaacgaaacgactaaaactaacgcctcgcttcctcaacgctccattcttcccctcgactcccgccgaccgcaaccgccttccgcaaccgaaattcccgccgaaattaacgcgctaaaaaaaaaacgatttctcgttacgcgcctctaaaaaacattacgacaaaactcgttcctaactccgaccgccaaccccaacctcccaaatccgaaacccgaactaacgaaaaccgcgaaaaaaaaaacacgaacgaaaaaacacgcgcccgccgatccgcacccgacccgccgcaaccgccgccgccgtcgccgtcgccgcaacaaccataaccgaacgccgcgccttcgcccaaaaaatcaacaaataaatatccgacgtaaaacgcgccgccgccgccgcccgaaaaaaaaccgcgaaatcctcccaaacctaacctaaaaaacgaataaatataacgaaaccgacaccgaaatcccgcgacctaactcgcgacgaaacgaaaaaaattcgaaataactaaaaaaataacgaaaacctcgcgccgccctcgaaccccgaccttcaacccgcgcccgccgctaaacctcgacaaaaaacgaaaaaaaccgcgaactccaacgcgcccgcctcctcctactcctcgacgacccgaacctaaacttctacgaaaatttataaaaaaacgatcgaccgcttcccaaattctttatattcccacccccgaactcgtcgaaaaccgccgcgacgtttcgccccctcccgtctctccgcccacccctcttaacccctaaaaaatacgaaatccgccctcctccaccccaacaaaaaaaaaaacgcgcgacgactcgaaacgaataaaaaaccgcccctccttcacgcgtctctctcttcctaaaaaatctaacaaaaaccctctttacaccctcgaaccaaattcaaaa

SEQ ID NO: 34161 - DNA, 765 bp, Artificial Sequence
  chemically treated genomic DNA (Homo sapiens) CpG-island No: 34161
agcgcgagacggggtttcggaggattgttaattttattacggtggttttttcggggttttcgtttttttttgagcgtgcgggggtttttggttttattcggatatagtgtacgcggcgtattggtttttaggagttggggcggaggttggtttcggaattttcggcgggagggtttgggcggtggggacgtttttatcgggcggttggcgtgtacgtcgtcggggttacgcggttttttcgacggattcgagtttttcgtggcgggggtggggcggttatcgttagttcggttttttcgaacgatcgggttcggttttagtttttagagcgtttagtcgttggttttatttttttgcgtacgtttagtaacgagtaatagtttttattgtttagttttttttcgtttaaggtcgtcgttattttcgtaattttttatttcgttaaatcggtaaggtcgtgtttaagaggggttagtgattcgcgttagggatagcgcgggttagttcggttgcgttatagcggtttttggcggttcggagtcgttcgcgttcggcgggagtgcgtttgcgttttgcgttttcgcgcggtttagggcgggacgcggcgtttaggtagttttggcggggtgattacgcgggtgttttttcgtgtttttaatggacgcgtggtacgcggcgtggttgcgttttcgggggtttgagatttagttaggattttttagggttttttttgtattagaaagggaaattttgtttttttttttt

SEQ ID NO: 34162 - DNA, 765 bp, Artificial Sequence
  chemically treated genomic DNA (Homo sapiens) CpG-island No: 34162
aaaaaaaaaaaacaaaatttccctttctaatacaaaaaaaaccctaaaaaatcctaactaaatctcaaacccccgaaaacgcaaccacgccgcgtaccacgcgtccattaaaaacacgaaaaaacacccgcgtaatcaccccgccaaaactacctaaacgccgcgtcccgccctaaaccgcgcgaaaacgcaaaacgcaaacgcactcccgccgaacgcgaacgactccgaaccgccaaaaaccgctataacgcaaccgaactaacccgcgctatccctaacgcgaatcactaacccctcttaaacacgaccttaccgatttaacgaaataaaaaattacgaaaataacgacgaccttaaacgaaaaaaaactaaacaataaaaactattactcgttactaaacgtacgcaaaaaaataaaaccaacgactaaacgctctaaaaactaaaaccgaacccgatcgttcgaaaaaaccgaactaacgataaccgccccacccccgccacgaaaaactcgaatccgtcgaaaaaaccgcgtaaccccgacgacgtacacgccaaccgcccgataaaaacgtccccaccgcccaaaccctcccgccgaaaattccgaaaccaacctccgccccaactcctaaaaaccaatacgccgcgtacactatatccgaataaaaccaaaaacccccgcacgctcaaaaaaaaacgaaaaccccgaaaaaaccaccgtaataaaattaacaatcctccgaaaccccgtctcgcgct

SEQ ID NO: 34163 - DNA, 765 bp, Artificial Sequence
  chemically treated genomic DNA (Homo sapiens) CpG-island No: 34163
aaaaaaaaaaagtaaagtttttttttttagtataggaaaagttttagggagttttggttggattttaggttttcgaggacgtagttacgtcgcgtgttacgcgtttattgggagtacgaagagatattcgcgtggttatttcgttagggttgtttaggcgtcgcgtttcgttttaggtcgcgcgggggcgtaaagcgtaggcgtattttcgtcgggcgcggacggtttcgggtcgttaggggtcgttgtggcgtagtcgggttggttcgcgttgtttttgacgcggattattggttttttttgagtacggttttgtcggtttggcggggtgaaaggttgcgaagatggcgacggttttgagcgaggaggagttggataatgaagattattattcgttgttgaacgtgcgtagggaggtgaggttagcggttggacgttttgggggttgaggtcgagttcggtcgttcgggagggtcgggttggcggtggtcgttttattttcgttacgggaggttcgggttcgtcggggaggtcgcgtgatttcggcgacgtgtacgttagtcgttcgatggaggcgtttttatcgtttagattttttcgtcgggggtttcggggttagttttcgttttagtttttgaaggttagtgcgtcgcgtgtattgtgttcgggtagggttagaggttttcgtacgtttaagaggaaacgggggtttcgaggaggttatcgtagtggggttagtagtttttcgagatttcgtttcgcgtt

SEQ ID NO: 34164 - DNA, 765 bp, Artificial Sequence
  chemically treated genomic DNA (Homo sapiens) CpG-island No: 34164
aacgcgaaacgaaatctcgaaaaactactaaccccactacgataacctcctcgaaacccccgtttcctcttaaacgtacgaaaacctctaaccctacccgaacacaatacacgcgacgcactaaccttcaaaaactaaaacgaaaactaaccccgaaacccccgacgaaaaaatctaaacgataaaaacgcctccatcgaacgactaacgtacacgtcgccgaaatcacgcgacctccccgacgaacccgaacctcccgtaacgaaaataaaacgaccaccgccaacccgaccctcccgaacgaccgaactcgacctcaacccccaaaacgtccaaccgctaacctcacctccctacgcacgttcaacaacgaataataatcttcattatccaactcctcctcgctcaaaaccgtcgccatcttcgcaacctttcaccccgccaaaccgacaaaaccgtactcaaaaaaaaccaataatccgcgtcaaaaacaacgcgaaccaacccgactacgccacaacgacccctaacgacccgaaaccgtccgcgcccgacgaaaatacgcctacgctttacgcccccgcgcgacctaaaacgaaacgcgacgcctaaacaaccctaacgaaataaccacgcgaatatctcttcgtactcccaataaacgcgtaacacgcgacgtaactacgtcctcgaaaacctaaaatccaaccaaaactccctaaaacttttcctatactaaaaaaaaaaactttacttttttttttt

SEQ ID NO: 34165 - DNA, 903 bp, Artificial Sequence
  chemically treated genomic DNA (Homo sapiens) CpG-island No: 34165
tcgcgggtttggtcgcgagtacgattggcgggatatttttttcgtattttattttcgaataggcgttaatttcgtcgagattttaggagtagatgtattaggaaacgttagggaagtaggtcgggacggatcgggatttatttagcgcgaaagtagttcgattttatttgtattcgcgttttttgtttcggtcgaggcgtttttttttcgtagcgtttttagtggtcgcggtcggagtcggggagcgaagtcgttcgggggttttcgtcgtatttatcgtttttgtttacgcggtcggcgtttagtatcgttagtttgatgtttttgggtagtaggtagttcgaggaggattcggggatgggtgcgagtagaaagtgttcggatatgttgagcggtcgtatggagcgcgtttcggggttcggcgcgtaattcgagagggttgggtttcgtcgtattcggagtcggttcgttagttgggagtgcgggattagaggttcgggatcgcggcggttgtttgtagaattgttaaggttcgcggtttttaaagggtttggtgcgttcgggagcgcggcggtcgttttagttttttttcgttttcgttttttttcggagcggtcgggaggggcgggagtagaggtcgcggagttgattatcgtcgaggttgtgcgtttcgtcgggttgttagttgttcgcggttttaggcgttttgcggtaggattgcggtttcggggtttagattttggagatacggttatcgtttagagcgcgcgagtggtttttagttaggtattttgcgagttttttcgtttcgtagtagttagtcggagttattagatttgtgggtgaatttgagataggagttacgagttgacgagagaagaagaaaaagtgtaattagttgga

SEQ ID NO: 34166 - DNA, 903 bp, Artificial Sequence
  chemically treated genomic DNA (Homo sapiens) CpG-island No: 34166
tccaactaattacactttttcttcttctctcgtcaactcgtaactcctatctcaaattcacccacaaatctaataactccgactaactactacgaaacgaaaaaactcgcaaaatacctaactaaaaaccactcgcgcgctctaaacgataaccgtatctccaaaatctaaaccccgaaaccgcaatcctaccgcaaaacgcctaaaaccgcgaacaactaacaacccgacgaaacgcacaacctcgacgataatcaactccgcgacctctactcccgcccctcccgaccgctccgaaaaaaaacgaaaacgaaaaaaaactaaaacgaccgccgcgctcccgaacgcaccaaaccctttaaaaaccgcgaaccttaacaattctacaaacaaccgccgcgatcccgaacctctaatcccgcactcccaactaacgaaccgactccgaatacgacgaaacccaaccctctcgaattacgcgccgaaccccgaaacgcgctccatacgaccgctcaacatatccgaacactttctactcgcacccatccccgaatcctcctcgaactacctactacccaaaaacatcaaactaacgatactaaacgccgaccgcgtaaacaaaaacgataaatacgacgaaaacccccgaacgacttcgctccccgactccgaccgcgaccactaaaaacgctacgaaaaaaaaacgcctcgaccgaaacaaaaaacgcgaatacaaataaaatcgaactactttcgcgctaaataaatcccgatccgtcccgacctacttccctaacgtttcctaatacatctactcctaaaatctcgacgaaattaacgcctattcgaaaataaaatacgaaaaaaatatcccgccaatcgtactcgcgaccaaacccgcga

SEQ ID NO: 34167 - DNA, 903 bp, Artificial Sequence
  chemically treated genomic DNA (Homo sapiens) CpG-island No: 34167
tttaattgattgtattttttttttttttttcgttaattcgtaatttttattttaagtttatttataggtttagtgatttcggttggttgttgcggggcgaggagattcgtagaatgtttgattagaggttattcgcgcgttttggacggtggtcgtatttttagggtttgagtttcggagtcgtagttttgtcgtagagcgtttggagtcgcgagtagttagtagttcggcgaagcgtatagtttcggcgatagttagtttcgcggtttttgttttcgtttttttcggtcgtttcgggaaggggcggagacgaggaggagttgggacggtcgtcgcgttttcgggcgtattaagttttttaaaagtcgcgggttttgatagttttgtaggtagtcgtcgcggtttcggatttttagtttcgtatttttagttggcgagtcggtttcgggtgcggcgaggtttagttttttcggattgcgcgtcggatttcgggacgcgttttatgcggtcgtttagtatgttcgggtattttttgttcgtatttattttcgagtttttttcggattatttattgtttaaggatattaaattggcggtgttgggcgtcggtcgcgtgggtaagagcggtgagtgcggcggggattttcgggcggtttcgtttttcggtttcggtcgcgattattgggggcgttgcggagagagggcgtttcggtcgaagtagagggcgcgggtgtaggtagaatcgggttgttttcgcgttgggtgggtttcggttcgtttcggtttgtttttttggcgttttttggtgtatttatttttgggatttcggcgggattggcgtttgttcggggatggggtgcgggagaggtgtttcgttagtcgtattcgcggttaagttcgcgg

SEQ ID NO: 34168 - DNA, 903 bp, Artificial Sequence
  chemically treated genomic DNA (Homo sapiens) CpG-island No: 34168
ccgcgaacttaaccgcgaatacgactaacgaaacacctctcccgcaccccatccccgaacaaacgccaatcccgccgaaatcccaaaaataaatacaccaaaaaacgccaaaaaaacaaaccgaaacgaaccgaaacccacccaacgcgaaaacaacccgattctacctacacccgcgccctctacttcgaccgaaacgccctctctccgcaacgcccccaataatcgcgaccgaaaccgaaaaacgaaaccgcccgaaaatccccgccgcactcaccgctcttacccacgcgaccgacgcccaacaccgccaatttaatatccttaaacaataaataatccgaaaaaaactcgaaaataaatacgaacaaaaaatacccgaacatactaaacgaccgcataaaacgcgtcccgaaatccgacgcgcaatccgaaaaaactaaacctcgccgcacccgaaaccgactcgccaactaaaaatacgaaactaaaaatccgaaaccgcgacgactacctacaaaactatcaaaacccgcgacttttaaaaaacttaatacgcccgaaaacgcgacgaccgtcccaactcctcctcgtctccgccccttcccgaaacgaccgaaaaaaacgaaaacaaaaaccgcgaaactaactatcgccgaaactatacgcttcgccgaactactaactactcgcgactccaaacgctctacgacaaaactacgactccgaaactcaaaccctaaaaatacgaccaccgtccaaaacgcgcgaataacctctaatcaaacattctacgaatctcctcgccccgcaacaaccaaccgaaatcactaaacctataaataaacttaaaataaaaattacgaattaacgaaaaaaaaaaaaaaaatacaatcaattaaa

SEQ ID NO: 34169 - DNA, 729 bp, Artificial Sequence
  chemically treated genomic DNA (Homo sapiens) CpG-island No: 34169
tacggcggggagggtagggtgttgattttagggattacgatagtcggtttcggtggtggggatttcgcgcgggatttacgcgggaataaagaggcggttggacggtttagtttttcgtattcggaaggatttgttttattttttcggttttcgtatttttttattcgtatttgagtgattagattttattgtagttaatagttcgcggggtagttagtttcgagggatcgttcggaaagatataacgcgcgtggaaggcgtcgggcgtttagtttcgggagagattagaagtggcgtttttgtttagcgtcggtaatttaggggaattcgcggttatcgcggatttattaggggtgaggcggtattgagtataagtgtgaggttttcgggagttacgttttcgtttttttagtgttattcgtttttattttaggcggttttgatcgttatcgttttaatttggagaggtgagtttttttttatcgacgtatttttttttttcggtaggaaggagggcgttgatttagcgggcgtacgtttttgattgcgtatgcgtcgggtgcgtcgttcgttagcggcgagtggtttcgcggcgtcggattcgtcgtttcgttaagagtgcgtttgcgcggtcgttggggttcgtattttagttttttttttttcggcgttttttggggtttcgagttcggcgggattatgtttattagtatcggttttagtgggttt

SEQ ID NO: 34170 - DNA, 729 bp, Artificial Sequence
  chemically treated genomic DNA (Homo sapiens) CpG-island No: 34170
aaacccactaaaaccgatactaataaacataatcccgccgaactcgaaaccccaaaaaacgccgaaaaaaaaaaaactaaaatacgaaccccaacgaccgcgcaaacgcactcttaacgaaacgacgaatccgacgccgcgaaaccactcgccgctaacgaacgacgcacccgacgcatacgcaatcaaaaacgtacgcccgctaaatcaacgccctccttcctaccgaaaaaaaaaaatacgtcgataaaaaaaaactcacctctccaaattaaaacgataacgatcaaaaccgcctaaaataaaaacgaataacactaaaaaaacgaaaacgtaactcccgaaaacctcacacttatactcaataccgcctcacccctaataaatccgcgataaccgcgaattcccctaaattaccgacgctaaacaaaaacgccacttctaatctctcccgaaactaaacgcccgacgccttccacgcgcgttatatctttccgaacgatccctcgaaactaactaccccgcgaactattaactacaataaaatctaatcactcaaatacgaataaaaaaatacgaaaaccgaaaaaataaaacaaatccttccgaatacgaaaaactaaaccgtccaaccgcctctttattcccgcgtaaatcccgcgcgaaatccccaccaccgaaaccgactatcgtaatccctaaaatcaacaccctaccctccccgccgta

SEQ ID NO: 34171 - DNA, 729 bp, Artificial Sequence
  chemically treated genomic DNA (Homo sapiens) CpG-island No: 34171
gagtttattggagtcggtgttggtgaatatggtttcgtcgggttcggagttttagagggcgtcgggggaggggaagttgaagtgcgagttttagcgatcgcgtaggcgtatttttggcggagcgacgaattcggcgtcgcgaggttattcgtcgttgacgaacggcgtattcggcgtatgcgtagttaggggcgtgcgttcgttgggttagcgtttttttttttgtcggggaagggaagtgcgtcggtaggggagggtttatttttttaggttgaaacgatggcggttagaatcgtttgaggtaaaaacgggtggtattggggaagcggaggcgtagttttcgagagttttatatttgtgtttagtgtcgttttatttttggtggattcgcgatggtcgcggatttttttggattgtcggcgttgggtaggagcgttatttttaatttttttcgagattggacgttcggcgttttttacgcgcgttgtgttttttcgggcggtttttcgaagttggttatttcgcgggttgttgattgtagtgggatttggttatttagatgcggatagaggggtacgggagtcggagaggtggaataggttttttcgggtgcggagagttgggtcgtttagtcgtttttttgttttcgcgtgggtttcgcgcggaatttttattatcggggtcgattgtcgtggtttttggagttagtattttgtttttttcgtcgtg

SEQ ID NO: 34172 - DNA, 729 bp, Artificial Sequence
  chemically treated genomic DNA (Homo sapiens) CpG-island No: 34172
cacgacgaaaaaaacaaaatactaactccaaaaaccacgacaatcgaccccgataataaaaattccgcgcgaaacccacgcgaaaacaaaaaaacgactaaacgacccaactctccgcacccgaaaaaacctattccacctctccgactcccgtacccctctatccgcatctaaataaccaaatcccactacaatcaacaacccgcgaaataaccaacttcgaaaaaccgcccgaaaaaacacaacgcgcgtaaaaaacgccgaacgtccaatctcgaaaaaaattaaaaataacgctcctacccaacgccgacaatccaaaaaaatccgcgaccatcgcgaatccaccaaaaataaaacgacactaaacacaaatataaaactctcgaaaactacgcctccgcttccccaataccacccgtttttacctcaaacgattctaaccgccatcgtttcaacctaaaaaaataaaccctcccctaccgacgcacttcccttccccgacaaaaaaaaaaacgctaacccaacgaacgcacgcccctaactacgcatacgccgaatacgccgttcgtcaacgacgaataacctcgcgacgccgaattcgtcgctccgccaaaaatacgcctacgcgatcgctaaaactcgcacttcaacttcccctcccccgacgccctctaaaactccgaacccgacgaaaccatattcaccaacaccgactccaataaactc

SEQ ID NO: 34173 - DNA, 578 bp, Artificial Sequence
  chemically treated genomic DNA (Homo sapiens) CpG-island No: 34173
ggtaggtcggcgcggttcggcgttggagttaggcggtcggattggtaggggcggcgtgtcgttcgggatttttattggggaaggtggggggtcggggtcgttttcgtttcgggtcgtacgttcgaagatcggaggaggggattgcgtacgttattaagagggcgtatagtcgaggttggacgatgcgcggtttcggagtagggttttttgtttagggagttcggttgcgttcgaggggatttcgaagttatcggtagggtcggagttcggtgtattacgttttttttttgcgttcggggtttttgcggggatagaggttttaggaaagtagtttttatttatgtggtatcgatcggaattcgcggtcggttaggcggatttggacggagcgtttttgttcggaatttggcgcggggcgtcgcgcgttcgtgtggcgtttcggtttttttatcgtttagttttcggaggtacggagttcgcggcgggacgatgacggttgggtcgggttaggcgtgggagatttttagatttcggttcgtcgggacggttagttgcgttattttggacgtgggtaatat

SEQ ID NO: 34174 - DNA, 578 bp, Artificial Sequence
  chemically treated genomic DNA (Homo sapiens) CpG-island No: 34174
atattacccacgtccaaaataacgcaactaaccgtcccgacgaaccgaaatctaaaaatctcccacgcctaacccgacccaaccgtcatcgtcccgccgcgaactccgtacctccgaaaactaaacgataaaaaaaccgaaacgccacacgaacgcgcgacgccccgcgccaaattccgaacaaaaacgctccgtccaaatccgcctaaccgaccgcgaattccgatcgataccacataaataaaaactactttcctaaaacctctatccccgcaaaaaccccgaacgcaaaaaaaaaacgtaatacaccgaactccgaccctaccgataacttcgaaatcccctcgaacgcaaccgaactccctaaacaaaaaaccctactccgaaaccgcgcatcgtccaacctcgactatacgccctcttaataacgtacgcaatcccctcctccgatcttcgaacgtacgacccgaaacgaaaacgaccccgaccccccaccttccccaataaaaatcccgaacgacacgccgcccctaccaatccgaccgcctaactccaacgccgaaccgcgccgacctacc

SEQ ID NO: 34175 - DNA, 578 bp, Artificial Sequence
  chemically treated genomic DNA (Homo sapiens) CpG-island No: 34175
gtattgtttacgtttaaggtgacgtagttggtcgtttcggcgggtcggagtttgggagttttttacgtttggttcggtttaatcgttatcgtttcgtcgcgagtttcgtgttttcggggattgaacggtggggaggtcgaggcgttatacgagcgcgcggcgtttcgcgttaggtttcgagtagggacgtttcgtttaggttcgtttggtcggtcgcgggtttcgatcggtgttatataaataaaggttatttttttgagatttttgttttcgtagaggtttcgggcgtagagggggggcgtggtgtatcgagtttcgattttgtcggtgatttcggggttttttcgagcgtagtcgggttttttgggtaggaaattttgtttcgaaatcgcgtatcgtttagtttcggttgtgcgtttttttggtggcgtgcgtagttttttttttcggttttcggacgtgcggttcggggcggaggcggtttcgattttttattttttttagtgagggtttcgagcggtacgtcgtttttgttagttcggtcgtttagttttagcgtcgggtcgcgtcgatttgtt

SEQ ID NO: 34176 - DNA, 578 bp, Artificial Sequence
  chemically treated genomic DNA (Homo sapiens) CpG-island No: 34176
aacaaatcgacgcgacccgacgctaaaactaaacgaccgaactaacaaaaacgacgtaccgctcgaaaccctcactaaaaaaaataaaaaatcgaaaccgcctccgccccgaaccgcacgtccgaaaaccgaaaaaaaaaactacgcacgccaccaaaaaaacgcacaaccgaaactaaacgatacgcgatttcgaaacaaaatttcctacccaaaaaacccgactacgctcgaaaaaaccccgaaatcaccgacaaaatcgaaactcgatacaccacgccccccctctacgcccgaaacctctacgaaaacaaaaatctcaaaaaaataacctttatttatataacaccgatcgaaacccgcgaccgaccaaacgaacctaaacgaaacgtccctactcgaaacctaacgcgaaacgccgcgcgctcgtataacgcctcgacctccccaccgttcaatccccgaaaacacgaaactcgcgacgaaacgataacgattaaaccgaaccaaacgtaaaaaactcccaaactccgacccgccgaaacgaccaactacgtcaccttaaacgtaaacaatac

SEQ ID NO: 34177 - DNA, 622 bp, Artificial Sequence
  chemically treated genomic DNA (Homo sapiens) CpG-island No: 34177
ttttcgcgtcggatcgttaggcggggtattagggaaattgcgatgcgtcggtttgcgagtttatcgtgacgtagagttggcggtcgttagcgatagttattttgtgagggattttttttttaatattttaatcgtttttttgtttttaagggttcgttttcgtttcggtttcgtttttgtttttttgaggaagttcggcgtagtttaatttttatagggtcgcggagagggcgcgttaggcggggatttgcgttaggttcgcggcgtatgtttagtggttggggattgggcgggtatttcgggcggggagtttgattgaacggcggttttgttgattggtcgggttgtttacgttacgttcgttgtttttcgatggatagttttttatttgtcgggtcggttttcgtagagagtggtggttttgaaaatttagttttgggagaatatttgtcgcgtttttcgtttaaatatttagaggttttatagtcgttatcgttgcggtggaggaggtcgtttgttgcgttttattttattagaaagtttaatattggtttgaagcgtaattttaaagtggtaggggaaaatatcgatttagcgtagagagtaaaatattttcgttttg

SEQ ID NO: 34178 - DNA, 622 bp, Artificial Sequence
  chemically treated genomic DNA (Homo sapiens) CpG-island No: 34178
caaaacgaaaatattttactctctacgctaaatcgatattttcccctaccactttaaaattacgcttcaaaccaatattaaactttctaataaaataaaacgcaacaaacgacctcctccaccgcaacgataacgactataaaacctctaaatatttaaacgaaaaacgcgacaaatattctcccaaaactaaattttcaaaaccaccactctctacgaaaaccgacccgacaaataaaaaactatccatcgaaaaacaacgaacgtaacgtaaacaacccgaccaatcaacaaaaccgccgttcaatcaaactccccgcccgaaatacccgcccaatccccaaccactaaacatacgccgcgaacctaacgcaaatccccgcctaacgcgccctctccgcgaccctataaaaattaaactacgccgaacttcctcaaaaaaacaaaaacgaaaccgaaacgaaaacgaacccttaaaaacaaaaaaacgattaaaatattaaaaaaaaaatccctcacaaaataactatcgctaacgaccgccaactctacgtcacgataaactcgcaaaccgacgcatcgcaatttccctaataccccgcctaacgatccgacgcgaaaa

SEQ ID NO: 34179 - DNA, 622 bp, Artificial Sequence
  chemically treated genomic DNA (Homo sapiens) CpG-island No: 34179
tagaacggaggtgttttgttttttgcgttagatcggtatttttttttattattttaagattacgttttaggttagtgttaggttttttggtggggtgggacgtaataggcggttttttttatcgtagcgatggcggttatgaaatttttgggtatttgggcgggaggcgcggtaggtatttttttaaaattgggtttttaagattattattttttgcggaggtcgattcggtaggtaaggaattgtttatcggaaggtaacgggcgtggcgtgagtagttcgattaattagtagagtcgtcgtttagttaggtttttcgttcggggtattcgtttagtttttaattattgagtatgcgtcgcgggtttggcgtaaattttcgtttggcgcgtttttttcgcggttttgtgagggttaggttgcgtcgggtttttttagagagatagaaacggagtcggggcgggagcgggtttttagggataggaaagcggttagggtattggggggaaagttttttatagggtggttgtcgttagcggtcgttagttttgcgttacggtgggttcgtaagtcggcgtatcgtagtttttttggtatttcgtttggcggttcggcgcggagg

SEQ ID NO: 34180 - DNA, 622 bp, Artificial Sequence
  chemically treated genomic DNA (Homo sapiens) CpG-island No: 34180
cctccgcgccgaaccgccaaacgaaataccaaaaaaactacgatacgccgacttacgaacccaccgtaacgcaaaactaacgaccgctaacgacaaccaccctataaaaaactttccccccaataccctaaccgctttcctatccctaaaaacccgctcccgccccgactccgtttctatctctctaaaaaaacccgacgcaacctaaccctcacaaaaccgcgaaaaaaacgcgccaaacgaaaatttacgccaaacccgcgacgcatactcaataattaaaaactaaacgaataccccgaacgaaaaacctaactaaacgacgactctactaattaatcgaactactcacgccacgcccgttaccttccgataaacaattccttacctaccgaatcgacctccgcaaaaaataataatcttaaaaacccaattttaaaaaaatacctaccgcgcctcccgcccaaatacccaaaaatttcataaccgccatcgctacgataaaaaaaaccgcctattacgtcccaccccaccaaaaaacctaacactaacctaaaacgtaatcttaaaataataaaaaaaaataccgatctaacgcaaaaaacaaaacacctccgttcta

SEQ ID NO: 34181 - DNA, 588 bp, Artificial Sequence
  chemically treated genomic DNA (Homo sapiens) CpG-island No: 34181
attttttttcgttcgtttttcgatgatttttttcgttttcgcgttttttcgttcgttgtcgtcgtttttttcgcgttgggtgtttcgtcgtcgtattatgttttcgggttgcgttttttgcgcgcgcgtgttcgcgtaattttttttcgcgcgcgtgcgtcgttttttcgtgttttttcgttttgttcgggtcgttttttatcgtcgttttcgggcggcggttcgtggtttttttgtttttgcgtttcgtgcgcgggcgtttgttcgtttttcgcgcgttcgatgcgtttcggtgcgcggtcggtttcgggcgacggggggattcgcgtggtcggtcgtgtgttgtgttcgtcgtgtttttttttagtttttttcggtcgggttttttttcgttttgttttttttcgttggtcgcgttttcgcgcgtttcgttttttttacgttcgttttcgcggttcgttcgcggttttttttcgtggtttttttttttttttttcgtgtcggtggtggttttcgtttttcgtcggttttttttttttgtttgtcgcgttttcgcgtttttttttgtttcgtgtattcggtttttcg

SEQ ID NO: 34182 - DNA, 588 bp, Artificial Sequence
  chemically treated genomic DNA (Homo sapiens) CpG-island No: 34182
cgaaaaaccgaatacacgaaacaaaaaaaaacgcgaaaacgcgacaaacaaaaaaaaaaaaccgacgaaaaacgaaaaccaccaccgacacgaaaaaaaaaaaaaaaaaccacgaaaaaaaaccgcgaacgaaccgcgaaaacgaacgtaaaaaaaacgaaacgcgcgaaaacgcgaccaacgaaaaaaaacaaaacgaaaaaaaacccgaccgaaaaaaactaaaaaaaaacacgacgaacacaacacacgaccgaccacgcgaatccccccgtcgcccgaaaccgaccgcgcaccgaaacgcatcgaacgcgcgaaaaacgaacaaacgcccgcgcacgaaacgcaaaaacaaaaaaaccacgaaccgccgcccgaaaacgacgataaaaaacgacccgaacaaaacgaaaaaacacgaaaaaacgacgcacgcgcgcgaaaaaaaattacgcgaacacgcgcgcgcaaaaaacgcaacccgaaaacataatacgacgacgaaacacccaacgcgaaaaaaacgacgacaacgaacgaaaaaacgcgaaaacgaaaaaaatcatcgaaaaacgaacgaaaaaaaat

SEQ ID NO: 34183 - DNA, 588 bp, Artificial Sequence
  chemically treated genomic DNA (Homo sapiens) CpG-island No: 34183
cgggggatcgggtatacgggatagggaagggcgcgggggcgcgataggtaaaaaagggggatcggcgaagggcgggggttattatcgatacggggggggagaggggggattacggaggggagtcgcggacgggtcgcgggaacggacgtgaaaagggcggaacgcgcgggaacgcgattagcgggggggggtaaaacgggaaaaggttcgatcgagggggattaggggggggtacgacgggtatagtatacggtcggttacgcgaattttttcgtcgttcgggatcgatcgcgtatcgaagcgtatcgggcgcgcgggagacggataggcgttcgcgtacgaagcgtaaggataggggggttacgggtcgtcgttcgggggcggcgatggggggcggttcggatagaacgggagaatacgggggaacgacgtacgcgcgcgggggagggttgcgcgggtacgcgcgcgtaaaaggcgtagttcgggggtatggtacgacggcggggtatttagcgcgaaaggaacggcggtagcgggcgaggaaacgcggaggcggaaggaattatcgggaagcggacgggggaaggt

SEQ ID NO: 34184 - DNA, 588 bp, Artificial Sequence
  chemically treated genomic DNA (Homo sapiens) CpG-island No: 34184
accttcccccgtccgcttcccgataattccttccgcctccgcgtttcctcgcccgctaccgccgttcctttcgcgctaaataccccgccgtcgtaccatacccccgaactacgccttttacgcgcgcgtacccgcgcaaccctcccccgcgcgcgtacgtcgttcccccgtattctcccgttctatccgaaccgccccccatcgccgcccccgaacgacgacccgtaacccccctatccttacgcttcgtacgcgaacgcctatccgtctcccgcgcgcccgatacgcttcgatacgcgatcgatcccgaacgacgaaaaaattcgcgtaaccgaccgtatactatacccgtcgtacccccccctaatccccctcgatcgaaccttttcccgttttacccccccccgctaatcgcgttcccgcgcgttccgcccttttcacgtccgttcccgcgacccgtccgcgactcccctccgtaatcccccctctccccccccgtatcgataataacccccgcccttcgccgatcccccttttttacctatcgcgcccccgcgcccttccctatcccgtatacccgatcccccg

SEQ ID NO: 34185 - DNA, 578 bp, Artificial Sequence
  chemically treated genomic DNA (Homo sapiens) CpG-island No: 34185
ggttatcgcgtaggaagtcgagtacgaggggatataggtcgttgggaattacgcggcgaatgtcggcgttcgttattttttaggtaatacgcgttattatcgttgtcgacgtagtacgatttaggaatttaataggggtagtgggcgggtttgtgttacgttattgcgtcgcgcgggcgtataacggaaagggtgggttttatagggtagttttatttttattttagaggtagggtagacgggaaatttataaatttttttcggttttacgcgtatcgttattttggttaagggcggagtttatcggtcgttagtttgtggaggcggagttttgacgttagggattacgttttcggcgtggcgggaaaattcgggatttttcgcgtagtttttttgggggaggtatttttttttagagtagcggtttttcgcgtttttgttgggattcggattttagagtaatgagtggataagcgggttcgaatagttgttttataagattttttaatcgtttttatggcgtattggtacggttaatggattttcgttttttatttttattgtttttaatatttagg

SEQ ID NO: 34186 - DNA, 578 bp, Artificial Sequence
  chemically treated genomic DNA (Homo sapiens) CpG-island No: 34186
cctaaatattaaaaacaataaaaataaaaaacgaaaatccattaaccgtaccaatacgccataaaaacgattaaaaaatcttataaaacaactattcgaacccgcttatccactcattactctaaaatccgaatcccaacaaaaacgcgaaaaaccgctactctaaaaaaaaatacctcccccaaaaaaactacgcgaaaaatcccgaattttcccgccacgccgaaaacgtaatccctaacgtcaaaactccgcctccacaaactaacgaccgataaactccgcccttaaccaaaataacgatacgcgtaaaaccgaaaaaaatttataaatttcccgtctaccctacctctaaaataaaaataaaactaccctataaaacccaccctttccgttatacgcccgcgcgacgcaataacgtaacacaaacccgcccactacccctattaaattcctaaatcgtactacgtcgacaacgataataacgcgtattacctaaaaaataacgaacgccgacattcgccgcgtaattcccaacgacctatatcccctcgtactcgacttcctacgcgataacc

SEQ ID NO: 34187 - DNA, 578 bp, Artificial Sequence
  chemically treated genomic DNA (Homo sapiens) CpG-island No: 34187
tttgggtattggaggtagtgaagatgaagggcgagaatttattggtcgtgttagtacgttatgggggcggttgggagattttgtagaataattgttcgagttcgtttgtttatttattattttggaattcgagttttagtaggggcgcgggaaatcgttgttttgagaaaaggtattttttttagaaagattgcgcgggaagtttcgagttttttcgttacgtcgagggcgtgatttttgacgttagagtttcgtttttataagttggcggtcggtgggtttcgtttttaattaagatggcgatacgcgtgggatcggaaagagtttatagatttttcgtttattttatttttgaggtgaaggtgggattgttttgtggagtttatttttttcgttatgcgttcgcgcggcgtaatgacgtaatataggttcgtttattgtttttgttgggtttttgagtcgtgttgcgtcgataacggtagtgacgcgtattgtttggaggatggcggacgtcggtattcgtcgcgtggtttttagcgatttgtattttttcgtgttcggttttttgcgcgataatt

SEQ ID NO: 34188 - DNA, 578 bp, Artificial Sequence
  chemically treated genomic DNA (Homo sapiens) CpG-island No: 34188
aattatcgcgcaaaaaaccgaacacgaaaaaatacaaatcgctaaaaaccacgcgacgaataccgacgtccgccatcctccaaacaatacgcgtcactaccgttatcgacgcaacacgactcaaaaacccaacaaaaacaataaacgaacctatattacgtcattacgccgcgcgaacgcataacgaaaaaaataaactccacaaaacaatcccaccttcacctcaaaaataaaataaacgaaaaatctataaactctttccgatcccacgcgtatcgccatcttaattaaaaacgaaacccaccgaccgccaacttataaaaacgaaactctaacgtcaaaaatcacgccctcgacgtaacgaaaaaactcgaaacttcccgcgcaatctttctaaaaaaaataccttttctcaaaacaacgatttcccgcgcccctactaaaactcgaattccaaaataataaataaacaaacgaactcgaacaattattctacaaaatctcccaaccgcccccataacgtactaacacgaccaataaattctcgcccttcatcttcactacctccaatacccaaa

SEQ ID NO: 34189 - DNA, 529 bp, Artificial Sequence
  chemically treated genomic DNA (Homo sapiens) CpG-island No: 34189
attattttttaatttttagatttcgtttatttcgtttcggcggtgttttcgtgacgacgttattcgaagtgcggttgcgtaagggtgacggcgcgcgagtaaaggggaagggggtgttttggttttagtcgttcgtcgtttttgtaggttttgtcgtcggaaagtcgtttattttcgtttttttttttttttttcggtttaagttttttttttttttttttttttttttcgtttattttttttttgttgtcgtttcgggttcgggttatttttcgggtcgggcgtattaaggtgcgcggtttcggggtttagtatatgattcgtcgttttgttatttttcgtttttttcgttttatgtggttgcggggtcgcggcggcgttgtttattatggttcggaaagtagttagtaggaagcggaaagcgttcgtttcgtcgggagttggaaacgacgtttagggttcgtaggtgagggttgagaggtcggtatttgggtggtgaggttgaggaattaagatgggtttagggttt

SEQ ID NO: 34190 - DNA, 529 bp, Artificial Sequence
  chemically treated genomic DNA (Homo sapiens) CpG-island No: 34190
aaaccctaaacccatcttaattcctcaacctcaccacccaaataccgacctctcaaccctcacctacgaaccctaaacgtcgtttccaactcccgacgaaacgaacgctttccgcttcctactaactactttccgaaccataataaacaacgccgccgcgaccccgcaaccacataaaacgaaaaaaacgaaaaataacaaaacgacgaatcatatactaaaccccgaaaccgcgcaccttaatacgcccgacccgaaaaataacccgaacccgaaacgacaacaaaaaaaaaataaacgaaaaaaaaaaaaaaaaaaaaaaaaaacttaaaccgaaaaaaaaaaaaaaaaacgaaaataaacgactttccgacgacaaaacctacaaaaacgacgaacgactaaaaccaaaacacccccttcccctttactcgcgcgccgtcacccttacgcaaccgcacttcgaataacgtcgtcacgaaaacaccgccgaaacgaaataaacgaaatctaaaaattaaaaaataat

SEQ ID NO: 34191 - DNA, 529 bp, Artificial Sequence
  chemically treated genomic DNA (Homo sapiens) CpG-island No: 34191
ggattttaagtttattttggttttttagttttattatttaggtgtcggttttttaatttttatttgcgggttttgagcgtcgtttttagttttcggcgaggcgggcgtttttcgttttttgttaattatttttcgggttatagtgggtagcgtcgtcgcggtttcgtagttatatggggcgggggaagcgaaggatagtaggacggcgggttatatattgggtttcggggtcgcgtattttagtgcgttcggttcggaaaatggttcggattcggagcggtagtagaaaaaagataggcggaaagaaaggaaagagagaggaaggatttgagtcgggaaagggaaggggaagcgagaatgagcggtttttcgacggtagagtttgtaaggacggcgagcggttagaattaaaatattttttttttttttgttcgcgcgtcgttatttttgcgtagtcgtatttcggatagcgtcgttacggaaatatcgtcggaacgagatgggcgggatttaagggttggaagatagt

SEQ ID NO: 34192 - DNA, 529 bp, Artificial Sequence
  chemically treated genomic DNA (Homo sapiens) CpG-island No: 34192
actatcttccaacccttaaatcccgcccatctcgttccgacgatatttccgtaacgacgctatccgaaatacgactacgcaaaaataacgacgcgcgaacaaaaaaaaaaaaaatattttaattctaaccgctcgccgtccttacaaactctaccgtcgaaaaaccgctcattctcgcttccccttccctttcccgactcaaatccttcctctctctttcctttctttccgcctatcttttttctactaccgctccgaatccgaaccattttccgaaccgaacgcactaaaatacgcgaccccgaaacccaatatataacccgccgtcctactatccttcgcttcccccgccccatataactacgaaaccgcgacgacgctacccactataacccgaaaaataattaacaaaaaacgaaaaacgcccgcctcgccgaaaactaaaaacgacgctcaaaacccgcaaataaaaattaaaaaaccgacacctaaataataaaactaaaaaaccaaaataaacttaaaatcc

SEQ ID NO: 34193 - DNA, 1024 bp, Artificial Sequence
  chemically treated genomic DNA (Homo sapiens) CpG-island No: 34193
aggtcgatagttttcgtttaaagttttgtggtttacgttttcggtttcgatcgattacgttattattaaatttcgtgatattttattttatttttaggtttttcgttttaacggtttcgtgttttggaattttttacgtttttgcgtacgcgttttgcggtttttaacgtttcgatttcgtttttttttggttacgtttttgttcgttaagggttttgttattttcgtgacgtatttattttttttcgggtaatttcgtaatagatttttgattggttgatttaggaagcggattttgcgaggcggcggcgacgataggttggtagtcggtcgattttcgtagaaggtgattggtcggcgttgttgtttaatcggcggcgggttgtcggatttaaattcggatcgttgggattgcggtcgttagttttcggcgagttgttgtttgggttggacgtggttttgtttgttgcgttcgtttttcgcgttttcgttttattttttgtagcgcgttagtaggatggtttataagtagatttattattcggataagtatttcgacgaatattacgagtatcggtgggcgttttttttagatttcgagtcggtttttttagtcggggttttcgcgggcggggcgatttaggtatagtagggtcgggggtgggggtcggggtttggggggcggagttcggggtcggagggcgagggtcggggtttggggtcgcggttatttggcgtttcgcgtagtcggatatggttgggtgtttggtcgcgtcgggtcggttgggtttttgttcggtgtgcgcggagggtgagggaagagtgtttatcgggtcgtatttagtatttgggtaggaatcggcgtaatttgggggttatggggttttcggcgacgcggagtgattatttcgttatttttttttcggtcgtggtcgaagtaattaggtcgtttagtagttggttttagttttagttttttgaattagtttaggaaaatttatttggtgtcgttttttttttttta

SEQ ID NO: 34194 - DNA, 1024 bp, Artificial Sequence
  chemically treated genomic DNA (Homo sapiens) CpG-island No: 34194
taaaaaaaaaaaaacgacaccaaataaattttcctaaactaattcaaaaaactaaaactaaaaccaactactaaacgacctaattacttcgaccacgaccgaaaaaaaaataacgaaataatcactccgcgtcgccgaaaaccccataacccccaaattacgccgattcctacccaaatactaaatacgacccgataaacactcttccctcaccctccgcgcacaccgaacaaaaacccaaccgacccgacgcgaccaaacacccaaccatatccgactacgcgaaacgccaaataaccgcgaccccaaaccccgaccctcgccctccgaccccgaactccgccccccaaaccccgacccccacccccgaccctactatacctaaatcgccccgcccgcgaaaaccccgactaaaaaaaccgactcgaaatctaaaaaaaacgcccaccgatactcgtaatattcgtcgaaatacttatccgaataataaatctacttataaaccatcctactaacgcgctacaaaaaataaaacgaaaacgcgaaaaacgaacgcaacaaacaaaaccacgtccaacccaaacaacaactcgccgaaaactaacgaccgcaatcccaacgatccgaatttaaatccgacaacccgccgccgattaaacaacaacgccgaccaatcaccttctacgaaaatcgaccgactaccaacctatcgtcgccgccgcctcgcaaaatccgcttcctaaatcaaccaatcaaaaatctattacgaaattacccgaaaaaaaataaatacgtcacgaaaataacaaaacccttaacgaacaaaaacgtaaccaaaaaaaaacgaaatcgaaacgttaaaaaccgcaaaacgcgtacgcaaaaacgtaaaaaattccaaaacacgaaaccgttaaaacgaaaaacctaaaaataaaataaaatatcacgaaatttaataataacgtaatcgatcgaaaccgaaaacgtaaaccacaaaactttaaacgaaaactatcgacct

SEQ ID NO: 34195 - DNA, 1024 bp, Artificial Sequence
  chemically treated genomic DNA (Homo sapiens) CpG-island No: 34195
taaaggaaaaaggacggtattaggtgggtttttttggattggtttaaagaattggaattgagattagttattgaacggtttaattatttcggttacggtcgagaaaaaagtgacgggatggttatttcgcgtcgtcgaggattttatgatttttaagttgcgtcggtttttatttaggtattaaatgcggttcggtgggtattttttttttatttttcgcgtatatcgaataaaggtttaatcggttcggcgcggttaggtatttaattatgttcgattgcgcggggcgttaggtggtcgcgattttaaatttcggttttcgtttttcggtttcgggtttcgttttttaggtttcggtttttattttcgattttattatgtttgggtcgtttcgttcgcgggggtttcggttgagggagtcggttcggggtttaagaaaggcgtttatcggtattcgtagtgttcgtcgaagtatttgttcgagtagtagatttgtttgtgggttattttgttggcgcgttgtagaaaatgaaacgagagcgcgaagagcgggcgtagtagataaaattacgtttagtttaggtaataattcgtcggagattaacgatcgtagttttaacgattcggatttgaattcgatagttcgtcgtcgattggatagtagcgtcgattaattattttttgcggaagtcggtcggttgttagtttatcgtcgtcgtcgtttcgtaaagttcgttttttgggttagttaattagagatttgttgcgaggttgttcgagggaagataggtacgttacgggggtggtagggtttttaacgggtaggggcgtggttagaggagggcgaagtcgggacgttaagggtcgtagagcgcgtgcgtaggaacgtggaaagttttaggatacggaatcgttgggacggaggatttgaaggtggagtgaggtattacggggtttggtgatgacgtagtcggtcgaggtcggaagcgtgggttatagggttttgagcggaagttgtcgattt

SEQ ID NO: 34196 - DNA, 1024 bp, Artificial Sequence
  chemically treated genomic DNA (Homo sapiens) CpG-island No: 34196
aaatcgacaacttccgctcaaaaccctataacccacgcttccgacctcgaccgactacgtcatcaccaaaccccgtaatacctcactccaccttcaaatcctccgtcccaacgattccgtatcctaaaactttccacgttcctacgcacgcgctctacgacccttaacgtcccgacttcgccctcctctaaccacgcccctacccgttaaaaaccctaccacccccgtaacgtacctatcttccctcgaacaacctcgcaacaaatctctaattaactaacccaaaaaacgaactttacgaaacgacgacgacgataaactaacaaccgaccgacttccgcaaaaaataattaatcgacgctactatccaatcgacgacgaactatcgaattcaaatccgaatcgttaaaactacgatcgttaatctccgacgaattattacctaaactaaacgtaattttatctactacgcccgctcttcgcgctctcgtttcattttctacaacgcgccaacaaaataacccacaaacaaatctactactcgaacaaatacttcgacgaacactacgaataccgataaacgcctttcttaaaccccgaaccgactccctcaaccgaaacccccgcgaacgaaacgacccaaacataataaaatcgaaaataaaaaccgaaacctaaaaaacgaaacccgaaaccgaaaaacgaaaaccgaaatttaaaatcgcgaccacctaacgccccgcgcaatcgaacataattaaatacctaaccgcgccgaaccgattaaacctttattcgatatacgcgaaaaataaaaaaaaaatacccaccgaaccgcatttaatacctaaataaaaaccgacgcaacttaaaaatcataaaatcctcgacgacgcgaaataaccatcccgtcacttttttctcgaccgtaaccgaaataattaaaccgttcaataactaatctcaattccaattctttaaaccaatccaaaaaaacccacctaataccgtcctttttccttta

SEQ ID NO: 34197 - DNA, 589 bp, Artificial Sequence
  chemically treated genomic DNA (Homo sapiens) CpG-island No: 34197
gtgtcgtcgtcgcgtattttcggtcggaagaaagggcgggttttgtcgttttgttgtgacgtattttttggcgtcgtttgcgggggcggaaacgttttgtttgttcggtaagtcgacggttcgttgttggttttcgtgacgcggtttttttcgcgtttcgcggtatggcgtcggaggggtcgcgggagttcgaaagcgaggtaagggtcgacgggggttttttcggtagttttagttcgttcgtttgtttcgtattgggggttcggtcgggcggtgacggggttggtttagcgggcgtgggtcggatgttggtgacggtacgggagcgttttatcgggtggtcgcgattttcgcgtttcgtttcgggttcgttttggggtggcggttagcggttatagatttcgtttatagttagcgtcgcgtttgtggtgcgatgttatttagcgtagtgattgcggtttagttcggcgtttttcgtagtcggggcggggggattttggcgagtttttcgcgtttttgggaacggatagattgttttaaaggattttgcgtttttttgaacgttatttttcgttttacgtatttagta

SEQ ID NO: 34198 - DNA, 589 bp, Artificial Sequence
  chemically treated genomic DNA (Homo sapiens) CpG-island No: 34198
tactaaatacgtaaaacgaaaaataacgttcaaaaaaacgcaaaatcctttaaaacaatctatccgttcccaaaaacgcgaaaaactcgccaaaatccccccgccccgactacgaaaaacgccgaactaaaccgcaatcactacgctaaataacatcgcaccacaaacgcgacgctaactataaacgaaatctataaccgctaaccgccaccccaaaacgaacccgaaacgaaacgcgaaaatcgcgaccacccgataaaacgctcccgtaccgtcaccaacatccgacccacgcccgctaaaccaaccccgtcaccgcccgaccgaacccccaatacgaaacaaacgaacgaactaaaactaccgaaaaaacccccgtcgacccttacctcgctttcgaactcccgcgacccctccgacgccataccgcgaaacgcgaaaaaaaccgcgtcacgaaaaccaacaacgaaccgtcgacttaccgaacaaacaaaacgtttccgcccccgcaaacgacgccaaaaaatacgtcacaacaaaacgacaaaacccgccctttcttccgaccgaaaatacgcgacgacgacac

SEQ ID NO: 34199 - DNA, 589 bp, Artificial Sequence
  chemically treated genomic DNA (Homo sapiens) CpG-island No: 34199
tgttgagtacgtagagcggagaatgacgtttagaaaaacgtaggattttttaaaataatttattcgtttttaagagcgcgggaagttcgttagagttttttcgtttcgattgcggggagcgtcgggttgggtcgtagttattgcgttgggtgatatcgtattatagacgcggcgttaattgtgggcggggtttgtagtcgttgatcgttattttaaggcggattcgaggcggggcgcgaagatcgcggttattcggtagggcgttttcgtgtcgttattagtattcgatttacgttcgttggattagtttcgttatcgttcggtcgagtttttagtgcgaggtaggcggacggattgaggttgtcgagagagttttcgtcggtttttatttcgttttcgggttttcgcggttttttcgacgttatgtcgcgaggcgcggaggaggtcgcgttacggaggttagtagcgggtcgtcggtttgtcggatagataaagcgttttcgttttcgtaggcgacgttaggaagtgcgttatagtaaagcgatagagttcgttttttttttcggtcggaagtacgcggcggcggtat

SEQ ID NO: 34200 - DNA, 589 bp, Artificial Sequence
  chemically treated genomic DNA (Homo sapiens) CpG-island No: 34200
ataccgccgccgcgtacttccgaccgaaaaaaaaaacgaactctatcgctttactataacgcacttcctaacgtcgcctacgaaaacgaaaacgctttatctatccgacaaaccgacgacccgctactaacctccgtaacgcgacctcctccgcgcctcgcgacataacgtcgaaaaaaccgcgaaaacccgaaaacgaaataaaaaccgacgaaaactctctcgacaacctcaatccgtccgcctacctcgcactaaaaactcgaccgaacgataacgaaactaatccaacgaacgtaaatcgaatactaataacgacacgaaaacgccctaccgaataaccgcgatcttcgcgccccgcctcgaatccgccttaaaataacgatcaacgactacaaaccccgcccacaattaacgccgcgtctataatacgatatcacccaacgcaataactacgacccaacccgacgctccccgcaatcgaaacgaaaaaactctaacgaacttcccgcgctcttaaaaacgaataaattattttaaaaaatcctacgtttttctaaacgtcattctccgctctacgtactcaaca

SEQ ID NO: 34201 - DNA, 600 bp, Artificial Sequence
  chemically treated genomic DNA (Homo sapiens) CpG-island No: 34201
gtcgttggcgtgcggcgtttttcgagggggtttgggtagcggttcgtcgtcgggtcggttttttttggcggcgtttatggtcggggcgcggggcgtcgagggcgtattgtcgttcggggcggttaggttgggcgcgttgtagttgttcgagattcgcgcgttcgttcgttttcgggcggtcgacgataggtcgcggaggttcgagttggagagttttaggtgggatattttgtggagtaggtggtttaggttgtcgggtttatcgtcgggcgttttgcgtagcgtttcgtcggatattaagtagggagtcgtcgtcggggtcgcgcgcgtcgtcgaaattttgttttcgtcgtcgtttatcgataggttgtggagaaggttatcgatcgatgttatcgagttatttttgaagcggttatatttggtgcgtggaagtatgttttttcgtgggttcgttgtattcgttcgggcgttgttggtgtcggtttcggcgcgggttgtcgcgtatagtaggcgagttattgttttcggagcgggacggagagtgggggtttcgggatagttttttggagaacgagagtagagtaagaggatggtgtt

SEQ ID NO: 34202 - DNA, 600 bp, Artificial Sequence
  chemically treated genomic DNA (Homo sapiens) CpG-island No: 34202
aacaccatcctcttactctactctcgttctccaaaaaactatcccgaaacccccactctccgtcccgctccgaaaacaataactcgcctactatacgcgacaacccgcgccgaaaccgacaccaacaacgcccgaacgaatacaacgaacccacgaaaaaacatacttccacgcaccaaatataaccgcttcaaaaataactcgataacatcgatcgataaccttctccacaacctatcgataaacgacgacgaaaacaaaatttcgacgacgcgcgcgaccccgacgacgactccctacttaatatccgacgaaacgctacgcaaaacgcccgacgataaacccgacaacctaaaccacctactccacaaaatatcccacctaaaactctccaactcgaacctccgcgacctatcgtcgaccgcccgaaaacgaacgaacgcgcgaatctcgaacaactacaacgcgcccaacctaaccgccccgaacgacaatacgccctcgacgccccgcgccccgaccataaacgccgccaaaaaaaaccgacccgacgacgaaccgctacccaaaccccctcgaaaaacgccgcacgccaacgac

SEQ ID NO: 34203 - DNA, 600 bp, Artificial Sequence
  chemically treated genomic DNA (Homo sapiens) CpG-island No: 34203
ggtattatttttttgttttgttttcgttttttagaaggttgtttcggggtttttatttttcgtttcgtttcggggatagtggttcgtttgttatgcgcggtagttcgcgtcggggtcggtattagtagcgttcgggcggatgtagcgagtttacggaggggtatgtttttacgtattaagtataatcgttttaggaatgattcggtgatatcggtcgatgattttttttatagtttgtcggtgagcggcggcggaggtaaggtttcggcggcgcgcgcgatttcggcggcggttttttatttggtgttcggcgaggcgttgcgtaaggcgttcgacgatgggttcggtagtttgggttatttgttttataaggtgttttatttgaaattttttagttcgggttttcgcggtttgtcgtcggtcgttcgggagcgggcgggcgcgcggatttcgggtagttgtagcgcgtttagtttggtcgtttcggacggtagtgcgttttcggcgtttcgcgtttcggttatgagcgtcgttaggaagggtcggttcggcgacgagtcgttgtttaggttttttcggggggcgtcgtacgttagcgat

SEQ ID NO: 34204 - DNA, 600 bp, Artificial Sequence
  chemically treated genomic DNA (Homo sapiens) CpG-island No: 34204
atcgctaacgtacgacgccccccgaaaaaacctaaacaacgactcgtcgccgaaccgacccttcctaacgacgctcataaccgaaacgcgaaacgccgaaaacgcactaccgtccgaaacgaccaaactaaacgcgctacaactacccgaaatccgcgcgcccgcccgctcccgaacgaccgacgacaaaccgcgaaaacccgaactaaaaaatttcaaataaaacaccttataaaacaaataacccaaactaccgaacccatcgtcgaacgccttacgcaacgcctcgccgaacaccaaataaaaaaccgccgccgaaatcgcgcgcgccgccgaaaccttacctccgccgccgctcaccgacaaactataaaaaaaatcatcgaccgatatcaccgaatcattcctaaaacgattatacttaatacgtaaaaacatacccctccgtaaactcgctacatccgcccgaacgctactaataccgaccccgacgcgaactaccgcgcataacaaacgaaccactatccccgaaacgaaacgaaaaataaaaaccccgaaacaaccttctaaaaaacgaaaacaaaacaaaaaaataatacc

SEQ ID NO: 34205 - DNA, 502 bp, Artificial Sequence
  chemically treated genomic DNA (Homo sapiens) CpG-island No: 34205
gaaatgtatttaagagtgagtcgggttagtcggggttttttttcgaggcgatttttttgtttttgtagatattttcggtattggtcgattggcgggaggattttttcgcgcgtttcgtatatcggtttttgcgcgtattttaatagagcgtagcgttaggagtttagaagcgggcgggacgtttttcgggttttttatagtgttttttttcgatttggggtaggtgagggtcgtaacggggcggttgggacgcgggattgtaaattttatcgtttcgcgtgtttggattcggtcgttcgagggagggtatttattttttatatatttaatatattttagtagttgcgtttttgtagagacgtttcgagggtttattttcgtataggttggggcggagtcggattcgggatggaaaatttggggtaagggatgtaggtgggggtgaggggggtaggagaaggagaaacgtagttggggggcggaggtttaagtatataacgtg

SEQ ID NO: 34206 - DNA, 502 bp, Artificial Sequence
  chemically treated genomic DNA (Homo sapiens) CpG-island No: 34206
cacgttatatacttaaacctccgccccccaactacgtttctccttctcctacccccctcacccccacctacatcccttaccccaaattttccatcccgaatccgactccgccccaacctatacgaaaataaaccctcgaaacgtctctacaaaaacgcaactactaaaatatattaaatatataaaaaataaataccctccctcgaacgaccgaatccaaacacgcgaaacgataaaatttacaatcccgcgtcccaaccgccccgttacgaccctcacctaccccaaatcgaaaaaaaacactataaaaaacccgaaaaacgtcccgcccgcttctaaactcctaacgctacgctctattaaaatacgcgcaaaaaccgatatacgaaacgcgcgaaaaaatcctcccgccaatcgaccaataccgaaaatatctacaaaaacaaaaaaatcgcctcgaaaaaaaaccccgactaacccgactcactcttaaatacatttc

SEQ ID NO: 34207 - DNA, 502 bp, Artificial Sequence
  chemically treated genomic DNA (Homo sapiens) CpG-island No: 34207
tacgttatgtatttaggttttcgttttttaattgcgttttttttttttttgttttttttatttttatttatattttttgttttaggttttttatttcgaattcgatttcgttttaatttatacgaaggtgggttttcgggacgtttttgtaggaacgtagttattggggtatattgggtatataaagagtgggtattttttttcgagcgatcgggtttaggtacgcgggacgatggggtttgtaatttcgcgttttagtcgtttcgttgcggtttttatttgttttaggtcgagaaggggtattgtaagggattcggagggcgtttcgttcgtttttggatttttggcgttgcgttttgttggggtgcgcgtaggagtcggtgtgcggggcgcgcggggaggttttttcgttagtcggttagtgtcgggaatgtttgtagaagtaaaagagtcgtttcggggaggagtttcggttggttcggtttatttttggatgtatttt

SEQ ID NO: 34208 - DNA, 502 bp, Artificial Sequence
  chemically treated genomic DNA (Homo sapiens) CpG-island No: 34208
aaaatacatccaaaaataaaccgaaccaaccgaaactcctccccgaaacgactcttttacttctacaaacattcccgacactaaccgactaacgaaaaaacctccccgcgcgccccgcacaccgactcctacgcgcaccccaacaaaacgcaacgccaaaaatccaaaaacgaacgaaacgccctccgaatcccttacaataccccttctcgacctaaaacaaataaaaaccgcaacgaaacgactaaaacgcgaaattacaaaccccatcgtcccgcgtacctaaacccgatcgctcgaaaaaaaatacccactctttatatacccaatataccccaataactacgttcctacaaaaacgtcccgaaaacccaccttcgtataaattaaaacgaaatcgaattcgaaataaaaaacctaaaacaaaaaatataaataaaaataaaaaaaacaaaaaaaaaaaaaacgcaattaaaaaacgaaaacctaaatacataacgta

SEQ ID NO: 34209 - DNA, 502 bp, Artificial Sequence
  chemically treated genomic DNA (Homo sapiens) CpG-island No: 34209
gaggggcggcgttgatggcgtttttggttttcgaatgttagggggcgttgtgatcgtcgggcggttttttgggcgttgggagtttatcgcgtaagcgtattttggtttttttttagtttttacgtgcgatttttttcggtaattttttcgagaaaaatgtttaaatttaaggcggttcgtggggtggggggttaggaaaaatatgcgtttttggtcgattagattttggttgggaatgcggtgcgggcgggggttcgggagaagcggcggggtcgcgggataggagaagcggaggaagagtatgtggggtttcggttgagtcgacggattttgtagtaagtacggtagtaataggaggaattcgaggtcgagtatgggattggggataagttcgcggcgtcgcgggaacgtattacgcggttgggtgagtgtttgggatgaggttcgaggaagatagtggttagtagtggggcggggtgggtagttaaaaagtgtttggtag

SEQ ID NO: 34210 - DNA, 502 bp, Artificial Sequence
  chemically treated genomic DNA (Homo sapiens) CpG-island No: 34210
ctaccaaacactttttaactacccaccccgccccactactaaccactatcttcctcgaacctcatcccaaacactcacccaaccgcgtaatacgttcccgcgacgccgcgaacttatccccaatcccatactcgacctcgaattcctcctattactaccgtacttactacaaaatccgtcgactcaaccgaaaccccacatactcttcctccgcttctcctatcccgcgaccccgccgcttctcccgaacccccgcccgcaccgcattcccaaccaaaatctaatcgaccaaaaacgcatatttttcctaaccccccaccccacgaaccgccttaaatttaaacatttttctcgaaaaaattaccgaaaaaaatcgcacgtaaaaactaaaaaaaaaccaaaatacgcttacgcgataaactcccaacgcccaaaaaaccgcccgacgatcacaacgccccctaacattcgaaaaccaaaaacgccatcaacgccgcccctc

SEQ ID NO: 34211 - DNA, 502 bp, Artificial Sequence
  chemically treated genomic DNA (Homo sapiens) CpG-island No: 34211
ttgttagatattttttagttgtttatttcgttttattattggttattgtttttttcggattttattttagatatttatttagtcgcgtggtgcgttttcgcggcgtcgcgggtttgtttttagttttatgttcggtttcgagttttttttgttgttgtcgtgtttgttgtaaaattcgtcggtttagtcggggttttatatatttttttttcgttttttttgtttcgcgatttcgtcgtttttttcggattttcgttcgtatcgtatttttagttaggatttgatcggttaggggcgtatgttttttttgattttttattttacgggtcgttttgaatttgggtatttttttcgaaaaagttgtcgggaaggatcgtacgtggggattgaagaaaggttaggatgcgtttgcgcggtggatttttagcgtttaagaggtcgttcggcgattatagcgttttttagtattcggaggttagaagcgttattagcgtcgtttttt

SEQ ID NO: 34212 - DNA, 502 bp, Artificial Sequence
  chemically treated genomic DNA (Homo sapiens) CpG-island No: 34212
aaaaaacgacgctaataacgcttctaacctccgaatactaaaaaacgctataatcgccgaacgacctcttaaacgctaaaaatccaccgcgcaaacgcatcctaacctttcttcaatccccacgtacgatccttcccgacaactttttcgaaaaaaatacccaaattcaaaacgacccgtaaaataaaaaatcaaaaaaaacatacgcccctaaccgatcaaatcctaactaaaaatacgatacgaacgaaaatccgaaaaaaacgacgaaatcgcgaaacaaaaaaaacgaaaaaaaaatatataaaaccccgactaaaccgacgaattttacaacaaacacgacaacaacaaaaaaaactcgaaaccgaacataaaactaaaaacaaacccgcgacgccgcgaaaacgcaccacgcgactaaataaatatctaaaataaaatccgaaaaaaacaataaccaataataaaacgaaataaacaactaaaaaatatctaacaa

SEQ ID NO: 34213 - DNA, 515 bp, Artificial Sequence
  chemically treated genomic DNA (Homo sapiens) CpG-island No: 34213
tcggtcgtcgaggtcgtatatttttttttaattttatgggggcgtttcgtgcgtcgcgtatttattagcgttgtaggtcgttagattcgtatcggggttcgggtttttacgttttttcggtcgtattttttgtatagtgtttacgttattgtagtagggaagatttagagggttggtttttgttgcgtttagtttcgcgtttttggtcgtcgcggttgtagcggtcgtcgttgttacgtcggtatggttgaagtgtgcggggtattcgttttgtagtagcgtttcgaagtgtaagcggtagtagattaggttgttttttatgtcgaagtggtcgttcgtggttagtattttgttatacgtggtgtacgtgaagtagttgaggtgataaattaagtttcgagcgcgtattattattttcgaggtcgagatgtttaggtggtagcgggcgtagcgttgtatagagaagcgtttgtagggattatggagggaggggttgtggaaatatacggttgggt

SEQ ID NO: 34214 - DNA, 515 bp, Artificial Sequence
  chemically treated genomic DNA (Homo sapiens) CpG-island No: 34214
acccaaccgtatatttccacaacccctccctccataatccctacaaacgcttctctatacaacgctacgcccgctaccacctaaacatctcgacctcgaaaataataatacgcgctcgaaacttaatttatcacctcaactacttcacgtacaccacgtataacaaaatactaaccacgaacgaccacttcgacataaaaaacaacctaatctactaccgcttacacttcgaaacgctactacaaaacgaataccccgcacacttcaaccataccgacgtaacaacgacgaccgctacaaccgcgacgaccaaaaacgcgaaactaaacgcaacaaaaaccaaccctctaaatcttccctactacaataacgtaaacactatacaaaaaatacgaccgaaaaaacgtaaaaacccgaaccccgatacgaatctaacgacctacaacgctaataaatacgcgacgcacgaaacgcccccataaaattaaaaaaaaatatacgacctcgacgaccga

SEQ ID NO: 34215 - DNA, 515 bp, Artificial Sequence
  chemically treated genomic DNA (Homo sapiens) CpG-island No: 34215
atttaatcgtgtgtttttatagtttttttttttatggtttttataggcgtttttttgtgtagcgttgcgttcgttgttatttgggtatttcggtttcggagatggtgatgcgcgttcgggatttggtttattattttaattgttttacgtgtattacgtgtaataagatgttgattacgggcgattatttcggtatgaaggatagtttggtttattgtcgtttgtatttcgaggcgttgttgtagggcgagtatttcgtatattttaattatgtcgacgtggtagcggcggtcgttgtagtcgcggcggttaagagcgcggggttgggcgtagtaggggttaattttttgggttttttttattataatggcgtgggtattgtgtagaaggtgcggtcgaggaaacgtaagagttcgggtttcggtgcggatttggcggtttataacgttggtgagtgcgcggcgtacgaagcgtttttatagggttgggggaaagtgtgcggtttcgacggtcgg

SEQ ID NO: 34216 - DNA, 515 bp, Artificial Sequence
  chemically treated genomic DNA (Homo sapiens) CpG-island No: 34216
ccgaccgtcgaaaccgcacactttcccccaaccctataaaaacgcttcgtacgccgcgcactcaccaacgttataaaccgccaaatccgcaccgaaacccgaactcttacgtttcctcgaccgcaccttctacacaatacccacgccattataataaaaaaaacccaaaaaattaacccctactacgcccaaccccgcgctcttaaccgccgcgactacaacgaccgccgctaccacgtcgacataattaaaatatacgaaatactcgccctacaacaacgcctcgaaatacaaacgacaataaaccaaactatccttcataccgaaataatcgcccgtaatcaacatcttattacacgtaatacacgtaaaacaattaaaataataaaccaaatcccgaacgcgcatcaccatctccgaaaccgaaatacccaaataacaacgaacgcaacgctacacaaaaaaacgcctataaaaaccataaaaaaaaaaactataaaaacacacgattaaat

SEQ ID NO: 34217 - DNA, 667 bp, Artificial Sequence
  chemically treated genomic DNA (Homo sapiens) CpG-island No: 34217
ggcggcgagttttatgcggttttgtacgtttaggtatttttgtcgttcgaagttgcgttttagttgcgttagttgatggtcggtgaaggtcgtgcgcgttttgcgtggtttttttaggcgtatcgggggattgtttttggagttggagatttcgcggtcgttttttttttttattgcggatatagcggtatgttagggttcggtttcgtagtcgtcgtcggtgttttttcgtttttgttcgtggcgtttgtgtaatttcggttttcgatagcggtggtttcgcgatatttaagttcgcgggggtcgtttttagacgggatttttggggtttcgggaataggatatgaattttgaggggaataggacggcggcgggagcgttcgaggtcgagatttttcgggtagtttcggggagaaagaattcgaagttggcgagaattttagtttttgcgtcgcgttcggcgttttgttcgcgttttttggagggataaacggagtcgcgacgatggaatcggatttagtttgttagcgtaggggaagggatttagggtttttggcggagtgagtttcgcgtttgggttttagttttttcggttgcgttcgtgataggaagggaggaagtcgaaggttggggtttggggagagaaatttgcgtggagggataaaaa

SEQ ID NO: 34218 - DNA, 667 bp, Artificial Sequence
  chemically treated genomic DNA (Homo sapiens) CpG-island No: 34218
tttttatccctccacgcaaatttctctccccaaaccccaaccttcgacttcctcccttcctatcacgaacgcaaccgaaaaaactaaaacccaaacgcgaaactcactccgccaaaaaccctaaatcccttcccctacgctaacaaactaaatccgattccatcgtcgcgactccgtttatccctccaaaaaacgcgaacaaaacgccgaacgcgacgcaaaaactaaaattctcgccaacttcgaattctttctccccgaaactacccgaaaaatctcgacctcgaacgctcccgccgccgtcctattcccctcaaaattcatatcctattcccgaaaccccaaaaatcccgtctaaaaacgacccccgcgaacttaaatatcgcgaaaccaccgctatcgaaaaccgaaattacacaaacgccacgaacaaaaacgaaaaaacaccgacgacgactacgaaaccgaaccctaacataccgctatatccgcaataaaaaaaaaaaacgaccgcgaaatctccaactccaaaaacaatcccccgatacgcctaaaaaaaccacgcaaaacgcgcacgaccttcaccgaccatcaactaacgcaactaaaacgcaacttcgaacgacaaaaatacctaaacgtacaaaaccgcataaaactcgccgcc

SEQ ID NO: 34219 - DNA, 667 bp, Artificial Sequence
  chemically treated genomic DNA (Homo sapiens) CpG-island No: 34219
tttttgtttttttacgtaggtttttttttttagattttagttttcggttttttttttttttgttacggacgtagtcggagaaattggggtttagacgcggagtttatttcgttagaaattttgggtttttttttttacgttggtaggttgggttcggttttatcgtcgcggtttcgtttatttttttagggagcgcgggtagagcgtcgagcgcggcgtagggattggagttttcgttagtttcgggtttttttttttcggagttgttcggggggtttcggtttcgggcgttttcgtcgtcgttttgttttttttagggtttatgttttgttttcggggttttagaggtttcgtttgagagcggttttcgcgagtttgggtgtcgcggaattatcgttgtcggaagtcgaggttatataaacgttacgggtaggagcgggagggtatcggcggcggttgcgaggtcgggttttgatatgtcgttgtgttcgtagtgaaggaggagggcgatcgcgagatttttagttttagggatagtttttcggtgcgtttgaaaaagttacgtaaggcgcgtacggtttttatcgattattagttggcgtagttggagcgtagtttcgagcggtagaagtatttgagcgtgtaggatcgtatggagttcgtcgtt

SEQ ID NO: 34220 - DNA, 667 bp, Artificial Sequence
  chemically treated genomic DNA (Homo sapiens) CpG-island No: 34220
aacgacgaactccatacgatcctacacgctcaaatacttctaccgctcgaaactacgctccaactacgccaactaataatcgataaaaaccgtacgcgccttacgtaactttttcaaacgcaccgaaaaactatccctaaaactaaaaatctcgcgatcgccctcctccttcactacgaacacaacgacatatcaaaacccgacctcgcaaccgccgccgataccctcccgctcctacccgtaacgtttatataacctcgacttccgacaacgataattccgcgacacccaaactcgcgaaaaccgctctcaaacgaaacctctaaaaccccgaaaacaaaacataaaccctaaaaaaaacaaaacgacgacgaaaacgcccgaaaccgaaaccccccgaacaactccgaaaaaaaaaaacccgaaactaacgaaaactccaatccctacgccgcgctcgacgctctacccgcgctccctaaaaaaataaacgaaaccgcgacgataaaaccgaacccaacctaccaacgtaaaaaaaaaaacccaaaatttctaacgaaataaactccgcgtctaaaccccaatttctccgactacgtccgtaacaaaaaaaaaaaaaaccgaaaactaaaatctaaaaaaaaaaacctacgtaaaaaaacaaaaa

SEQ ID NO: 34221 - DNA, 532 bp, Artificial Sequence
  chemically treated genomic DNA (Homo sapiens) CpG-island No: 34221
ggggtttgcgggggaaatgaggaatacgcgggaatggaaatggggaaagaaaaagaggagcggaaaagggcgggcgacgagaataacggggggataaagcggggaacgggggagcgcgggggaagggagggaataataagcggggtggggagggaggtaaaaagtggagaagggtgcgagtaggcgttagacgggggcggtgggtggggatatggaagagtgtgcgaaaggtgtcgtacgagtaattgtcggatggtgggtgggatatgtcggggcgggggtacggaaagaaatatgtgggggaataaacgggggtcgggggggggaagaaaaaaagggggaaggggggcggggcggtatagtggggggttgaacgggaacgggtcgtgattttgcggatatgggggcgaaagaaaggcgtatttttcgttacgtagggatttaggggtgttataatcggagtgtgtacggtttttttttaaaaaaggggagttcgttgttagttcgatttatattttttttttttttttat

SEQ ID NO: 34222 - DNA, 532 bp, Artificial Sequence
  chemically treated genomic DNA (Homo sapiens) CpG-island No: 34222
ataaaaaaaaaaaaaaaatataaatcgaactaacaacgaactccccttttttaaaaaaaaaccgtacacactccgattataacacccctaaatccctacgtaacgaaaaatacgcctttctttcgcccccatatccgcaaaatcacgacccgttcccgttcaaccccccactataccgccccgccccccttccccctttttttcttcccccccccgacccccgtttattcccccacatatttctttccgtacccccgccccgacatatcccacccaccatccgacaattactcgtacgacacctttcgcacactcttccatatccccacccaccgcccccgtctaacgcctactcgcacccttctccactttttacctccctccccaccccgcttattattccctcccttcccccgcgctcccccgttccccgctttatccccccgttattctcgtcgcccgcccttttccgctcctctttttctttccccatttccattcccgcgtattcctcatttcccccgcaaacccc

SEQ ID NO: 34223 - DNA, 532 bp, Artificial Sequence
  chemically treated genomic DNA (Homo sapiens) CpG-island No: 34223
gtgaaaggggaggaaaagtatgagtcggattaataacgggttttttttttttgggggggggtcgtatatatttcgattataatatttttaaatttttgcgtggcgagaaatgcgtttttttttcgtttttatattcgtagaattacgattcgttttcgtttaattttttattatatcgtttcgtttttttttttttttttttttttttttttttcgattttcgtttgtttttttatatattttttttcgtattttcgtttcgatatattttatttattattcggtaattattcgtacgatatttttcgtatatttttttatatttttatttatcgttttcgtttaacgtttgttcgtatttttttttattttttgtttttttttttatttcgtttattatttttttttttttttcgcgttttttcgtttttcgttttattttttcgttattttcgtcgttcgttttttttcgtttttttttttttttttttatttttattttcgcgtattttttatttttttcgtaagtttt

SEQ ID NO: 34224 - DNA, 532 bp, Artificial Sequence
  chemically treated genomic DNA (Homo sapiens) CpG-island No: 34224
aaaacttacgaaaaaaataaaaaatacgcgaaaataaaaataaaaaaaaaaaaaaaaaaacgaaaaaaaacgaacgacgaaaataacgaaaaaataaaacgaaaaacgaaaaaacgcgaaaaaaaaaaaaaaataataaacgaaataaaaaaaaaaacaaaaaataaaaaaaaatacgaacaaacgttaaacgaaaacgataaataaaaatataaaaaaatatacgaaaaatatcgtacgaataattaccgaataataaataaaatatatcgaaacgaaaatacgaaaaaaaatatataaaaaaacaaacgaaaatcgaaaaaaaaaaaaaaaaaaaaaaaaaaaaaaacgaaacgatataataaaaaattaaacgaaaacgaatcgtaattctacgaatataaaaacgaaaaaaaaacgcatttctcgccacgcaaaaatttaaaaatattataatcgaaatatatacgacccccccccaaaaaaaaaaaacccgttattaatccgactcatacttttcctcccctttcac

SEQ ID NO: 34225 - DNA, 992 bp, Artificial Sequence
  chemically treated genomic DNA (Homo sapiens) CpG-island No: 34225
ttcgggtttcgcgtcgcgtttttcgatcgttttcggtagcgagcgaggtagggagcgcggagttagtatcgttcgtcggattttatcgtcgagtttcgcgtcgcgtcggttggagtcgtcgttttcgttgtcgtcgtcgtcgtcgttcgttttgtatcggttttttagcgttcggcggttttaatttttttatttttttttttttttcgcgcgttttttttttttttttttcgtttatgtgatcgcgggcgttcgttcggtcgcgcgcgttttcgttttttttttttttttgttttgttttttcgcgttttcgcggtcgcgcgttacgattttttttcgttacgggtttcgcgcgttttcgttttggtacgttttcgtttttggtatacgcggttcgttcgttttgcgcgggtttgtgagtttttatttttattcgtttagtattggtacgcgttttgttttttcgttggtatattcgttcgtattggtacgcgtggttttttcgcgtttattttttttcgggcgcgtttttaagacggttgtggttttcgtgttttacgcgtagtttcggtcgcgggtttcgtaaacgcgcgcgcgtatatatatatatatatatatttattcggttcgtttttttagggcggttgggcgcgtatttattttcgggatcgtttttttatatttattttttttttcggttttagttaggttttttttgcgtatattttcgtacgtttaggttttgacggtttcgtatcgattttttggtatatttcgggttaattttcggggtttttttttcggcgtcgtcgtgagaggaacgcgagttagaatttttaatttttattttgggtagaagaagttagtcggtttcgttttttttttattgttattgtttttcgtaacgatttttttttcggttattttttcgcgcgggggaaaggggtttttttgatcggggatggattttgtcgggagtttaggtttatgtt

SEQ ID NO: 34226 - DNA, 992 bp, Artificial Sequence
  chemically treated genomic DNA (Homo sapiens) CpG-island No: 34226
aacataaacctaaactcccgacaaaatccatccccgatcaaaaaaacccctttcccccgcgcgaaaaaataaccgaaaaaaaaatcgttacgaaaaacaataacaataaaaaaaaaacgaaaccgactaacttcttctacccaaaataaaaattaaaaattctaactcgcgttcctctcacgacgacgccgaaaaaaaaaccccgaaaattaacccgaaatataccaaaaaatcgatacgaaaccgtcaaaacctaaacgtacgaaaatatacgcaaaaaaaacctaactaaaaccgaaaaaaaaaataaatataaaaaaacgatcccgaaaataaatacgcgcccaaccgccctaaaaaaacgaaccgaataaatatatatatatatatatatacgcgcgcgcgtttacgaaacccgcgaccgaaactacgcgtaaaacacgaaaaccacaaccgtcttaaaaacgcgcccgaaaaaaaataaacgcgaaaaaaccacgcgtaccaatacgaacgaatataccaacgaaaaaacaaaacgcgtaccaatactaaacgaataaaaataaaaactcacaaacccgcgcaaaacgaacgaaccgcgtataccaaaaacgaaaacgtaccaaaacgaaaacgcgcgaaacccgtaacgaaaaaaaatcgtaacgcgcgaccgcgaaaacgcgaaaaaacaaaacaaaaaaaaaaaaaaaacgaaaacgcgcgcgaccgaacgaacgcccgcgatcacataaacgaaaaaaaaaaaaaaaaaacgcgcgaaaaaaaaaaaaaaataaaaaaattaaaaccgccgaacgctaaaaaaccgatacaaaacgaacgacgacgacgacgacaacgaaaacgacgactccaaccgacgcgacgcgaaactcgacgataaaatccgacgaacgatactaactccgcgctccctacctcgctcgctaccgaaaacgatcgaaaaacgcgacgcgaaacccgaa

SEQ ID NO: 34227 - DNA, 992 bp, Artificial Sequence
  chemically treated genomic DNA (Homo sapiens) CpG-island No: 34227
ggtatgggtttgggttttcggtagggtttattttcggttaaggaagtttttttttttcgcgcgagggggtgatcgggaggggagtcgttgcggggggtagtagtaataggggagaggcggagtcggttggttttttttgtttaaagtgggggttgggggttttggttcgcgttttttttacggcgacgtcggagggaggatttcgagagttggttcggggtgtgttagggagtcggtgcgaggtcgttagggtttgaacgtgcgggagtgtgcgtaggagagatttggttaaggtcgagagggagagtgagtgtgaaggagcgatttcgggggtgagtgcgcgtttagtcgttttaggggagcgggtcgagtgggtgtgtgtgtgtgtgtgtgtgcgcgcgcgcgtttgcgagattcgcggtcggggttgcgcgtgaagtacggggattatagtcgttttgagggcgcgttcgagaaagggtgaacgcgagggggttacgcgtgttagtgcggacgagtgtgttagcgggggggtagagcgcgtgttagtgttgggcgagtgggagtgggggtttataggttcgcgtagggcgagcggatcgcgtgtgttaggagcgagagcgtgttaaggcgggggcgcgcggggttcgtggcggggaggggtcgtggcgcgcggtcgcggaggcgcggggagataaggtaagagggggaggggagcgagggcgcgcgcggtcgagcgggcgttcgcggttatatgggcgagagaaggagggagggagcgcgcgagggagggaggaggatgggggggttaaagtcgtcgagcgttgaagagtcggtgtagagcgggcggcggcggcggcggtagcggaggcggcggttttagtcggcgcggcgcgaggttcggcggtgggattcggcgggcggtgttagtttcgcgttttttgtttcgttcgttgtcgggggcggtcggaaggcgcggcgcgaagttcggg

SEQ ID NO: 34228 - DNA, 992 bp, Artificial Sequence
  chemically treated genomic DNA (Homo sapiens) CpG-island No: 34228
cccgaacttcgcgccgcgccttccgaccgcccccgacaacgaacgaaacaaaaaacgcgaaactaacaccgcccgccgaatcccaccgccgaacctcgcgccgcgccgactaaaaccgccgcctccgctaccgccgccgccgccgcccgctctacaccgactcttcaacgctcgacgactttaacccccccatcctcctccctccctcgcgcgctccctccctccttctctcgcccatataaccgcgaacgcccgctcgaccgcgcgcgccctcgctcccctccccctcttaccttatctccccgcgcctccgcgaccgcgcgccacgacccctccccgccacgaaccccgcgcgcccccgccttaacacgctctcgctcctaacacacgcgatccgctcgccctacgcgaacctataaacccccactcccactcgcccaacactaacacgcgctctacccccccgctaacacactcgtccgcactaacacgcgtaaccccctcgcgttcaccctttctcgaacgcgccctcaaaacgactataatccccgtacttcacgcgcaaccccgaccgcgaatctcgcaaacgcgcgcgcgcacacacacacacacacacacccactcgacccgctcccctaaaacgactaaacgcgcactcacccccgaaatcgctccttcacactcactctccctctcgaccttaaccaaatctctcctacgcacactcccgcacgttcaaaccctaacgacctcgcaccgactccctaacacaccccgaaccaactctcgaaatcctccctccgacgtcgccgtaaaaaaaacgcgaaccaaaacccccaacccccactttaaacaaaaaaaaccaaccgactccgcctctcccctattactactaccccccgcaacgactcccctcccgatcaccccctcgcgcgaaaaaaaaaaacttccttaaccgaaaataaaccctaccgaaaacccaaacccatacc

SEQ ID NO: 34229 - DNA, 511 bp, Artificial Sequence
  chemically treated genomic DNA (Homo sapiens) CpG-island No: 34229
gcgtacgaaggatttttcgtaggttgttcgtcgcgtcgaatttaggtcgtttggttcgaacgtaggttaaggcggaggcgtttaggttgtttttcggtttcggagttttatagtattaagttcggatcgtaggatacgggcgcgcgttcgggttcgcgtatatttatcgttcgcgtcgtcgtcgtcgtcgtcgtcgttatttcgggacgcggaaggtcgggggcgtcgagtttttaatgtcgtagtttttgggtatcgtagtttcgcgtttagtacgtttttcgcgtcgcgttgcgtcgtttttacgggttcgtttttcgttcggtcggtttcgttcggtcgtttaatttcgaggagtcgttcgtcggattcgttttggggttaagagggaacgcgtttttcgggttcgcggcggagcggagttggaggtcgcgttttattagtcgagcgttttttcgggacgtcggaaggagttttcgcgcggagtcgattacgtgtacggtattttggg

SEQ ID NO: 34230 - DNA, 511 bp, Artificial Sequence
  chemically treated genomic DNA (Homo sapiens) CpG-island No: 34230
cccaaaataccgtacacgtaatcgactccgcgcgaaaactccttccgacgtcccgaaaaaacgctcgactaataaaacgcgacctccaactccgctccgccgcgaacccgaaaaacgcgttccctcttaaccccaaaacgaatccgacgaacgactcctcgaaattaaacgaccgaacgaaaccgaccgaacgaaaaacgaacccgtaaaaacgacgcaacgcgacgcgaaaaacgtactaaacgcgaaactacgatacccaaaaactacgacattaaaaactcgacgcccccgaccttccgcgtcccgaaataacgacgacgacgacgacgacgacgcgaacgataaatatacgcgaacccgaacgcgcgcccgtatcctacgatccgaacttaatactataaaactccgaaaccgaaaaacaacctaaacgcctccgccttaacctacgttcgaaccaaacgacctaaattcgacgcgacgaacaacctacgaaaaatccttcgtacgc

SEQ ID NO: 34231 - DNA, 511 bp, Artificial Sequence
  chemically treated genomic DNA (Homo sapiens) CpG-island No: 34231
tttaagatgtcgtgtacgtggtcggtttcgcgcggaggtttttttcggcgtttcgggggggcgttcggttgatgaaacgcggtttttagtttcgtttcgtcgcgggttcgggaggcgcgtttttttttggttttaaagcgagttcggcgggcggtttttcggggttgggcgatcgagcggggtcggtcgggcggggggcgggttcgtgaaggcggcgtagcgcggcgcgggaggcgtgttgggcgcggggttgcggtgtttagaggttgcggtattaggggttcggcgttttcgatttttcgcgtttcggggtggcggcggcggcggcggcggcggcgcgggcggtgagtgtgcgcgggttcgggcgcgcgttcgtgttttgcgattcgggtttggtgttgtggggtttcggggtcgggaagtagtttgggcgttttcgttttggtttgcgttcgggttagacggtttgggttcggcgcggcgggtagtttgcggggggtttttcgtgcgt

SEQ ID NO: 34232 - DNA, 511 bp, Artificial Sequence
  chemically treated genomic DNA (Homo sapiens) CpG-island No: 34232
acgcacgaaaaaccccccgcaaactacccgccgcgccgaacccaaaccgtctaacccgaacgcaaaccaaaacgaaaacgcccaaactacttcccgaccccgaaaccccacaacaccaaacccgaatcgcaaaacacgaacgcgcgcccgaacccgcgcacactcaccgcccgcgccgccgccgccgccgccgccgccaccccgaaacgcgaaaaatcgaaaacgccgaacccctaataccgcaacctctaaacaccgcaaccccgcgcccaacacgcctcccgcgccgcgctacgccgccttcacgaacccgccccccgcccgaccgaccccgctcgatcgcccaaccccgaaaaaccgcccgccgaactcgctttaaaaccaaaaaaaaacgcgcctcccgaacccgcgacgaaacgaaactaaaaaccgcgtttcatcaaccgaacgcccccccgaaacgccgaaaaaaacctccgcgcgaaaccgaccacgtacacgacatcttaaa

SEQ ID NO: 34233 - DNA, 578 bp, Artificial Sequence
  chemically treated genomic DNA (Homo sapiens) CpG-island No: 34233
cggcgagaggcgagatttcggttcgttcggttttttattttttcgttggtagtgtcgtcgtttatttttattaggaagggtcgttggtgcggacggtcggttttcggcgcggggttttcgtagttttcgtttttcgtcgaagttatttcggttttcgttttcgcgtatcgggttttcgcgttcgttttttttttaggttcggcgcgttcgtttagcgtcgaggtcggaggtaatcggagcgattattttcgggaggcgcgcggggtacgtcgggagttgtagtttatcgggggggggggggtcgcgtatgcgtgagggtgtagggttcgaggtcggtatattaggagcgttcgcgttttattgcgtcgaaagttggttggtagggattgttgcgttcgggtttcgagtcggttataaggttttagatttaagtggttcggaaggtgttcgtttcgtatttcgaggttggggttgcgttttcgttcgagtgtttgtttttgtttcgcgttgtttttgcgttagtttcgggttttttttcggtcgttttcgggtttggttttttttagtttaggtttttt

SEQ ID NO: 34234 - DNA, 578 bp, Artificial Sequence
  chemically treated genomic DNA (Homo sapiens) CpG-island No: 34234
aaaaaacctaaactaaaaaaaaccaaacccgaaaacgaccgaaaaaaaacccgaaactaacgcaaaaacaacgcgaaacaaaaacaaacactcgaacgaaaacgcaaccccaacctcgaaatacgaaacgaacaccttccgaaccacttaaatctaaaaccttataaccgactcgaaacccgaacgcaacaatccctaccaaccaactttcgacgcaataaaacgcgaacgctcctaatataccgacctcgaaccctacaccctcacgcatacgcgacccccccccccccgataaactacaactcccgacgtaccccgcgcgcctcccgaaaataatcgctccgattacctccgacctcgacgctaaacgaacgcgccgaacctaaaaaaaaaacgaacgcgaaaacccgatacgcgaaaacgaaaaccgaaataacttcgacgaaaaacgaaaactacgaaaaccccgcgccgaaaaccgaccgtccgcaccaacgacccttcctaataaaaataaacgacgacactaccaacgaaaaaataaaaaaccgaacgaaccgaaatctcgcctctcgccg

SEQ ID NO: 34235 - DNA, 578 bp, Artificial Sequence
  chemically treated genomic DNA (Homo sapiens) CpG-island No: 34235
gaggagtttgggttggagggggttaggttcgggggcggtcgggggagggttcgggattggcgtagaggtagcgcgaggtagaggtaagtattcggacgaaggcgtagttttagtttcggggtgcggaacgggtatttttcgggttatttgagtttgagattttgtagtcggttcgaggttcgggcgtagtagtttttgttagttagttttcggcgtaatgggacgcgggcgtttttggtgtgtcggtttcgggttttgtatttttacgtatgcgcggttttttttttttcggtggattataattttcggcgtgtttcgcgcgtttttcggaagtgatcgtttcggttgttttcgatttcggcgttgggcgggcgcgtcgggtttggggaaggggcgggcgcggggattcgatgcgcgggagcggaggtcgagatggtttcggcgggaggcgaagattgcgagagtttcgcgtcggaggtcgatcgttcgtattagcggttttttttgataggggtgagcggcggtattgttagcgggaaggtaaggggtcgagcgggtcggggtttcgtttttcgtcg

SEQ ID NO: 34236 - DNA, 578 bp, Artificial Sequence
  chemically treated genomic DNA (Homo sapiens) CpG-island No: 34236
cgacgaaaaacgaaaccccgacccgctcgaccccttaccttcccgctaacaataccgccgctcacccctatcaaaaaaaaccgctaatacgaacgatcgacctccgacgcgaaactctcgcaatcttcgcctcccgccgaaaccatctcgacctccgctcccgcgcatcgaatccccgcgcccgccccttccccaaacccgacgcgcccgcccaacgccgaaatcgaaaacaaccgaaacgatcacttccgaaaaacgcgcgaaacacgccgaaaattataatccaccgaaaaaaaaaaaaccgcgcatacgtaaaaatacaaaacccgaaaccgacacaccaaaaacgcccgcgtcccattacgccgaaaactaactaacaaaaactactacgcccgaacctcgaaccgactacaaaatctcaaactcaaataacccgaaaaatacccgttccgcaccccgaaactaaaactacgccttcgtccgaatacttacctctacctcgcgctacctctacgccaatcccgaaccctcccccgaccgcccccgaacctaaccccctccaacccaaactcctc

SEQ ID NO: 34237 - DNA, 559 bp, Artificial Sequence
  chemically treated genomic DNA (Homo sapiens) CpG-island No: 34237
taatcgtagcgtagttaggcggcggggcggtgtcggtcgaatttagattcgaggttttagaagtagagttaggcgaagttgggttagaatcgcgattttcgtaattttgagcggtattcgtggagtgcgtttgcgtagttacgatcgtagtaggaaagcgtcgtcggttaggtttagttgtggtcggatagggattggaagagaggacgcggtcgagtaggtgtgtattagttttggtaacgagagcgtttatttcgaattttgttggttttgaggtggggaagtcggggagggtagttgaggatttcgcggaggcgcgtgattggttgagcgggtaggttagttttcgagtcgggtggatataggtatcgtagttaggtcgcgtcgcgtcgatttagggtttggttcggttagatagggaagtttagttttcgtacgttagatagcggtatttttgttggcgttatcgtaaatattttttgatcgttatagttagtgtgtggcgtaggcgttatgttttcggttttgttacgtttggagttttggaagttggttgtag

SEQ ID NO: 34238 - DNA, 559 bp, Artificial Sequence
  chemically treated genomic DNA (Homo sapiens) CpG-island No: 34238
ctacaaccaacttccaaaactccaaacgtaacaaaaccgaaaacataacgcctacgccacacactaactataacgatcaaaaaatatttacgataacgccaacaaaaataccgctatctaacgtacgaaaactaaacttccctatctaaccgaaccaaaccctaaatcgacgcgacgcgacctaactacgatacctatatccacccgactcgaaaactaacctacccgctcaaccaatcacgcgcctccgcgaaatcctcaactaccctccccgacttccccacctcaaaaccaacaaaattcgaaataaacgctctcgttaccaaaactaatacacacctactcgaccgcgtcctctcttccaatccctatccgaccacaactaaacctaaccgacgacgctttcctactacgatcgtaactacgcaaacgcactccacgaataccgctcaaaattacgaaaatcgcgattctaacccaacttcgcctaactctacttctaaaacctcgaatctaaattcgaccgacaccgccccgccgcctaactacgctacgatta

SEQ ID NO: 34239 - DNA, 559 bp, Artificial Sequence
  chemically treated genomic DNA (Homo sapiens) CpG-island No: 34239
ttgtagttagtttttagggttttaggcgtggtagggtcggggatatgacgtttgcgttatatattggttgtagcggttagaggatgtttgcggtgacgttagtaggagtatcgttgtttggcgtgcggggattgagtttttttgtttggtcgggttaggttttgagtcggcgcggcgcggtttggttgcggtatttgtgtttattcggttcggaggttggtttgttcgtttaattagttacgcgttttcgcggggtttttaattgtttttttcggtttttttattttaaggttagtagagttcggggtagacgttttcgttgttagggttggtgtatatttattcgatcgcgtttttttttttagtttttgttcggttatagttgggtttggtcggcggcgtttttttgttgcggtcgtagttgcgtaggcgtattttacggatgtcgtttaaggttgcggaggtcgcggttttggtttagtttcgtttgattttgtttttaaaatttcgggtttgggttcggtcggtatcgtttcgtcgtttggttgcgttgcgattg

SEQ ID NO: 34240 - DNA, 559 bp, Artificial Sequence
  chemically treated genomic DNA (Homo sapiens) CpG-island No: 34240
caatcgcaacgcaaccaaacgacgaaacgataccgaccgaacccaaacccgaaattttaaaaacaaaatcaaacgaaactaaaccaaaaccgcgacctccgcaaccttaaacgacatccgtaaaatacgcctacgcaactacgaccgcaacaaaaaaacgccgccgaccaaacccaactataaccgaacaaaaactaaaaaaaaaaacgcgatcgaataaatatacaccaaccctaacaacgaaaacgtctaccccgaactctactaaccttaaaataaaaaaaccgaaaaaaacaattaaaaaccccgcgaaaacgcgtaactaattaaacgaacaaaccaacctccgaaccgaataaacacaaataccgcaaccaaaccgcgccgcgccgactcaaaacctaacccgaccaaacaaaaaaactcaatccccgcacgccaaacaacgatactcctactaacgtcaccgcaaacatcctctaaccgctacaaccaatatataacgcaaacgtcatatccccgaccctaccacgcctaaaaccctaaaaactaactacaa

SEQ ID NO: 34241 - DNA, 732 bp, Artificial Sequence
  chemically treated genomic DNA (Homo sapiens) CpG-island No: 34241
tttcgtttttgtaaaagtggtagaaaaatcggtgggcggttatagcggcgttcgagttcgtttcggtcgtcgaagttttcgttatttttgtttttcgtcgcggtcgttcgagagggtagtcggttcgtttttcgttaggtcgttatttttcgagttgtagtcgtcgtcgtcgtcgtcgtttcggtgcggtttatcgttttagagttcgcgtcggttacgtgagttggttaggtttagaaacgcggcggcgttaatagttattttgcggttcgttttttagtattaaagaggcgtaggaaggagagataaacggttcgttcgtcggttttataaatagtttttcgttggttttttagttttttagcgagaagaaagaaagagcgttttcggaagtcgtcgaaattttggggtagagtggtacgcgttttttgttttttcgcgtttttttcggtggcgattcgcgttttagaaagggcggtgggttttatttcggtttagaaggttagcgggagtcgtaggaagtcgtcgcgggaagtttagtcgaattggagttggagttttcggattgcgttgattttgaggttagtggaaaatgttgtttgaacgtggcggtattgattggattaagagattacgttcgaaacgggaatttgtgtaaaggaagtgtagagttaggagttaagcgttttggaagtttttttcgaggatggtaaaggatttgggaatgttttt

SEQ ID NO: 34242 - DNA, 732 bp, Artificial Sequence
  chemically treated genomic DNA (Homo sapiens) CpG-island No: 34242
aaaaacattcccaaatcctttaccatcctcgaaaaaaacttccaaaacgcttaactcctaactctacacttcctttacacaaattcccgtttcgaacgtaatctcttaatccaatcaataccgccacgttcaaacaacattttccactaacctcaaaatcaacgcaatccgaaaactccaactccaattcgactaaacttcccgcgacgacttcctacgactcccgctaaccttctaaaccgaaataaaacccaccgccctttctaaaacgcgaatcgccaccgaaaaaaacgcgaaaaaacaaaaaacgcgtaccactctaccccaaaatttcgacgacttccgaaaacgctctttctttcttctcgctaaaaaactaaaaaaccaacgaaaaactatttataaaaccgacgaacgaaccgtttatctctccttcctacgcctctttaatactaaaaaacgaaccgcaaaataactattaacgccgccgcgtttctaaacctaaccaactcacgtaaccgacgcgaactctaaaacgataaaccgcaccgaaacgacgacgacgacgacgactacaactcgaaaaataacgacctaacgaaaaacgaaccgactaccctctcgaacgaccgcgacgaaaaacaaaaataacgaaaacttcgacgaccgaaacgaactcgaacgccgctataaccgcccaccgatttttctaccacttttacaaaaacgaaa

SEQ ID NO: 34243 - DNA, 732 bp, Artificial Sequence
  chemically treated genomic DNA (Homo sapiens) CpG-island No: 34243
agaagtatttttagattttttgttattttcggaaagggtttttaaggcgtttggtttttagttttatattttttttatataggttttcgtttcggacgtggttttttggtttagttagtgtcgttacgtttagatagtattttttattaattttagggttagcgtaattcgggggttttaattttaattcggttgagtttttcgcgacggttttttacggttttcgttggttttttaggtcgaggtggagtttatcgttttttttaggacgcggatcgttatcgaagaagacgcggaaaagtaaaaagcgcgtgttattttattttagagtttcggcggttttcggggacgtttttttttttttttcgttggaagattggaggattagcgaggggttgtttgtggagtcggcgggcgggtcgtttgttttttttttttgcgtttttttggtgttgggaggcgggtcgtagggtagttgttggcgtcgtcgcgtttttgggtttggttaatttacgtgatcgacgcgggttttgaagcggtgggtcgtatcgaggcggcggcggcggcgacgattgtagttcgggaggtagcggtttggcgagggacgggtcggttgttttttcggacggtcgcggcggagggtaaaaatggcggaggtttcggcggtcggggcggattcgggcgtcgttgtagtcgtttatcggtttttttgttatttttgtaagggcgagg

SEQ ID NO: 34244 - DNA, 732 bp, Artificial Sequence
  chemically treated genomic DNA (Homo sapiens) CpG-island No: 34244
cctcgcccttacaaaaataacaaaaaaaccgataaacgactacaacgacgcccgaatccgccccgaccgccgaaacctccgccatttttaccctccgccgcgaccgtccgaaaaaacaaccgacccgtccctcgccaaaccgctacctcccgaactacaatcgtcgccgccgccgccgcctcgatacgacccaccgcttcaaaacccgcgtcgatcacgtaaattaaccaaacccaaaaacgcgacgacgccaacaactaccctacgacccgcctcccaacaccaaaaaaacgcaaaaaaaaaaaacaaacgacccgcccgccgactccacaaacaacccctcgctaatcctccaatcttccaacgaaaaaaaaaaaaaaacgtccccgaaaaccgccgaaactctaaaataaaataacacgcgctttttacttttccgcgtcttcttcgataacgatccgcgtcctaaaaaaaacgataaactccacctcgacctaaaaaaccaacgaaaaccgtaaaaaaccgtcgcgaaaaactcaaccgaattaaaattaaaacccccgaattacgctaaccctaaaattaataaaaaatactatctaaacgtaacgacactaactaaaccaaaaaaccacgtccgaaacgaaaacctatataaaaaaaatataaaactaaaaaccaaacgccttaaaaaccctttccgaaaataacaaaaaatctaaaaatacttct

SEQ ID NO: 34245 - DNA, 806 bp, Artificial Sequence
  chemically treated genomic DNA (Homo sapiens) CpG-island No: 34245
tcgtgtttacgtttttttcgcgttttttttaggataggggtcgttttaattcgggtacgttgagttcggtcgcgtttttagttttttttttttcggttttttcgtttcgaagggaagtataggttcgagtagtattcggggtttatttattagtcgcggaggtaaagggggaggagagaggaggcgggaggcgggaggcgggaggaggagtttttgggcggtcgagagttttcggtggggtcggcggaggagcgttttttttttcgcgcgttgattgttgtggcgttttgttcgttttcgttcgcgtgtgtgcgagggagggcgagtgcgtcgggtcggtttgatgggggtaatcgagggtttcggggacgtcgagcggtatttttttttttttagcgagtgaaggagggtagtcggcggttttcgcgtttcggttattttttttgcgcgattttcggagttttttgtaggaggtgagagtttttagcgggttcggatggcgtagttttgtcgcggcgtagtagttgtcggagttcgtcgtcgtcgagcgttgggcggggaaatttgtcgtcgtttttttttaatttgttgcgggtggattttcgttggatatatcgttttcgaggtacgtgtcggtttagtttcgcggcgttgtagttcgttcgggttgtgggttttgtaggttgcgcgggtgttcgtcggcgcggcgcgggttgttagtgtttatttatcggttagggtcgttttagtcgttaggattttcggttttgggagggaggcgttggtggggcggtgtttatttttcg

SEQ ID NO: 34246 - DNA, 806 bp, Artificial Sequence
  chemically treated genomic DNA (Homo sapiens) CpG-island No: 34246
cgaaaaataaacaccgccccaccaacgcctccctcccaaaaccgaaaatcctaacgactaaaacgaccctaaccgataaataaacactaacaacccgcgccgcgccgacgaacacccgcgcaacctacaaaacccacaacccgaacgaactacaacgccgcgaaactaaaccgacacgtacctcgaaaacgatatatccaacgaaaatccacccgcaacaaattaaaaaaaaacgacgacaaatttccccgcccaacgctcgacgacgacgaactccgacaactactacgccgcgacaaaactacgccatccgaacccgctaaaaactctcacctcctacaaaaaactccgaaaatcgcgcaaaaaaaataaccgaaacgcgaaaaccgccgactaccctccttcactcgctaaaaaaaaaaaaataccgctcgacgtccccgaaaccctcgattacccccatcaaaccgacccgacgcactcgccctccctcgcacacacgcgaacgaaaacgaacaaaacgccacaacaatcaacgcgcgaaaaaaaaaacgctcctccgccgaccccaccgaaaactctcgaccgcccaaaaactcctcctcccgcctcccgcctcccgcctcctctctcctccccctttacctccgcgactaataaataaaccccgaatactactcgaacctatacttcccttcgaaacgaaaaaaccgaaaaaaaaaaaactaaaaacgcgaccgaactcaacgtacccgaattaaaacgacccctatcctaaaaaaaacgcgaaaaaaacgtaaacacga

SEQ ID NO: 34247 - DNA, 806 bp, Artificial Sequence
  chemically treated genomic DNA (Homo sapiens) CpG-island No: 34247
cggagggtaaatatcgttttattagcgttttttttttaaggtcggaggttttggcggttggagcgattttggtcggtaagtaggtattggtagttcgcgtcgcgtcgacgggtattcgcgtagtttgtagagtttatagttcgggcgggttgtagcgtcgcggggttgggtcggtacgtatttcggaggcggtgtgtttagcggagatttattcgtagtaagttggaggaaagcggcggtaagttttttcgtttagcgttcggcggcggcgagtttcggtagttgttgcgtcgcggtaaaattacgttattcggattcgttggggatttttattttttgtagggagtttcgggaatcgcgtagggaaagtggtcggggcgcgagagtcgtcgattgtttttttttattcgttgggaagaggaaagtgtcgttcggcgttttcgaaattttcgattatttttattaggtcgattcggcgtattcgttttttttcgtatatacgcgggcggggacgggtaggacgttatagtaattagcgcgcggggggaagggcgttttttcgtcggttttatcgggggttttcggtcgtttagaaattttttttttcgtttttcgtttttcgtttttttttttttttttttttgttttcgcggttgatggatgagtttcgaatgttgttcgagtttgtgttttttttcgggacgaggaggtcgagagagaaggggttaggggcgcggtcgggtttagcgtgttcgggttggggcggtttttgttttgggggaagcgcgagggagacgtgggtacga

SEQ ID NO: 34248 - DNA, 806 bp, Artificial Sequence
  chemically treated genomic DNA (Homo sapiens) CpG-island No: 34248
tcgtacccacgtctccctcgcgcttcccccaaaacaaaaaccgccccaacccgaacacgctaaacccgaccgcgcccctaaccccttctctctcgacctcctcgtcccgaaaaaaaacacaaactcgaacaacattcgaaactcatccatcaaccgcgaaaacaaaaaaaaaaaaaaaaaaaaacgaaaaacgaaaaacgaaaaaaaaaatttctaaacgaccgaaaacccccgataaaaccgacgaaaaaacgcccttccccccgcgcgctaattactataacgtcctacccgtccccgcccgcgtatatacgaaaaaaaacgaatacgccgaatcgacctaataaaaataatcgaaaatttcgaaaacgccgaacgacactttcctcttcccaacgaataaaaaaaaacaatcgacgactctcgcgccccgaccactttccctacgcgattcccgaaactccctacaaaaaataaaaatccccaacgaatccgaataacgtaattttaccgcgacgcaacaactaccgaaactcgccgccgccgaacgctaaacgaaaaaacttaccgccgctttcctccaacttactacgaataaatctccgctaaacacaccgcctccgaaatacgtaccgacccaaccccgcgacgctacaacccgcccgaactataaactctacaaactacgcgaatacccgtcgacgcgacgcgaactaccaatacctacttaccgaccaaaatcgctccaaccgccaaaacctccgaccttaaaaaaaaaacgctaataaaacgatatttaccctccg

SEQ ID NO: 34249 - DNA, 607 bp, Artificial Sequence
  chemically treated genomic DNA (Homo sapiens) CpG-island No: 34249
gttttagcgtcgtttcggtcgtgggagtcggcgggcgtagtttatagttttattaagatatagttgtcggggtttcgggtgcgtttcgttcgcggtttcggtgtttcgtttttcgtttttagtttttattcgacggtttttagggtttttcgggtacgttacgcggattcgtagcgattttatagggattgcgttttcgtgtttttagcgttttcgcgttgttgttttagtcgttcggtagttttgaggatggagaggagggcgcggagtttttttagggagtttcgcgggcgaggcggtaggatttcgtataaggagaataagagggtaaaggtcgagaggagcggcggaggtcgcgggcgttaggaggttgggttcgagtcgtcgggtttcggacgggcggggatttcgggggagtttcgagcgttcgtcgttacggtggtggacgtggatgaggttcgaggtttcggcgaggagggtatcgaggtggtggcgttgttggagagcgagcggttcgaggaaggtacggatttagtattattatttgttatttttttaggtggtaattaaggggcgttagataaggtggaaagggttatttttacga

SEQ ID NO: 34250 - DNA, 607 bp, Artificial Sequence
  chemically treated genomic DNA (Homo sapiens) CpG-island No: 34250
tcgtaaaaataaccctttccaccttatctaacgccccttaattaccacctaaaaaaataacaaataataatactaaatccgtaccttcctcgaaccgctcgctctccaacaacgccaccacctcgataccctcctcgccgaaacctcgaacctcatccacgtccaccaccgtaacgacgaacgctcgaaactcccccgaaatccccgcccgtccgaaacccgacgactcgaacccaacctcctaacgcccgcgacctccgccgctcctctcgacctttaccctcttattctccttatacgaaatcctaccgcctcgcccgcgaaactccctaaaaaaactccgcgccctcctctccatcctcaaaactaccgaacgactaaaacaacaacgcgaaaacgctaaaaacacgaaaacgcaatccctataaaatcgctacgaatccgcgtaacgtacccgaaaaaccctaaaaaccgtcgaataaaaactaaaaacgaaaaacgaaacaccgaaaccgcgaacgaaacgcacccgaaaccccgacaactatatcttaataaaactataaactacgcccgccgactcccacgaccgaaacgacgctaaaac

SEQ ID NO: 34251 - DNA, 607 bp, Artificial Sequence
  chemically treated genomic DNA (Homo sapiens) CpG-island No: 34251
tcgtggggatgattttttttattttatttgacgttttttagttattatttggaaaagtagtagatagtggtgttgaattcgtatttttttcgggtcgttcgttttttaatagcgttattatttcggtgtttttttcgtcggagtttcggattttatttacgtttattatcgtggcggcgggcgttcggggttttttcggggttttcgttcgttcggagttcgacggttcgggtttagttttttggcgttcgcggttttcgtcgtttttttcggtttttgtttttttgttttttttgtgcggagttttgtcgtttcgttcgcgggattttttggaggagtttcgcgtttttttttttatttttagagttgtcgggcggttggagtagtagcgcgggagcgttaggggtacgggagcgtagtttttgtggagtcgttgcgggttcgcgtggcgtgttcgggggattttaaagatcgtcgggtgggggttgagggcgaggggcgggatatcggggtcgcgggcggggcgtattcggaatttcgatagttgtgttttggtggagttgtggattgcgttcgtcgatttttacggtcggggcggcgttgaagt

SEQ ID NO: 34252 - DNA, 607 bp, Artificial Sequence
  chemically treated genomic DNA (Homo sapiens) CpG-island No: 34252
acttcaacgccgccccgaccgtaaaaatcgacgaacgcaatccacaactccaccaaaacacaactatcgaaattccgaatacgccccgcccgcgaccccgatatcccgcccctcgccctcaacccccacccgacgatctttaaaatcccccgaacacgccacgcgaacccgcaacgactccacaaaaactacgctcccgtacccctaacgctcccgcgctactactccaaccgcccgacaactctaaaaataaaaaaaaaaacgcgaaactcctccaaaaaatcccgcgaacgaaacgacaaaactccgcacaaaaaaaacaaaaaaacaaaaaccgaaaaaaacgacgaaaaccgcgaacgccaaaaaactaaacccgaaccgtcgaactccgaacgaacgaaaaccccgaaaaaaccccgaacgcccgccgccacgataataaacgtaaataaaatccgaaactccgacgaaaaaaacaccgaaataataacgctattaaaaaacgaacgacccgaaaaaaatacgaattcaacaccactatctactacttttccaaataataactaaaaaacgtcaaataaaataaaaaaaatcatccccacga

SEQ ID NO: 34253 - DNA, 601 bp, Artificial Sequence
  chemically treated genomic DNA (Homo sapiens) CpG-island No: 34253
gtagtagtaggttggcgagtagggcgagtagtgcgtttttcggtcgtattttgagttataggcgtcgtcgttatcgttgttgtcggggcgaagtatagttcgggcggtttcgattcgcggttttcgtcgtcgtcgttatcgtcgtcgtggtcgtagtttcgcgtatttatagcgtttataggcggtagcgaggggcgttcgtagtttattcggtagagttttcgcggcgggcggagaagaagtcgcgttcgggttcgtttcgggttttcggtttcggttcgcggagcgtcgcgatcggttggtagatgacgattcgtcgagttcgtcgtttgttttttcggaggcgttcggagttgttgcgggtttcggtcgtcgttgttattgttgttgtcgtcgtcgtcgcgcggggttatttgaaggttggggcgcggaagtttaatttcgtgttgattgggttttaagttttttgcgttttcgtttcgtttcgagtgttcgcgaatttttcggacgtttacgtagattatttagttatattataattttgtttgcggagagaggagaggagaaaaaggggtcgttttaaaaatttttaaaattgtgt

SEQ ID NO: 34254 - DNA, 601 bp, Artificial Sequence
  chemically treated genomic DNA (Homo sapiens) CpG-island No: 34254
acacaattttaaaaatttttaaaacgacccctttttctcctctcctctctccgcaaacaaaattataatataactaaataatctacgtaaacgtccgaaaaattcgcgaacactcgaaacgaaacgaaaacgcaaaaaacttaaaacccaatcaacacgaaattaaacttccgcgccccaaccttcaaataaccccgcgcgacgacgacgacaacaacaataacaacgacgaccgaaacccgcaacaactccgaacgcctccgaaaaaacaaacgacgaactcgacgaatcgtcatctaccaaccgatcgcgacgctccgcgaaccgaaaccgaaaacccgaaacgaacccgaacgcgacttcttctccgcccgccgcgaaaactctaccgaataaactacgaacgcccctcgctaccgcctataaacgctataaatacgcgaaactacgaccacgacgacgataacgacgacgacgaaaaccgcgaatcgaaaccgcccgaactatacttcgccccgacaacaacgataacgacgacgcctataactcaaaatacgaccgaaaaacgcactactcgccctactcgccaacctactactac

SEQ ID NO: 34255 - DNA, 601 bp, Artificial Sequence
  chemically treated genomic DNA (Homo sapiens) CpG-island No: 34255
gtatagttttgaaagtttttgaagcggttttttttttttttttttttttttcgtaggtagagttgtggtgtggttgggtggtttgcgtgggcgttcgggggattcgcgggtattcgggacgaggcgagggcgtagaaaatttggagtttaattagtacggagttgagttttcgcgttttaatttttaggtgatttcgcgcggcggcggcggtagtagtagtggtagcggcgatcggagttcgtagtagtttcgagcgttttcgggaggataggcggcgagttcggcgaatcgttatttgttagtcgatcgcggcgtttcgcgggtcggggtcgggagttcggggcgagttcgaacgcggtttttttttcgttcgtcgcggagattttgtcgggtgggttgcgggcgtttttcgttgtcgtttgtgaacgttgtgggtgcgcggggttgcggttacggcggcggtggcggcggcggcgggagtcgcgagtcggggtcgttcgggttgtgtttcgtttcggtagtagcggtggcggcggcgtttgtggtttaggatgcggtcggggggcgtattgttcgttttgttcgttagtttgttgttgt

SEQ ID NO: 34256 - DNA, 601 bp, Artificial Sequence
  chemically treated genomic DNA (Homo sapiens) CpG-island No: 34256
acaacaacaaactaacgaacaaaacgaacaatacgccccccgaccgcatcctaaaccacaaacgccgccgccaccgctactaccgaaacgaaacacaacccgaacgaccccgactcgcgactcccgccgccgccgccaccgccgccgtaaccgcaaccccgcgcacccacaacgttcacaaacgacaacgaaaaacgcccgcaacccacccgacaaaatctccgcgacgaacgaaaaaaaaaccgcgttcgaactcgccccgaactcccgaccccgacccgcgaaacgccgcgatcgactaacaaataacgattcgccgaactcgccgcctatcctcccgaaaacgctcgaaactactacgaactccgatcgccgctaccactactactaccgccgccgccgcgcgaaatcacctaaaaattaaaacgcgaaaactcaactccgtactaattaaactccaaattttctacgccctcgcctcgtcccgaatacccgcgaatcccccgaacgcccacgcaaaccacccaaccacaccacaactctacctacgaaaaaaaaaaaaaaaaaaaaaaaaccgcttcaaaaactttcaaaactatac

SEQ ID NO: 34257 - DNA, 618 bp, Artificial Sequence
  chemically treated genomic DNA (Homo sapiens) CpG-island No: 34257
tttattcgtttcggtaggtcgggtttttatcgtttaggcgttcggtttttcgggttttttcgttaggtttcggcgttttttattgtttttattgcgttcgtcgtttttcgttcgtttttttttttttttcggttttagtcgtcgtcgtcgtatacgttcgaatttatcgggggtttagttagcggtaacgtagtagtagtcggggtaggtgggtcgtcgttaggatgaggtggcgtttaagacgcggttgagttcggttagggtgggtagtagtagttggcggaagttgtcgttgtttttcgtttttatatacgtatattatattatatatattagcgtttttggcggcggcggcgggggcggcggggttggggtagttatttggcgtgtattatcgaggttttcggtcgttaataaagtggtttacgatgattttaagagcgaggaggaggagtacggcgacgttgaggagatttaggagtttgaggataattaggaggatgagatggaggaggacgacgatgatttcgattatttttattcggaggagttggaagacgacgaggaggattttagttattgtagggaaagtaattttaggagttatagtatttatag

SEQ ID NO: 34258 - DNA, 618 bp, Artificial Sequence
  chemically treated genomic DNA (Homo sapiens) CpG-island No: 34258
ctataaatactataactcctaaaattactttccctacaataactaaaatcctcctcgtcgtcttccaactcctccgaataaaaataatcgaaatcatcgtcgtcctcctccatctcatcctcctaattatcctcaaactcctaaatctcctcaacgtcgccgtactcctcctcctcgctcttaaaatcatcgtaaaccactttattaacgaccgaaaacctcgataatacacgccaaataactaccccaaccccgccgcccccgccgccgccgccaaaaacgctaatatatataatataatatacgtatataaaaacgaaaaacaacgacaacttccgccaactactactacccaccctaaccgaactcaaccgcgtcttaaacgccacctcatcctaacgacgacccacctaccccgactactactacgttaccgctaactaaacccccgataaattcgaacgtatacgacgacgacgactaaaaccgaaaaaaaaaaaaaaacgaacgaaaaacgacgaacgcaataaaaacaataaaaaacgccgaaacctaacgaaaaaacccgaaaaaccgaacgcctaaacgataaaaacccgacctaccgaaacgaataaa

SEQ ID NO: 34259 - DNA, 618 bp, Artificial Sequence
  chemically treated genomic DNA (Homo sapiens) CpG-island No: 34259
ttgtaggtattatggtttttgaagttgttttttttgtagtaattggagtttttttcgtcgttttttagttttttcgggtaagggtaatcgaagttatcgtcgtttttttttattttatttttttagttgtttttagatttttgggtttttttagcgtcgtcgtatttttttttttcgtttttgaggttatcgtaaattattttgttaacggtcgagggtttcggtggtgtacgttaggtggttgttttagtttcgtcgttttcgtcgtcgtcgttaggggcgttggtgtgtgtggtgtggtgtgcgtgtgtgggggcggaaggtagcggtagttttcgttaattattgttgtttattttggtcgagtttagtcgcgttttgggcgttattttattttggcggcggtttatttgtttcggttgttattgcgttgtcgttagttgagttttcgatgggttcggacgtgtgcggcggcggcggttgagatcgggggagaagggaaagcggacgaggagcggcgggcgtagtggaggtagtggggagcgtcggggtttgacgaggaggttcgaggggtcgggcgtttgggcggtagagattcggtttgtcgaagcgggtgga

SEQ ID NO: 34260 - DNA, 618 bp, Artificial Sequence
  chemically treated genomic DNA (Homo sapiens) CpG-island No: 34260
tccacccgcttcgacaaaccgaatctctaccgcccaaacgcccgacccctcgaacctcctcgtcaaaccccgacgctccccactacctccactacgcccgccgctcctcgtccgctttcccttctcccccgatctcaaccgccgccgccgcacacgtccgaacccatcgaaaactcaactaacgacaacgcaataacaaccgaaacaaataaaccgccgccaaaataaaataacgcccaaaacgcgactaaactcgaccaaaataaacaacaataattaacgaaaactaccgctaccttccgcccccacacacgcacaccacaccacacacaccaacgcccctaacgacgacgacgaaaacgacgaaactaaaacaaccacctaacgtacaccaccgaaaccctcgaccgttaacaaaataatttacgataacctcaaaaacgaaaaaaaaaaatacgacgacgctaaaaaaacccaaaaatctaaaaacaactaaaaaaataaaataaaaaaaaacgacgataacttcgattacccttacccgaaaaaactaaaaaacgacgaaaaaaactccaattactacaaaaaaaacaacttcaaaaaccataatacctacaa

SEQ ID NO: 34261 - DNA, 624 bp, Artificial Sequence
  chemically treated genomic DNA (Homo sapiens) CpG-island No: 34261
gaagggcgggggcgacggggcgcgtacgcggaggaggaggaggaggagggagacgggagggcgtgtgagcgagtgagataagaaaagggagcgcgttcgtcgtcgtcgtcgtcgtcgtttttttttggagagagaggttggagtgaggttgtgcgaagcgtcgtattttaatgaggacgggtcgaggtatatttttgtattagtggtcgtaatcgaggcgtcgcgttttagtagttgttgtcgtttagttcggtttcgtcgtcgttttttagttttgtagtttcgtagtttcggtcgcgtttagttcggcgaggatagtattaggaggcggtttttagcgcggttataaagattttcggcggcgttttttcgcggatcggtgcgtggtttgttttttttggggacgggagttgcggggagggcggtcgggggatttcgtagagttcgtttcgttcgtagtcgcggggcgtcgagggtagggcgggcgtttagtttggtttcgtcgtttcgttcgtagtttttcgaaaggcggtcgttttgttttggttagtttggttcgattcgggggcgttgcgtgcgggcggtttcggggttgttggtatttgttttttttgtttggtgtta

SEQ ID NO: 34262 - DNA, 624 bp, Artificial Sequence
  chemically treated genomic DNA (Homo sapiens) CpG-island No: 34262
taacaccaaacaaaaaaaacaaataccaacaaccccgaaaccgcccgcacgcaacgcccccgaatcgaaccaaactaaccaaaacaaaacgaccgcctttcgaaaaactacgaacgaaacgacgaaaccaaactaaacgcccgccctaccctcgacgccccgcgactacgaacgaaacgaactctacgaaatcccccgaccgccctccccgcaactcccgtccccaaaaaaaacaaaccacgcaccgatccgcgaaaaaacgccgccgaaaatctttataaccgcgctaaaaaccgcctcctaatactatcctcgccgaactaaacgcgaccgaaactacgaaactacaaaactaaaaaacgacgacgaaaccgaactaaacgacaacaactactaaaacgcgacgcctcgattacgaccactaatacaaaaatatacctcgacccgtcctcattaaaatacgacgcttcgcacaacctcactccaacctctctctccaaaaaaaaacgacgacgacgacgacgacgaacgcgctcccttttcttatctcactcgctcacacgccctcccgtctccctcctcctcctcctcctccgcgtacgcgccccgtcgcccccgcccttc

SEQ ID NO: 34263 - DNA, 624 bp, Artificial Sequence
  chemically treated genomic DNA (Homo sapiens) CpG-island No: 34263
tggtattaaataaaagaggtaggtgttagtagtttcggggtcgttcgtacgtaacgttttcgggtcgggttaggttggttagggtagggcggtcgtttttcgaggaattgcgggcggggcggcggggttaagttgagcgttcgttttgttttcggcgtttcgcggttgcgggcggagcgggttttgcggagtttttcggtcgtttttttcgtagttttcgtttttagggaaggtaaattacgtatcggttcgcggagagacgtcgtcgggggtttttgtggtcgcgttgggggtcgttttttggtgttgttttcgtcgggttgggcgcggtcggggttgcggggttgtagggttggggggcggcggcggggtcgggttgggcggtagtagttgttggagcgcggcgtttcggttgcggttattagtgtagggatgtgtttcggttcgtttttattgaaatgcggcgtttcgtatagttttattttagtttttttttttagaggagggcggcggcggcggcggcggcgggcgcgttttttttttttgttttattcgtttatacgttttttcgtttttttttttttttttttttttcgcgtgcgcgtttcgtcgttttcgtttttt

SEQ ID NO: 34264 - DNA, 624 bp, Artificial Sequence
  chemically treated genomic DNA (Homo sapiens) CpG-island No: 34264
aaaaaacgaaaacgacgaaacgcgcacgcgaaaaaaaaaaaaaaaaaaaaaaacgaaaaaacgtataaacgaataaaacaaaaaaaaaaaacgcgcccgccgccgccgccgccgccgccctcctctaaaaaaaaaaactaaaataaaactatacgaaacgccgcatttcaataaaaacgaaccgaaacacatccctacactaataaccgcaaccgaaacgccgcgctccaacaactactaccgcccaacccgaccccgccgccgccccccaaccctacaaccccgcaaccccgaccgcgcccaacccgacgaaaacaacaccaaaaaacgacccccaacgcgaccacaaaaacccccgacgacgtctctccgcgaaccgatacgtaatttaccttccctaaaaacgaaaactacgaaaaaaacgaccgaaaaactccgcaaaacccgctccgcccgcaaccgcgaaacgccgaaaacaaaacgaacgctcaacttaaccccgccgccccgcccgcaattcctcgaaaaacgaccgccctaccctaaccaacctaacccgacccgaaaacgttacgtacgaacgaccccgaaactactaacacctacctcttttatttaatacca

SEQ ID NO: 34265 - DNA, 1490 bp, Artificial Sequence
  chemically treated genomic DNA (Homo sapiens) CpG-island No: 34265
tttacgttgtttcgttttatatcggcgagtgcgttattacgttttagcggggatcgaatatatagggatttattgttacgttttagtagggatcgtacgcgaggggacgttttgttacgttttagcggggatcgtaagtacggggatacgtcgttatttttaagcggggatcgaatatatagggatttattgttattttttagcggggatcgtaagtatagggacgcgtcgttacgttttagcggggatcgtaagtacggggacgcgtcgttacgttttagcggggatcgtaagtacggggacgcgtcgttacgttttagcggggatcgtaagtacggggacgcgtcgttacgttttagcggggatcgtaagtacggggacgcgtcgttattttttagcggggatcgtacgtacggggacgcgtcgttacgttttagcggggatcgtacgtacggggacgcgtcgttattttttagcggggatcgtacgtacggggacgcgtcgttattttttagcggggatcgtacgtacggggacgcgtcgttacgttttagcggggatcgtaagtacggggacgcgtcgttacgtttcggcggggatcgtacgtacggggacgcgtcgttacgttttagcggggatcgtaagtacggggacgcgtcgttacgtttcggcggggatcgtatatacggggacgcgtcgttacgttttagtggggatcgtatttacggggacgcgtcgttacgtttcggcggggatcgtatttacggggaagcgtcgttacgttttagtggggatcgtatttacggggacgcgtcgttacgtttcggcggggatcgtatatacggggacgcgtcgttacgtttcggcggggatcgtatatacggggacgcgtcgttacgttttagtggggatcgtatttacggggacgcgtcgttacgttttagcggggatagtatatacggggacgcgtcgttacgttttagcggggatcgtatttacggggacgcgtcgttatttttcggcggggatcgtatatacggggacgcgttgttacgttttagtggggatcgtatttacggggacgcgttattatattttagcggggatcgtatatacggggacgcgtcgttatttttcggtggggatcgtatatacggggacgcgtcgttattttttagcggggatcgtatatacggggacgcgttgttacgttttagcggggatcgtatatacggggatttattgttacgttttagtagggatcgtaagtacggggacgcgtcgttattttttagcggggattgtatatacggggacgcgtcgttattttttagcggggatcgtacgtacggggatttattgttacgttttagcggggatcgtaaatacggggacgcgtcgttattttttagcggggattattagttgttttgtttatggattggaacgtattgggtggagtaagtgagagtaatattgaggcgaggtat

SEQ ID NO: 34266 - DNA, 1490 bp, Artificial Sequence
  chemically treated genomic DNA (Homo sapiens) CpG-island No: 34266
atacctcgcctcaatattactctcacttactccacccaatacgttccaatccataaacaaaacaactaataatccccgctaaaaaataacgacgcgtccccgtatttacgatccccgctaaaacgtaacaataaatccccgtacgtacgatccccgctaaaaaataacgacgcgtccccgtatatacaatccccgctaaaaaataacgacgcgtccccgtacttacgatccctactaaaacgtaacaataaatccccgtatatacgatccccgctaaaacgtaacaacgcgtccccgtatatacgatccccgctaaaaaataacgacgcgtccccgtatatacgatccccaccgaaaaataacgacgcgtccccgtatatacgatccccgctaaaatataataacgcgtccccgtaaatacgatccccactaaaacgtaacaacgcgtccccgtatatacgatccccgccgaaaaataacgacgcgtccccgtaaatacgatccccgctaaaacgtaacgacgcgtccccgtatatactatccccgctaaaacgtaacgacgcgtccccgtaaatacgatccccactaaaacgtaacgacgcgtccccgtatatacgatccccgccgaaacgtaacgacgcgtccccgtatatacgatccccgccgaaacgtaacgacgcgtccccgtaaatacgatccccactaaaacgtaacgacgcttccccgtaaatacgatccccgccgaaacgtaacgacgcgtccccgtaaatacgatccccactaaaacgtaacgacgcgtccccgtatatacgatccccgccgaaacgtaacgacgcgtccccgtacttacgatccccgctaaaacgtaacgacgcgtccccgtacgtacgatccccgccgaaacgtaacgacgcgtccccgtacttacgatccccgctaaaacgtaacgacgcgtccccgtacgtacgatccccgctaaaaaataacgacgcgtccccgtacgtacgatccccgctaaaaaataacgacgcgtccccgtacgtacgatccccgctaaaacgtaacgacgcgtccccgtacgtacgatccccgctaaaaaataacgacgcgtccccgtacttacgatccccgctaaaacgtaacgacgcgtccccgtacttacgatccccgctaaaacgtaacgacgcgtccccgtacttacgatccccgctaaaacgtaacgacgcgtccccgtacttacgatccccgctaaaacgtaacgacgcgtccctatacttacgatccccgctaaaaaataacaataaatccctatatattcgatccccgcttaaaaataacgacgtatccccgtacttacgatccccgctaaaacgtaacaaaacgtcccctcgcgtacgatccctactaaaacgtaacaataaatccctatatattcgatccccgctaaaacgtaataacgcactcgccgatataaaacgaaacaacgtaaa

SEQ ID NO: 34267 - DNA, 1490 bp, Artificial Sequence
  chemically treated genomic DNA (Homo sapiens) CpG-island No: 34267
gtgtttcgttttagtgttatttttatttattttatttaatgcgttttaatttatgggtaaagtagttggtggttttcgttgaggggtgacggcgcgttttcgtgtttacggttttcgttgaggcgtgatagtgggttttcgtgcgtacggttttcgttgaggggtgacggcgcgttttcgtgtgtatagttttcgttgaggggtgacggcgcgttttcgtgtttacggtttttgttgaggcgtgatagtgggttttcgtgtgtacggttttcgttgaggcgtgatagcgcgttttcgtgtgtacggttttcgttgaggggtgacggcgcgttttcgtgtgtacggtttttatcgaggggtgacggcgcgttttcgtgtgtacggttttcgttgaggtgtgatggcgcgttttcgtgggtacggtttttattgaggcgtgatagcgcgttttcgtgtgtacggttttcgtcgaggggtgacggcgcgttttcgtgggtacggttttcgttgaggcgtgacggcgcgttttcgtgtgtattgttttcgttgaggcgtgacggcgcgttttcgtgggtacggtttttattgaggcgtgacggcgcgttttcgtgtgtacggttttcgtcgaggcgtgacggcgcgttttcgtgtgtacggttttcgtcgaggcgtgacggcgcgttttcgtgggtacggtttttattgaggcgtgacggcgttttttcgtgggtacggttttcgtcgaggcgtgacggcgcgttttcgtgggtacggtttttattgaggcgtgacggcgcgttttcgtgtgtacggttttcgtcgaggcgtgacggcgcgttttcgtgtttacggttttcgttgaggcgtgacggcgcgttttcgtgcgtacggttttcgtcgaggcgtgacggcgcgttttcgtgtttacggttttcgttgaggcgtgacggcgcgttttcgtgcgtacggttttcgttgaggggtgacggcgcgttttcgtgcgtacggttttcgttgaggggtgacggcgcgttttcgtgcgtacggttttcgttgaggcgtgacggcgcgttttcgtgcgtacggttttcgttgaggggtgacggcgcgttttcgtgtttacggttttcgttgaggcgtgacggcgcgttttcgtgtttacggttttcgttgaggcgtgacggcgcgttttcgtgtttacggttttcgttgaggcgtgacggcgcgttttcgtgtttacggttttcgttgaggcgtgacggcgcgtttttgtgtttacggttttcgttgaggggtgatagtgggtttttgtgtgttcggttttcgtttaggggtgacggcgtgttttcgtgtttacggttttcgttgaggcgtaatagggcgttttttcgcgtacggtttttgttgaggcgtgatagtgggtttttgtgtgttcggttttcgttgaggcgtgatggcgtattcgtcgatatgagacgaggtagcgtaaa

SEQ ID NO: 34268 - DNA, 1490 bp, Artificial Sequence
  chemically treated genomic DNA (Homo sapiens) CpG-island No: 34268
tttacgctacctcgtctcatatcgacgaatacgccatcacgcctcaacgaaaaccgaacacacaaaaacccactatcacgcctcaacaaaaaccgtacgcgaaaaaacgccctattacgcctcaacgaaaaccgtaaacacgaaaacacgccgtcacccctaaacgaaaaccgaacacacaaaaacccactatcacccctcaacgaaaaccgtaaacacaaaaacgcgccgtcacgcctcaacgaaaaccgtaaacacgaaaacgcgccgtcacgcctcaacgaaaaccgtaaacacgaaaacgcgccgtcacgcctcaacgaaaaccgtaaacacgaaaacgcgccgtcacgcctcaacgaaaaccgtaaacacgaaaacgcgccgtcacccctcaacgaaaaccgtacgcacgaaaacgcgccgtcacgcctcaacgaaaaccgtacgcacgaaaacgcgccgtcacccctcaacgaaaaccgtacgcacgaaaacgcgccgtcacccctcaacgaaaaccgtacgcacgaaaacgcgccgtcacgcctcaacgaaaaccgtaaacacgaaaacgcgccgtcacgcctcgacgaaaaccgtacgcacgaaaacgcgccgtcacgcctcaacgaaaaccgtaaacacgaaaacgcgccgtcacgcctcgacgaaaaccgtacacacgaaaacgcgccgtcacgcctcaataaaaaccgtacccacgaaaacgcgccgtcacgcctcgacgaaaaccgtacccacgaaaaaacgccgtcacgcctcaataaaaaccgtacccacgaaaacgcgccgtcacgcctcgacgaaaaccgtacacacgaaaacgcgccgtcacgcctcgacgaaaaccgtacacacgaaaacgcgccgtcacgcctcaataaaaaccgtacccacgaaaacgcgccgtcacgcctcaacgaaaacaatacacacgaaaacgcgccgtcacgcctcaacgaaaaccgtacccacgaaaacgcgccgtcacccctcgacgaaaaccgtacacacgaaaacgcgctatcacgcctcaataaaaaccgtacccacgaaaacgcgccatcacacctcaacgaaaaccgtacacacgaaaacgcgccgtcacccctcgataaaaaccgtacacacgaaaacgcgccgtcacccctcaacgaaaaccgtacacacgaaaacgcgctatcacgcctcaacgaaaaccgtacacacgaaaacccactatcacgcctcaacaaaaaccgtaaacacgaaaacgcgccgtcacccctcaacgaaaactatacacacgaaaacgcgccgtcacccctcaacgaaaaccgtacgcacgaaaacccactatcacgcctcaacgaaaaccgtaaacacgaaaacgcgccgtcacccctcaacgaaaaccaccaactactttacccataaattaaaacgcattaaataaaataaataaaaataacactaaaacgaaacac

SEQ ID NO: 34269 - DNA, 727 bp, Artificial Sequence
  chemically treated genomic DNA (Homo sapiens) CpG-island No: 34269
tttggtcggaggttataggttagacgcggcggaattttttcggagtcgcgttcgggcgcgcgcgggaagcggaggcggagtgggtacgtgcggtattttcggggcggggcgggtacgtagttttttcgaaggttcgcgcgagtcgttagttttgtttacgtatttttggtatagtcgcgttacgcgatcggcgatttgattggttcgcgcgggagggcgcgcggcgttaaatttgtttttcgttagttttcgttcgtttcgcgggagcgcgtacgttcgcgtattcggatttcggtttttgtatttagtcgttattcgggaggtcgttgcgttgtagggtttcgcggagtcgttcgcgatcgcgagtcgggtttttcgcgcggtttatcgtttattggacgtcgttcgcggtcggatcggtgaggagcgagagcgagcgggggaggggcgtggttggggtttgtattttcgagtttcgtgtcggtcgtcgatttggcggggacggtttcgggaagtcgcgggttcgagtgaagggggtttgcgttgtttcgttttttatacggttcgagggaagggttcgtttttataggtcggggcgggagtgcgtttttgtgtagggagcggggaggttcggtgttagtcgttgtcgaggttggaaatattgcgtttgaaattattgggaagttgagggcggtataagacgaaagttattttttttgttttagtt

SEQ ID NO: 34270 - DNA, 727 bp, Artificial Sequence
  chemically treated genomic DNA (Homo sapiens) CpG-island No: 34270
aactaaaacaaaaaaaataactttcgtcttataccgccctcaacttcccaataatttcaaacgcaatatttccaacctcgacaacgactaacaccgaacctccccgctccctacacaaaaacgcactcccgccccgacctataaaaacgaacccttccctcgaaccgtataaaaaacgaaacaacgcaaacccccttcactcgaacccgcgacttcccgaaaccgtccccgccaaatcgacgaccgacacgaaactcgaaaatacaaaccccaaccacgcccctcccccgctcgctctcgctcctcaccgatccgaccgcgaacgacgtccaataaacgataaaccgcgcgaaaaacccgactcgcgatcgcgaacgactccgcgaaaccctacaacgcaacgacctcccgaataacgactaaatacaaaaaccgaaatccgaatacgcgaacgtacgcgctcccgcgaaacgaacgaaaactaacgaaaaacaaatttaacgccgcgcgccctcccgcgcgaaccaatcaaatcgccgatcgcgtaacgcgactataccaaaaatacgtaaacaaaactaacgactcgcgcgaaccttcgaaaaaactacgtacccgccccgccccgaaaataccgcacgtacccactccgcctccgcttcccgcgcgcgcccgaacgcgactccgaaaaaattccgccgcgtctaacctataacctccgaccaaa

SEQ ID NO: 34271 - DNA, 727 bp, Artificial Sequence
  chemically treated genomic DNA (Homo sapiens) CpG-island No: 34271
aattaaaatagaaagaatggttttcgttttgtgtcgtttttaattttttaatggttttaaacgtaatgtttttagtttcggtagcgattgatatcgggttttttcgttttttgtataaagacgtattttcgtttcggtttgtgggggcgggtttttttttcgggtcgtgtgggaagcgaggtagcgtaggttttttttattcggattcgcggtttttcgggatcgttttcgttaggtcggcggtcgatacggggttcggggatgtaggttttaattacgtttttttttcgttcgttttcgttttttatcggttcggtcgcgggcggcgtttagtgggcgatggatcgcgcggagggttcggttcgcggtcgcgggcggtttcgcgaggttttgtagcgtagcggtttttcgaatggcgattggatgtaggagtcgggattcgggtgcgcgagcgtgcgcgttttcgcgggacgggcgggggttgacgggaagtaagtttggcgtcgcgcgttttttcgcgcgggttaattagatcgtcgatcgcgtggcgcggttgtgttaaaagtgcgtgggtaaaattagcggttcgcgcgggttttcggaagggttgcgtgttcgtttcgtttcggaagtgtcgtacgtgtttatttcgttttcgtttttcgcgcgcgttcgggcgcggtttcgggagggtttcgtcgcgtttggtttgtggttttcggttagg

SEQ ID NO: 34272 - DNA, 727 bp, Artificial Sequence
  chemically treated genomic DNA (Homo sapiens) CpG-island No: 34272
cctaaccgaaaaccacaaaccaaacgcgacgaaaccctcccgaaaccgcgcccgaacgcgcgcgaaaaacgaaaacgaaataaacacgtacgacacttccgaaacgaaacgaacacgcaacccttccgaaaacccgcgcgaaccgctaattttacccacgcacttttaacacaaccgcgccacgcgatcgacgatctaattaacccgcgcgaaaaaacgcgcgacgccaaacttacttcccgtcaacccccgcccgtcccgcgaaaacgcgcacgctcgcgcacccgaatcccgactcctacatccaatcgccattcgaaaaaccgctacgctacaaaacctcgcgaaaccgcccgcgaccgcgaaccgaaccctccgcgcgatccatcgcccactaaacgccgcccgcgaccgaaccgataaaaaacgaaaacgaacgaaaaaaaaacgtaattaaaacctacatccccgaaccccgtatcgaccgccgacctaacgaaaacgatcccgaaaaaccgcgaatccgaataaaaaaaacctacgctacctcgcttcccacacgacccgaaaaaaaaacccgcccccacaaaccgaaacgaaaatacgtctttatacaaaaaacgaaaaaacccgatatcaatcgctaccgaaactaaaaacattacgtttaaaaccattaaaaaattaaaaacgacacaaaacgaaaaccattctttctattttaatt

SEQ ID NO: 34273 - DNA, 609 bp, Artificial Sequence
  chemically treated genomic DNA (Homo sapiens) CpG-island No: 34273
ggcggttcgtttgcgggacggcgggttagttagttagtcggtcgtttttacggttatcgggaatttcgcggaggcgagtaggattttttttttttttattcgcgttttcgtttttcgttatttcgagtttaagttcgggttcggggcgcgttttacgtttaattcgtcgaagggggtggagtttgcgttgtgacgcggtcgcgttggtcgtagatttcggatttttggaatgtgtattcgttttacgaggttttagtgttagcggcgtcgaggtacgtttgcgcggagcgtgcgtattcgcggcggcggtcgtttacggtttcgcgtttacgttacgcgttcgtcgcgtatatttatataaggtagtcggggcgattggcgcggcgaggttttcgatgaatagggcgggttggacggggttaagagcggtatttggtgttcgggagaggttagttcgaatcgcgtttttttttttttagagggtttcgtggaaaacgcgcgagttagttggcggcgtgtgtacgtggtgttgggtttgggaatatttatagtttttttagttagtaaaagggataggcggggcgtatgttttttttaagataaatgtaa

SEQ ID NO: 34274 - DNA, 609 bp, Artificial Sequence
  chemically treated genomic DNA (Homo sapiens) CpG-island No: 34274
ttacatttatcttaaaaaaaacatacgccccgcctatcccttttactaactaaaaaaactataaatattcccaaacccaacaccacgtacacacgccgccaactaactcgcgcgttttccacgaaaccctctaaaaaaaaaaaaacgcgattcgaactaacctctcccgaacaccaaataccgctcttaaccccgtccaacccgccctattcatcgaaaacctcgccgcgccaatcgccccgactaccttatataaatatacgcgacgaacgcgtaacgtaaacgcgaaaccgtaaacgaccgccgccgcgaatacgcacgctccgcgcaaacgtacctcgacgccgctaacactaaaacctcgtaaaacgaatacacattccaaaaatccgaaatctacgaccaacgcgaccgcgtcacaacgcaaactccacccccttcgacgaattaaacgtaaaacgcgccccgaacccgaacttaaactcgaaataacgaaaaacgaaaacgcgaataaaaaaaaaaaaaatcctactcgcctccgcgaaattcccgataaccgtaaaaacgaccgactaactaactaacccgccgtcccgcaaacgaaccgcc

SEQ ID NO: 34275 - DNA, 609 bp, Artificial Sequence
  chemically treated genomic DNA (Homo sapiens) CpG-island No: 34275
ttgtatttgttttggaaaggatatacgtttcgtttgttttttttattaattagggagattgtgaatatttttaagtttagtattacgtgtatacgtcgttagttggttcgcgcgttttttacggagttttttggaggggagggagcgcggttcggattagtttttttcgaatattaagtgtcgtttttagtttcgtttagttcgttttgtttatcgggggtttcgtcgcgttagtcgtttcggttgttttatgtaggtatgcgcggcgggcgcgtgacgtgggcgcggggtcgtgggcggtcgtcgtcgcgagtgcgtacgtttcgcgtagacgtgtttcggcgtcgttggtattagggtttcgtggaacgaatgtatattttagggattcggggtttacggttagcgcggtcgcgttatagcgtaggttttatttttttcggcgagttgggcgtgaggcgcgtttcgggttcgaatttggattcgaggtggcgggaggcgagggcgcgagtggggggggggggggttttgttcgttttcgcgaggttttcgatggtcgtgggggcgatcggttggttggttggttcgtcgtttcgtaggcgggtcgtt

SEQ ID NO: 34276 - DNA, 609 bp, Artificial Sequence
  chemically treated genomic DNA (Homo sapiens) CpG-island No: 34276
aacgacccgcctacgaaacgacgaaccaaccaaccaaccgatcgcccccacgaccatcgaaaacctcgcgaaaacgaacaaaaccccccccccccccactcgcgccctcgcctcccgccacctcgaatccaaattcgaacccgaaacgcgcctcacgcccaactcgccgaaaaaaataaaacctacgctataacgcgaccgcgctaaccgtaaaccccgaatccctaaaatatacattcgttccacgaaaccctaataccaacgacgccgaaacacgtctacgcgaaacgtacgcactcgcgacgacgaccgcccacgaccccgcgcccacgtcacgcgcccgccgcgcatacctacataaaacaaccgaaacgactaacgcgacgaaacccccgataaacaaaacgaactaaacgaaactaaaaacgacacttaatattcgaaaaaaactaatccgaaccgcgctccctcccctccaaaaaactccgtaaaaaacgcgcgaaccaactaacgacgtatacacgtaatactaaacttaaaaatattcacaatctccctaattaataaaaaaaacaaacgaaacgtatatcctttccaaaacaaatacaa

SEQ ID NO: 34277 - DNA, 777 bp, Artificial Sequence
  chemically treated genomic DNA (Homo sapiens) CpG-island No: 34277
taaagcggcgggtgtagtaatttcggcgttttcgagcgcgttcggggtcggacgttcggcgttcggcgttggttttagaaaggcggcgggtgtggggcgtagaggtttatttcgcgttttagtcgcggttcgcgtttcgtcgtagttttcggggacggtatttatatacgtagagttttattacgtacgcgtagtaggattagacgattacgaaggtgatgaagagtatcggtatttagtttacgacgcgttggtagtagcgttatagcgtttagggcgttatgtttcgttggcggttgtcgagtttcgcgttttatcgttttggggagcgcgggagtttcggcgacggtgattcggacgttttaggcggttgttggtttagttttttcgttttcgaggtaggatttgtgggagtaaaagttcgaggcgtcgtcgggatttttttcgtttcggcgtttagttaggtttcgtttttattttatatttcgtcgttttttttttttcgcgttcgttttcgttagttcgttcgtcgcgggtcgcgggtcgttttcggttttcgcgtcgttggggcggggttttcgcggtcggggaggcggtgagggggcggggtcgtagttcgggatcgtttatggggcgtggcggggttggatgcggataggttgggcggacgcgggaggtcggggaaggagaggcgaaaaatacgtttttgatggatgagaggtataggggatagtttttgtggatcgagatttaataggggagggagattatggaaat

SEQ ID NO: 34278 - DNA, 777 bp, Artificial Sequence
  chemically treated genomic DNA (Homo sapiens) CpG-island No: 34278
atttccataatctccctcccctattaaatctcgatccacaaaaactatcccctatacctctcatccatcaaaaacgtatttttcgcctctccttccccgacctcccgcgtccgcccaacctatccgcatccaaccccgccacgccccataaacgatcccgaactacgaccccgccccctcaccgcctccccgaccgcgaaaaccccgccccaacgacgcgaaaaccgaaaacgacccgcgacccgcgacgaacgaactaacgaaaacgaacgcgaaaaaaaaaaaacgacgaaatataaaataaaaacgaaacctaactaaacgccgaaacgaaaaaaatcccgacgacgcctcgaacttttactcccacaaatcctacctcgaaaacgaaaaaactaaaccaacaaccgcctaaaacgtccgaatcaccgtcgccgaaactcccgcgctccccaaaacgataaaacgcgaaactcgacaaccgccaacgaaacataacgccctaaacgctataacgctactaccaacgcgtcgtaaactaaataccgatactcttcatcaccttcgtaatcgtctaatcctactacgcgtacgtaataaaactctacgtatataaataccgtccccgaaaactacgacgaaacgcgaaccgcgactaaaacgcgaaataaacctctacgccccacacccgccgcctttctaaaaccaacgccgaacgccgaacgtccgaccccgaacgcgctcgaaaacgccgaaattactacacccgccgcttta

SEQ ID NO: 34279 - DNA, 777 bp, Artificial Sequence
  chemically treated genomic DNA (Homo sapiens) CpG-island No: 34279
atttttatagttttttttttttattgagtttcgatttataaaagttattttttgtattttttatttattaagggcgtgtttttcgttttttttttttcggtttttcgcgttcgtttagtttgttcgtatttagtttcgttacgttttatgggcggtttcgagttgcggtttcgtttttttatcgttttttcggtcgcggaaatttcgttttaacgacgcggagatcgggggcggttcgcggttcgcggcgggcgggttggcggggacggacgcggggggaggggggcgacgggatgtggggtgggggcggggtttggttgggcgtcgggacgggaggagtttcggcggcgtttcggatttttgtttttataagttttgtttcggaggcgggggagttggattagtagtcgtttggagcgttcgagttatcgtcgtcggggttttcgcgttttttagaacggtgggacgcggggttcggtagtcgttagcggaatatggcgttttggacgttgtggcgttgttgttagcgcgtcgtgggttgggtgtcggtgttttttattattttcgtggtcgtttggttttattacgcgtacgtggtggagttttgcgtgtgtgagtatcgttttcggggattgcggcggggcgcgggtcgcggttagggcgcgagataggtttttgcgttttatattcgtcgtttttttggagttagcgtcggacgtcgggcgttcggtttcgaacgcgttcggaagcgtcgaggttgttgtattcgtcgttttg

SEQ ID NO: 34280 - DNA, 777 bp, Artificial Sequence
  chemically treated genomic DNA (Homo sapiens) CpG-island No: 34280
caaaacgacgaatacaacaacctcgacgcttccgaacgcgttcgaaaccgaacgcccgacgtccgacgctaactccaaaaaaacgacgaatataaaacgcaaaaacctatctcgcgccctaaccgcgacccgcgccccgccgcaatccccgaaaacgatactcacacacgcaaaactccaccacgtacgcgtaataaaaccaaacgaccacgaaaataataaaaaacaccgacacccaacccacgacgcgctaacaacaacgccacaacgtccaaaacgccatattccgctaacgactaccgaaccccgcgtcccaccgttctaaaaaacgcgaaaaccccgacgacgataactcgaacgctccaaacgactactaatccaactcccccgcctccgaaacaaaacttataaaaacaaaaatccgaaacgccgccgaaactcctcccgtcccgacgcccaaccaaaccccgcccccaccccacatcccgtcgcccccctccccccgcgtccgtccccgccaacccgcccgccgcgaaccgcgaaccgcccccgatctccgcgtcgttaaaacgaaatttccgcgaccgaaaaaacgataaaaaaacgaaaccgcaactcgaaaccgcccataaaacgtaacgaaactaaatacgaacaaactaaacgaacgcgaaaaaccgaaaaaaaaaaaacgaaaaacacgcccttaataaataaaaaatacaaaaaataacttttataaatcgaaactcaataaaaaaaaaaaactataaaaat

SEQ ID NO: 34281 - DNA, 537 bp, Artificial Sequence
  chemically treated genomic DNA (Homo sapiens) CpG-island No: 34281
tgaacgtgaagggggttcgaggtcgaggaagattcggagttcggttagaagggtcggtttgagagaagttagtttcgcgtttgatagattttcgtttcgttgtttgggttttggggatacggtgtcgcgggcgacggcggttcggtcgatcgaaagcgttttcgttcggagtttgaggttttcggtacgggtaattttcggttatttatacgcgtaggttttattttagtcgcgatttcggtttttgtttcggtttcggtcgcggttgttttcgatacgttgttgttggcgttggtggcggcggttgcggcggcggcggtcgcgagttttagtttcgggttatcgttttagttttagattattttttttttggtagcggtcgtttgcgtcgtttgttagtaagtcgtatttttattggtcgttcgttggggtgacgttacgtcggggcgaaagtcgtggcggagaggtggggcgttaaaggggttttgtttcggttggggttgggttttatttgtcgattagggtggtttcgttttt

SEQ ID NO: 34282 - DNA, 537 bp, Artificial Sequence
  chemically treated genomic DNA (Homo sapiens) CpG-island No: 34282
aaaaacgaaaccaccctaatcgacaaataaaacccaaccccaaccgaaacaaaacccctttaacgccccacctctccgccacgactttcgccccgacgtaacgtcaccccaacgaacgaccaataaaaatacgacttactaacaaacgacgcaaacgaccgctaccaaaaaaaaaataatctaaaactaaaacgataacccgaaactaaaactcgcgaccgccgccgccgcaaccgccgccaccaacgccaacaacaacgtatcgaaaacaaccgcgaccgaaaccgaaacaaaaaccgaaatcgcgactaaaataaaacctacgcgtataaataaccgaaaattacccgtaccgaaaacctcaaactccgaacgaaaacgctttcgatcgaccgaaccgccgtcgcccgcgacaccgtatccccaaaacccaaacaacgaaacgaaaatctatcaaacgcgaaactaacttctctcaaaccgacccttctaaccgaactccgaatcttcctcgacctcgaacccccttcacgttca

SEQ ID NO: 34283 - DNA, 537 bp, Artificial Sequence
  chemically treated genomic DNA (Homo sapiens) CpG-island No: 34283
gggggcggggttattttaatcggtaggtgggatttagttttagtcggggtagggtttttttaacgttttattttttcgttacgattttcgtttcggcgtgacgttattttagcgggcgattaatgggagtgcggtttattggtaggcggcgtaggcggtcgttgttaaaggggaagtgatttggggttggagcgatggttcggggttggagttcgcggtcgtcgtcgtcgtagtcgtcgttattaacgttaataataacgtgtcgggagtagtcgcggtcgaagtcggagtaggggtcggagtcgcggttggagtggggtttgcgcgtgtgagtggtcgagagttgttcgtgtcggagattttaaatttcgggcgggagcgttttcggtcggtcgagtcgtcgtcgttcgcggtatcgtgtttttaaggtttagatagcggggcgggggtttattaggcgcgggattggttttttttaggtcgatttttttagtcgggtttcggatttttttcggtttcgggttttttttacgttta

SEQ ID NO: 34284 - DNA, 537 bp, Artificial Sequence
  chemically treated genomic DNA (Homo sapiens) CpG-island No: 34284
taaacgtaaaaaaaacccgaaaccgaaaaaaatccgaaacccgactaaaaaaatcgacctaaaaaaaaccaatcccgcgcctaataaacccccgccccgctatctaaaccttaaaaacacgataccgcgaacgacgacgactcgaccgaccgaaaacgctcccgcccgaaatttaaaatctccgacacgaacaactctcgaccactcacacgcgcaaaccccactccaaccgcgactccgacccctactccgacttcgaccgcgactactcccgacacgttattattaacgttaataacgacgactacgacgacgacgaccgcgaactccaaccccgaaccatcgctccaaccccaaatcacttcccctttaacaacgaccgcctacgccgcctaccaataaaccgcactcccattaatcgcccgctaaaataacgtcacgccgaaacgaaaatcgtaacgaaaaaataaaacgttaaaaaaaccctaccccgactaaaactaaatcccacctaccgattaaaataaccccgccccc

SEQ ID NO: 34285 - DNA, 652 bp, Artificial Sequence
  chemically treated genomic DNA (Homo sapiens) CpG-island No: 34285
ggatttttttcgagtacggtcggcgtcgttacggttttattatttatcgcgcgtttacgagtttgtattttagtcgtatttttattttcgatgttcgtttttatttcggtcgacgtattttcgttttatcgatttttgtagatcgtacgaattttgtatttacggtttattcgatcgatttacggttcgtttattcgtttatttatttttttttagatacggtttgatttatcgtatacgttcgagtttacgttgttatatattgcgtattttttattcgattttacgtatgtttatatcgtatcgacgtatgtttgtattcgcgatagtattcgacgttcgtacgtagtatatttttttagatgtatgcgtttagaattagcgtgagagtttatgtttggatcgtattttatcgtttcgtttcgtatattatattatttttagttattatgacgcgtatcgatatacgtatatatttacgttttttcgtattcgatcggttttttgattatattcgttttcgatttttacgttatcgtttggttttcgttttattcgttattatttcgtttttacgcgttattcgatcgatttttgatgttattcgatcgttatcgtatcgttatcgtatcgtattcgattatagatcgat

SEQ ID NO: 34286 - DNA, 652 bp, Artificial Sequence
  chemically treated genomic DNA (Homo sapiens) CpG-island No: 34286
atcgatctataatcgaatacgatacgataacgatacgataacgatcgaataacatcaaaaatcgatcgaataacgcgtaaaaacgaaataataacgaataaaacgaaaaccaaacgataacgtaaaaatcgaaaacgaatataatcaaaaaaccgatcgaatacgaaaaaacgtaaatatatacgtatatcgatacgcgtcataataactaaaaataatataatatacgaaacgaaacgataaaatacgatccaaacataaactctcacgctaattctaaacgcatacatctaaaaaaatatactacgtacgaacgtcgaatactatcgcgaatacaaacatacgtcgatacgatataaacatacgtaaaatcgaataaaaaatacgcaatatataacaacgtaaactcgaacgtatacgataaatcaaaccgtatctaaaaaaaaataaataaacgaataaacgaaccgtaaatcgatcgaataaaccgtaaatacaaaattcgtacgatctacaaaaatcgataaaacgaaaatacgtcgaccgaaataaaaacgaacatcgaaaataaaaatacgactaaaatacaaactcgtaaacgcgcgataaataataaaaccgtaacgacgccgaccgtactcgaaaaaaatcc

SEQ ID NO: 34287 - DNA, 652 bp, Artificial Sequence
  chemically treated genomic DNA (Homo sapiens) CpG-island No: 34287
atcggtttgtggtcggatacgatgcgatgacgatgcgatgacgatcgagtagtattagagatcgatcgagtggcgcgtaggagcggagtgatggcgagtggagcgagagttaggcgatggcgtgagagtcgagagcgagtgtagttagagagtcgatcgagtacgagagagcgtggatgtgtgcgtatgtcgatgcgcgttatgatgattgaggatggtgtgatgtacgaggcgaggcgatagagtgcgatttagatatgagtttttacgttagttttgggcgtatgtatttggagaagtgtgttgcgtgcgagcgtcgagtgttgtcgcgagtgtaggtatgcgtcggtgcgatgtgaatatgcgtagaatcggatggagaatacgtagtgtgtggtagcgtgaattcggacgtatacggtgggttagatcgtgtttgagagaggatggataggcggataggcgagtcgtaggtcgatcgaatgagtcgtgggtgtagggttcgtgcgatttatagaggtcggtaggacgaggatacgtcggtcggagtgaggacggatatcgagagtggggatgcgattggggtatagattcgtaggcgcgcgatgagtggtgaggtcgtggcgacgtcggtcgtgttcgagagaggttt

SEQ ID NO: 34288 - DNA, 652 bp, Artificial Sequence
  chemically treated genomic DNA (Homo sapiens) CpG-island No: 34288
aaacctctctcgaacacgaccgacgtcgccacgacctcaccactcatcgcgcgcctacgaatctataccccaatcgcatccccactctcgatatccgtcctcactccgaccgacgtatcctcgtcctaccgacctctataaatcgcacgaaccctacacccacgactcattcgatcgacctacgactcgcctatccgcctatccatcctctctcaaacacgatctaacccaccgtatacgtccgaattcacgctaccacacactacgtattctccatccgattctacgcatattcacatcgcaccgacgcatacctacactcgcgacaacactcgacgctcgcacgcaacacacttctccaaatacatacgcccaaaactaacgtaaaaactcatatctaaatcgcactctatcgcctcgcctcgtacatcacaccatcctcaatcatcataacgcgcatcgacatacgcacacatccacgctctctcgtactcgatcgactctctaactacactcgctctcgactctcacgccatcgcctaactctcgctccactcgccatcactccgctcctacgcgccactcgatcgatctctaatactactcgatcgtcatcgcatcgtcatcgcatcgtatccgaccacaaaccgat

SEQ ID NO: 34289 - DNA, 1085 bp, Artificial Sequence
  chemically treated genomic DNA (Homo sapiens) CpG-island No: 34289
agtcgttattcgggcgcggttgggaggaggcgtttagaggaggcggcggtcgggttttttcggttcggagtttttcggaggattgttcgatggcggcggtattgttcgagtcgttttgtagcggtgtggagatttcgattagttggggtaggcggtttaggtcgcggttagttaggtagtaaacgagggtgacgttaaggtgtagagcgtagacggttacgagtaggcggtaggttcgttgtagggacgcgtttggtatcgcggcgttgtcgtttaggagcggttttcgaagttttattttttcgtcgtcgttttaagaagggtgtgggttataggaggggaggcgattcgttcgcgggtcgttcgttaggcgttgttttatagcggcgattaggggagggttcggagcgggggcgggcgagcggttgagagttgagatttttttagttagttagatttgggagcggcgagaagtcgttcgaggcgtcggcggagaggggaggggcggggtttcggcgaaggcgggggcggggtcgggcgcggggttttttggacgagggcgggaaggcggggtagttcgtggcgggatgggcgcgttgggcggggtttcgggagggtgggtagcgggcggggcgtcgtcgtggggttttcggagtatgattgtagtttcgacgtttggtcgcgtatcgttttttttttttcgagtttttgcggcggagtttcggtcgcgttgagtcgcgtttttttttttttttttacgttgttttcgataggtcgcgttattttttggggtgcgaagggattcgggtgcgagtttgggtttgtagcgcggcggcggagagaacggagaggatagttggcgggtggttatttggagtggtttggggtcgcggcggcgttttggttagtgggttttggtgggttaggaagagaggtagaaaaaggttatttaggaaacgggtttcgacgtcgggcgaggagtggtacgttcgaaattttttttttaatttagttcggttggatttcgttgtttaacggggggttttgcggtaaagaaagtggacgggttgttatttttgtgtttt

SEQ ID NO: 34290 - DNA, 1085 bp, Artificial Sequence
  chemically treated genomic DNA (Homo sapiens) CpG-island No: 34290
aaaacacaaaaataacaacccgtccactttctttaccgcaaaaccccccgttaaacaacgaaatccaaccgaactaaattaaaaaaaaaatttcgaacgtaccactcctcgcccgacgtcgaaacccgtttcctaaataacctttttctacctctcttcctaacccaccaaaacccactaaccaaaacgccgccgcgaccccaaaccactccaaataaccacccgccaactatcctctccgttctctccgccgccgcgctacaaacccaaactcgcacccgaatcccttcgcaccccaaaaaataacgcgacctatcgaaaacaacgtaaaaaaaaaaaaaaaaacgcgactcaacgcgaccgaaactccgccgcaaaaactcgaaaaaaaaaaaacgatacgcgaccaaacgtcgaaactacaatcatactccgaaaaccccacgacgacgccccgcccgctacccaccctcccgaaaccccgcccaacgcgcccatcccgccacgaactaccccgccttcccgccctcgtccaaaaaaccccgcgcccgaccccgcccccgccttcgccgaaaccccgcccctcccctctccgccgacgcctcgaacgacttctcgccgctcccaaatctaactaactaaaaaaatctcaactctcaaccgctcgcccgcccccgctccgaaccctcccctaatcgccgctataaaacaacgcctaacgaacgacccgcgaacgaatcgcctcccctcctataacccacacccttcttaaaacgacgacgaaaaaataaaacttcgaaaaccgctcctaaacgacaacgccgcgataccaaacgcgtccctacaacgaacctaccgcctactcgtaaccgtctacgctctacaccttaacgtcaccctcgtttactacctaactaaccgcgacctaaaccgcctaccccaactaatcgaaatctccacaccgctacaaaacgactcgaacaataccgccgccatcgaacaatcctccgaaaaactccgaaccgaaaaaacccgaccgccgcctcctctaaacgcctcctcccaaccgcgcccgaataacgact

SEQ ID NO: 34291 - DNA, 1085 bp, Artificial Sequence
  chemically treated genomic DNA (Homo sapiens) CpG-island No: 34291
gaggtatagaagtggtaattcgtttattttttttgtcgtaggatttttcgttaagtagcggggtttagtcgggttgagttagggagggggtttcgaacgtgttatttttcgttcggcgtcgaagttcgttttttgggtaatttttttttgtttttttttttagtttattaaggtttattggttagaacgtcgtcgcggttttaaattattttagataattattcgttagttgtttttttcgtttttttcgtcgtcgcgttgtaggtttaggttcgtattcgagttttttcgtattttaggaagtggcgcggtttgtcgagggtagcgtggaggaggaagaggaggcgcggtttaacgcgatcgaagtttcgtcgtaaaggttcgggaggaagagggcggtgcgcggttaagcgtcggagttgtagttatatttcggggattttacgacggcgtttcgttcgttgtttattttttcgaggtttcgtttagcgcgtttatttcgttacgggttgtttcgttttttcgttttcgtttagaaaatttcgcgttcggtttcgttttcgttttcgtcggggtttcgtttttttttttttcgtcggcgtttcgggcggtttttcgtcgtttttaggtttggttggttggaggagttttagtttttagtcgttcgttcgttttcgtttcgggtttttttttagtcgtcgttgtggggtagcgtttggcgggcggttcgcgggcgggtcgtttttttttttgtagtttatattttttttaaagcggcggcgggaagatgaggtttcgggagtcgtttttgagcggtagcgtcgcgatgttaggcgcgtttttatagcgggtttgtcgtttgttcgtggtcgtttgcgttttgtattttggcgttattttcgtttattatttggttggtcgcgatttgagtcgtttgttttaattggtcggagtttttatatcgttgtagggcggttcgaatagtgtcgtcgttatcgggtagtttttcggggagtttcggatcggaggggttcggtcgtcgttttttttaggcgtttttttttagtcgcgttcgggtggcgatt

SEQ ID NO: 34292 - DNA, 1085 bp, Artificial Sequence
  chemically treated genomic DNA (Homo sapiens) CpG-island No: 34292
aatcgccacccgaacgcgactaaaaaaaaacgcctaaaaaaaacgacgaccgaacccctccgatccgaaactccccgaaaaactacccgataacgacgacactattcgaaccgccctacaacgatataaaaactccgaccaattaaaacaaacgactcaaatcgcgaccaaccaaataataaacgaaaataacgccaaaatacaaaacgcaaacgaccacgaacaaacgacaaacccgctataaaaacgcgcctaacatcgcgacgctaccgctcaaaaacgactcccgaaacctcatcttcccgccgccgctttaaaaaaaatataaactacaaaaaaaaaaacgacccgcccgcgaaccgcccgccaaacgctaccccacaacgacgactaaaaaaaaacccgaaacgaaaacgaacgaacgactaaaaactaaaactcctccaaccaaccaaacctaaaaacgacgaaaaaccgcccgaaacgccgacgaaaaaaaaaaaaacgaaaccccgacgaaaacgaaaacgaaaccgaacgcgaaattttctaaacgaaaacgaaaaaacgaaacaacccgtaacgaaataaacgcgctaaacgaaacctcgaaaaaataaacaacgaacgaaacgccgtcgtaaaatccccgaaatataactacaactccgacgcttaaccgcgcaccgccctcttcctcccgaacctttacgacgaaacttcgatcgcgttaaaccgcgcctcctcttcctcctccacgctaccctcgacaaaccgcgccacttcctaaaatacgaaaaaactcgaatacgaacctaaacctacaacgcgacgacgaaaaaaacgaaaaaaacaactaacgaataattatctaaaataatttaaaaccgcgacgacgttctaaccaataaaccttaataaactaaaaaaaaaaacaaaaaaaaattacccaaaaaacgaacttcgacgccgaacgaaaaataacacgttcgaaaccccctccctaactcaacccgactaaaccccgctacttaacgaaaaatcctacgacaaaaaaaataaacgaattaccacttctatacctc

SEQ ID NO: 34293 - DNA, 815 bp, Artificial Sequence
  chemically treated genomic DNA (Homo sapiens) CpG-island No: 34293
gtatataggtttttgcgtaaggggcgagcgcggagttggtatttttgtttgaggttttcgcgcggggttgtggcgtcgacggatttattcggttagggggaggggtcgagttcggttgtatgtaatattcggaaggcggcggaggatagtaaggtggttggtcggtaggttaatggcggttaacgttattttcggtcgtttttcgagtatcgtttttcggtaattcgaagttataggatggaggagggggattttagtaaaggtagcgattaaggggatttaagtagaacgggagggcgacgttcggagcggcggtagagttaggggacgttgtgtgaggttggtaaagcggtgtttatttagttttttcgggtttcgtcgtcgtcggaggaggataggaggtcggtaaggcgatttttaaatttttttaggttttgattttcgttttttaattttcgtaaattttaattcggttttggaaaatttcgcgagaacgggttttcgaattgttattgggatttcgcgagaacgaaatttttttttttgtgggcggagtaattttttcgatgttttttttttttgaggttagtagtaggaagggtttcgggagttgcgagtgtcgcgaggtttgaggtcgttcggtgggtcgggcgttgtgcgaagttagaaataattgggggtatggagaatgcggtggttgtaaagggtcgttgaggcggtggaggtttggtagagagcgttttcgcggtcgcggtttttggtttttttgtggagtttggttttttcgtggtggtgtagtattttaggaattttag

SEQ ID NO: 34294 - DNA, 815 bp, Artificial Sequence
  chemically treated genomic DNA (Homo sapiens) CpG-island No: 34294
ctaaaattcctaaaatactacaccaccacgaaaaaaccaaactccacaaaaaaaccaaaaaccgcgaccgcgaaaacgctctctaccaaacctccaccgcctcaacgaccctttacaaccaccgcattctccatacccccaattatttctaacttcgcacaacgcccgacccaccgaacgacctcaaacctcgcgacactcgcaactcccgaaacccttcctactactaacctcaaaaaaaaaaaacatcgaaaaaattactccgcccacaaaaaaaaaaatttcgttctcgcgaaatcccaataacaattcgaaaacccgttctcgcgaaattttccaaaaccgaattaaaatttacgaaaattaaaaaacgaaaatcaaaacctaaaaaaatttaaaaatcgccttaccgacctcctatcctcctccgacgacgacgaaacccgaaaaaactaaataaacaccgctttaccaacctcacacaacgtcccctaactctaccgccgctccgaacgtcgccctcccgttctacttaaatccccttaatcgctacctttactaaaatccccctcctccatcctataacttcgaattaccgaaaaacgatactcgaaaaacgaccgaaaataacgttaaccgccattaacctaccgaccaaccaccttactatcctccgccgccttccgaatattacatacaaccgaactcgacccctccccctaaccgaataaatccgtcgacgccacaaccccgcgcgaaaacctcaaacaaaaataccaactccgcgctcgccccttacgcaaaaacctatatac

SEQ ID NO: 34295 - DNA, 815 bp, Artificial Sequence
  chemically treated genomic DNA (Homo sapiens) CpG-island No: 34295
ttgaagtttttggggtgttgtattattacggaagaattaagttttatagagaagttagaagtcgcgatcgcggggacgttttttgttaggtttttatcgttttagcggttttttatagttatcgtattttttatgtttttagttatttttagtttcgtatagcgttcggtttatcgagcgattttaaatttcgcgatattcgtaattttcgaggttttttttgttattggttttagagggaagagatatcgggaagattgtttcgtttatagaaaggaagatttcgttttcgcgagattttaatgataattcgggagttcgttttcgcgggattttttaagatcgggttggaatttgcgggggttaggagacggaagttagagtttaggaagatttgggggtcgttttgtcggttttttgttttttttcggcggcggcggagttcgagagaattaggtgaatatcgttttgttagttttatatagcgttttttggttttgtcgtcgtttcggacgtcgttttttcgttttgtttgggtttttttagtcgttatttttgttgggattttttttttttattttgtggtttcgggttgtcgaagagcgatgttcggagggcggtcggaagtggcgttggtcgttattggtttgtcggttagttattttgttgtttttcgtcgtttttcgggtgttatatgtagtcgggttcggtttttttttttggtcggatggattcgtcggcgttatagtttcgcgcggaaattttaggtaaaggtattagtttcgcgttcgttttttacgtagaggtttgtgtat

SEQ ID NO: 34296 - DNA, 815 bp, Artificial Sequence
  chemically treated genomic DNA (Homo sapiens) CpG-island No: 34296
atacacaaacctctacgtaaaaaacgaacgcgaaactaatacctttacctaaaatttccgcgcgaaactataacgccgacgaatccatccgaccaaaaaaaaaaaccgaacccgactacatataacacccgaaaaacgacgaaaaacaacaaaataactaaccgacaaaccaataacgaccaacgccacttccgaccgccctccgaacatcgctcttcgacaacccgaaaccacaaaataaaaaaaaaaaatcccaacaaaaataacgactaaaaaaacccaaacaaaacgaaaaaacgacgtccgaaacgacgacaaaaccaaaaaacgctatataaaactaacaaaacgatattcacctaattctctcgaactccgccgccgccgaaaaaaaacaaaaaaccgacaaaacgacccccaaatcttcctaaactctaacttccgtctcctaacccccgcaaattccaacccgatcttaaaaaatcccgcgaaaacgaactcccgaattatcattaaaatctcgcgaaaacgaaatcttcctttctataaacgaaacaatcttcccgatatctcttccctctaaaaccaataacaaaaaaaacctcgaaaattacgaatatcgcgaaatttaaaatcgctcgataaaccgaacgctatacgaaactaaaaataactaaaaacataaaaaatacgataactataaaaaaccgctaaaacgataaaaacctaacaaaaaacgtccccgcgatcgcgacttctaacttctctataaaacttaattcttccgtaataatacaacaccccaaaaacttcaa

SEQ ID NO: 34297 - DNA, 877 bp, Artificial Sequence
  chemically treated genomic DNA (Homo sapiens) CpG-island No: 34297
cgaggtcggaggtaggaagtacggtcgggcggggttgggcggagcggtcgcggaggagtaggggtcgtaggcgtttcgttcggattggtatgcggtcgagagtgacgcgggaggcggggttacgtgacgttcgtggaatgttaataatgtagcgaatgttttatttgggtttgcgttttggaatcgcggcgtgagcgtttcgggaagatggagtagtcgtcgtttacgttatcgtcgtcgttcggggttttttcgtttttgcggggttagtagtagttttagttattagtgttcggtttttcggcgcgagaggttcgggagtcgtcggttaggacgttttcgagggtgtagatcgcgtttttggaggtgagggggttgggagttggggtcggggcggtagttcggagggtggcgagagttttcgcgaagcggtcgagttttgcggtttcgcgtatttattgtggtgtcgaggtttcgggaagggcgttcggcggggcggtcgaggaagtttgttcggacggagttttgcgttttgtttttacggttcgcgttcgttcggagtcgttttcgttcggcggttcgtagtttaggtcgtacggagttcgcggagtcggttttagaggagtcggggaagttggaggtcggcgtcgggcgggggtagcggggttgcgtcgttttgttgtgcggcgatcggggcggtcgggatttcggcggggtaggggcggcgcgggtcgggggcggtgttttagatttaaaaggtcgtagcgtcgggcgcgtttttgttttcgttgttttcgggggatcggttttttattagacgttcggtcgggcgtttttgatagtttcgggattttcggttcggcggcgtagcggttta

SEQ ID NO: 34298 - DNA, 877 bp, Artificial Sequence
  chemically treated genomic DNA (Homo sapiens) CpG-island No: 34298
taaaccgctacgccgccgaaccgaaaatcccgaaactatcaaaaacgcccgaccgaacgtctaataaaaaaccgatcccccgaaaacaacgaaaacaaaaacgcgcccgacgctacgaccttttaaatctaaaacaccgcccccgacccgcgccgcccctaccccgccgaaatcccgaccgccccgatcgccgcacaacaaaacgacgcaaccccgctacccccgcccgacgccgacctccaacttccccgactcctctaaaaccgactccgcgaactccgtacgacctaaactacgaaccgccgaacgaaaacgactccgaacgaacgcgaaccgtaaaaacaaaacgcaaaactccgtccgaacaaacttcctcgaccgccccgccgaacgcccttcccgaaacctcgacaccacaataaatacgcgaaaccgcaaaactcgaccgcttcgcgaaaactctcgccaccctccgaactaccgccccgaccccaactcccaaccccctcacctccaaaaacgcgatctacaccctcgaaaacgtcctaaccgacgactcccgaacctctcgcgccgaaaaaccgaacactaataactaaaactactactaaccccgcaaaaacgaaaaaaccccgaacgacgacgataacgtaaacgacgactactccatcttcccgaaacgctcacgccgcgattccaaaacgcaaacccaaataaaacattcgctacattattaacattccacgaacgtcacgtaaccccgcctcccgcgtcactctcgaccgcataccaatccgaacgaaacgcctacgacccctactcctccgcgaccgctccgcccaaccccgcccgaccgtacttcctacctccgacctcg

SEQ ID NO: 34299 - DNA, 877 bp, Artificial Sequence
  chemically treated genomic DNA (Homo sapiens) CpG-island No: 34299
tggatcgttgcgtcgtcggatcgggggtttcgaggttgttaggggcgttcggtcgggcgtttagtgaaaagtcgatttttcggagataacggaagtagaggcgcgttcggcgttacggttttttgggtttaggatatcgttttcggttcgcgtcgtttttgtttcgtcgggatttcggtcgtttcggtcgtcgtataataaagcggcgtagtttcgttgttttcgttcgacgtcggtttttaattttttcggtttttttggaatcggtttcgcgggtttcgtacggtttggattacgagtcgtcgggcgggggcggtttcgggcgggcgcggatcgtgggggtagggcgtagggtttcgttcggataaattttttcggtcgtttcgtcgggcgtttttttcggagtttcggtattatagtaggtgcgcggagtcgtagggttcgatcgtttcgcggaaattttcgttatttttcgagttgtcgtttcgattttagtttttagtttttttatttttaggggcgcggtttatattttcgggggcgttttggtcggcggttttcgggtttttcgcgtcgggagatcgggtattggtggttggagttgttgttggtttcgtagggacgggggagtttcgggcggcggcggtggcgtggacggcgattgttttattttttcggggcgtttacgtcgcggttttaaagcgtagatttaagtgggatattcgttatattgttggtattttacgggcgttacgtgatttcgtttttcgcgttattttcggtcgtatattagttcgggcggggcgtttgcggtttttgttttttcgcggtcgtttcgtttagtttcgttcggtcgtgttttttgttttcggtttcg

SEQ ID NO: 34300 - DNA, 877 bp, Artificial Sequence
  chemically treated genomic DNA (Homo sapiens) CpG-island No: 34300
cgaaaccgaaaacaaaaaacacgaccgaacgaaactaaacgaaacgaccgcgaaaaaacaaaaaccgcaaacgccccgcccgaactaatatacgaccgaaaataacgcgaaaaacgaaatcacgtaacgcccgtaaaataccaacaatataacgaatatcccacttaaatctacgctttaaaaccgcgacgtaaacgccccgaaaaaataaaacaatcgccgtccacgccaccgccgccgcccgaaactcccccgtccctacgaaaccaacaacaactccaaccaccaatacccgatctcccgacgcgaaaaacccgaaaaccgccgaccaaaacgcccccgaaaatataaaccgcgcccctaaaaataaaaaaactaaaaactaaaatcgaaacgacaactcgaaaaataacgaaaatttccgcgaaacgatcgaaccctacgactccgcgcacctactataataccgaaactccgaaaaaaacgcccgacgaaacgaccgaaaaaatttatccgaacgaaaccctacgccctacccccacgatccgcgcccgcccgaaaccgcccccgcccgacgactcgtaatccaaaccgtacgaaacccgcgaaaccgattccaaaaaaaccgaaaaaattaaaaaccgacgtcgaacgaaaacaacgaaactacgccgctttattatacgacgaccgaaacgaccgaaatcccgacgaaacaaaaacgacgcgaaccgaaaacgatatcctaaacccaaaaaaccgtaacgccgaacgcgcctctacttccgttatctccgaaaaatcgacttttcactaaacgcccgaccgaacgcccctaacaacctcgaaacccccgatccgacgacgcaacgatcca

SEQ ID NO: 34301 - DNA, 542 bp, Artificial Sequence
  chemically treated genomic DNA (Homo sapiens) CpG-island No: 34301
tcgtgacggttgttacggtcgcgtatattttgtattcggtgaagagcgtgcgtgtgttgaggtcggagtcgtagacggttgtggggttttcgtatttcgtttgggtgttcgcgtttgtttcggttttcgttttcgttttcgtttcggttgcggagggtttggacgttaaggaggagtatgttttggcgttgggcggcgtaggcgttttttcgttggacgtggagtacggaggtttagatcggaggtgttcgttttcgttttattcgaagtatttgttgttgcgtagtaagtcggagtagtacgatttggatagtttgtgcgtaggtatggagtagagttttcgtgcgggttttaacgagttcgagggcggcgataagagtcgtaaaagcgttaagggggataaaggcggaaaggataaaaagtagatttagatttttttcgttttcgttcgtaaaaatagtagagacgaagagaagagagagttacgtattaagagttattcgttatacgtttttaagttttttatggagtagtacgtggag

SEQ ID NO: 34302 - DNA, 542 bp, Artificial Sequence
  chemically treated genomic DNA (Homo sapiens) CpG-island No: 34302
ctccacgtactactccataaaaaacttaaaaacgtataacgaataactcttaatacgtaactctctcttctcttcgtctctactatttttacgaacgaaaacgaaaaaaatctaaatctactttttatcctttccgcctttatcccccttaacgcttttacgactcttatcgccgccctcgaactcgttaaaacccgcacgaaaactctactccatacctacgcacaaactatccaaatcgtactactccgacttactacgcaacaacaaatacttcgaataaaacgaaaacgaacacctccgatctaaacctccgtactccacgtccaacgaaaaaacgcctacgccgcccaacgccaaaacatactcctccttaacgtccaaaccctccgcaaccgaaacgaaaacgaaaacgaaaaccgaaacaaacgcgaacacccaaacgaaatacgaaaaccccacaaccgtctacgactccgacctcaacacacgcacgctcttcaccgaatacaaaatatacgcgaccgtaacaaccgtcacga

SEQ ID NO: 34303 - DNA, 542 bp, Artificial Sequence
  chemically treated genomic DNA (Homo sapiens) CpG-island No: 34303
ttttacgtgttgttttatgaagaatttaaaggcgtatggcgagtagtttttgatgcgtgattttttttttttttcgtttttgttgtttttgcggacgggaacgggagaggtttgaatttgttttttatttttttcgtttttgttttttttggcgtttttgcggtttttgtcgtcgttttcgggttcgttggggttcgtacggaggttttgttttatgtttgcgtataggttgtttaggtcgtattgtttcgatttgttgcgtagtagtaggtgtttcgggtagggcggaggcgggtattttcggtttgggttttcgtattttacgtttagcgggaaggcgtttgcgtcgtttagcgttagggtatgtttttttttggcgtttaagtttttcgtagtcggggcgggggcgggggcgggggtcggggtaggcgcgggtatttaggcggggtgcgagggttttatagtcgtttgcggtttcggttttagtatacgtacgttttttatcgggtgtaagatgtgcgcggtcgtgatagtcgttacgg

SEQ ID NO: 34304 - DNA, 542 bp, Artificial Sequence
  chemically treated genomic DNA (Homo sapiens) CpG-island No: 34304
ccgtaacgactatcacgaccgcgcacatcttacacccgataaaaaacgtacgtatactaaaaccgaaaccgcaaacgactataaaaccctcgcaccccgcctaaatacccgcgcctaccccgacccccgcccccgcccccgccccgactacgaaaaacttaaacgccaaaaaaaaacataccctaacgctaaacgacgcaaacgccttcccgctaaacgtaaaatacgaaaacccaaaccgaaaatacccgcctccgccctacccgaaacacctactactacgcaacaaatcgaaacaatacgacctaaacaacctatacgcaaacataaaacaaaacctccgtacgaaccccaacgaacccgaaaacgacgacaaaaaccgcaaaaacgccaaaaaaaacaaaaacgaaaaaaataaaaaacaaattcaaacctctcccgttcccgtccgcaaaaacaacaaaaacgaaaaaaaaaaaaaatcacgcatcaaaaactactcgccatacgcctttaaattcttcataaaacaacacgtaaaa

SEQ ID NO: 34305 - DNA, 719 bp, Artificial Sequence
  chemically treated genomic DNA (Homo sapiens) CpG-island No: 34305
ttatttatttgtcgtttcgatgattatggggatcgtttgttaatatttttatatataagtagacgtacgtattttgggagtttacggttttcgtcgggagggtatttgtagttaagtcgttaggtagttcgttattggttttcgtgattcgatttttatagtggggtgatttttttgtggggtaggcgtttcggggtttacgagttcgaggagtttcgggagcgttagtgttcgaacgtgttggtaggtttttggtttttttcgagcgaatttatttcggttttgatttacggtttcggttttttggatcggagtaggtatgggtgagagagggaagcgtatatttttcggtcggagtcgtagatttcgttcgtttttttacgttttttagttaaggtagttattttttcggtttttatttaggtggtttcgagcgatttttttttttttggtttatcggatagggatttcgttttcgaattttgagttattttggagtggtttcggtataagtcgcggttttatttgggacggggattcgtttagagtttttttgaggtttttttcggttggagagagggcgtttgcgataggggagtgtacggcgggatttagcgtcgttttcgtttgtgtttaggtttttaaagtgcgcggtgcggggaagacggaggcgggagtcgtttcgagatttttagggggttagttttgtatttgggtag

SEQ ID NO: 34306 - DNA, 719 bp, Artificial Sequence
  chemically treated genomic DNA (Homo sapiens) CpG-island No: 34306
ctacccaaatacaaaactaaccccctaaaaatctcgaaacgactcccgcctccgtcttccccgcaccgcgcactttaaaaacctaaacacaaacgaaaacgacgctaaatcccgccgtacactcccctatcgcaaacgccctctctccaaccgaaaaaaacctcaaaaaaactctaaacgaatccccgtcccaaataaaaccgcgacttataccgaaaccactccaaaataactcaaaattcgaaaacgaaatccctatccgataaaccaaaaaaaaaaaaatcgctcgaaaccacctaaataaaaaccgaaaaaataactaccttaactaaaaaacgtaaaaaaacgaacgaaatctacgactccgaccgaaaaatatacgcttccctctctcacccatacctactccgatccaaaaaaccgaaaccgtaaatcaaaaccgaaataaattcgctcgaaaaaaaccaaaaacctaccaacacgttcgaacactaacgctcccgaaactcctcgaactcgtaaaccccgaaacgcctaccccacaaaaaaatcaccccactataaaaatcgaatcacgaaaaccaataacgaactacctaacgacttaactacaaataccctcccgacgaaaaccgtaaactcccaaaatacgtacgtctacttatatataaaaatattaacaaacgatccccataatcatcgaaacgacaaataaataa

SEQ ID NO: 34307 - DNA, 719 bp, Artificial Sequence
  chemically treated genomic DNA (Homo sapiens) CpG-island No: 34307
ttgtttaggtgtaggattggttttttgggggtttcgggacggttttcgttttcgtttttttcgtatcgcgtattttggaggtttgggtataggcggaggcggcgttgggtttcgtcgtatatttttttgtcgtaggcgttttttttttagtcggagggaattttaaaaaagttttgagcgagttttcgttttaggtggggtcgcggtttatatcgggattattttagggtagtttaaggttcgaaaacggaatttttgttcggtgaattagagaagagaaaatcgttcggggttatttgggtagagatcggaggagtgattgttttgattgggaggcgtggaggagcgagcggggtttgcggtttcggtcgggaggtatgcgttttttttttttatttatgtttgtttcggtttaaagagtcgagatcgtgggttaagatcgggatggattcgttcgggagaggttaggagtttgttagtacgttcgggtattagcgttttcggggtttttcggattcgtggatttcgaaacgtttgttttataggaagattattttattgtagaagtcgggttacggggattagtggcgagttatttgacggtttaattatagatattttttcgacgaaagtcgtggatttttagggtgcgtgcgtttgtttgtgtgtgggggtgttggtaggcggtttttataattatcgaagcgataggtggatga

SEQ ID NO: 34308 - DNA, 719 bp, Artificial Sequence
  chemically treated genomic DNA (Homo sapiens) CpG-island No: 34308
tcatccacctatcgcttcgataattataaaaaccgcctaccaacacccccacacacaaacaaacgcacgcaccctaaaaatccacgactttcgtcgaaaaaatatctataattaaaccgtcaaataactcgccactaatccccgtaacccgacttctacaataaaataatcttcctataaaacaaacgtttcgaaatccacgaatccgaaaaaccccgaaaacgctaatacccgaacgtactaacaaactcctaacctctcccgaacgaatccatcccgatcttaacccacgatctcgactctttaaaccgaaacaaacataaataaaaaaaaaaaacgcatacctcccgaccgaaaccgcaaaccccgctcgctcctccacgcctcccaatcaaaacaatcactcctccgatctctacccaaataaccccgaacgattttctcttctctaattcaccgaacaaaaattccgttttcgaaccttaaactaccctaaaataatcccgatataaaccgcgaccccacctaaaacgaaaactcgctcaaaacttttttaaaattccctccgactaaaaaaaaaacgcctacgacaaaaaaatatacgacgaaacccaacgccgcctccgcctatacccaaacctccaaaatacgcgatacgaaaaaaacgaaaacgaaaaccgtcccgaaacccccaaaaaaccaatcctacacctaaacaa

SEQ ID NO: 34309 - DNA, 700 bp, Artificial Sequence
  chemically treated genomic DNA (Homo sapiens) CpG-island No: 34309
tttgggtgcgcggagagcgcgtatggcggttgtgggatcgcggatcggtttcggaatcggcgtcgaggttttagcgttggcggtagagttgtagggcgaggcgacgtgttttatttgtttagagttttttcgtgagtcggtgttcgtcgagtgcggttatagtttttgtcgcgtttgtatagggcgttgttgggagcgttcgggcgcggggtttgttggggtcgttattcgcgcgtttttttttttattgttttgttcgtagtgtcgcgagttcgcgcgttttagttagttgcggtttaatcggtagttggcggcggtggttacgtttttgcggcgttttagtttgttcgcggtcgtttcgggagagtacgggttttaggcggtcgcggttcgggtagcggttgttcgttgcgggtagtatggcgaattttttaagttttattgttaggacgacggacgcgttatttgcgtggtgtgcgatcgcgttcgcgagtatcgcgagtacgtcgtgttgtcgttggacgaggcggtgtaggaggttaaggtgagcgtagtttttatttatttcgtgggttttcgggattttcgatttggtttcgcgttttcgcgtacggggtgtagagaatagtttgtcgattaggaggttcgggtgagttttttttttttttttttattttaggaagtttagcgttggttttcg

SEQ ID NO: 34310 - DNA, 700 bp, Artificial Sequence
  chemically treated genomic DNA (Homo sapiens) CpG-island No: 34310
cgaaaaccaacgctaaacttcctaaaataaaaaaaaaaaaaaaaaactcacccgaacctcctaatcgacaaactattctctacaccccgtacgcgaaaacgcgaaaccaaatcgaaaatcccgaaaacccacgaaataaataaaaactacgctcaccttaacctcctacaccgcctcgtccaacgacaacacgacgtactcgcgatactcgcgaacgcgatcgcacaccacgcaaataacgcgtccgtcgtcctaacaataaaacttaaaaaattcgccatactacccgcaacgaacaaccgctacccgaaccgcgaccgcctaaaacccgtactctcccgaaacgaccgcgaacaaactaaaacgccgcaaaaacgtaaccaccgccgccaactaccgattaaaccgcaactaactaaaacgcgcgaactcgcgacactacgaacaaaacaataaaaaaaaaaacgcgcgaataacgaccccaacaaaccccgcgcccgaacgctcccaacaacgccctatacaaacgcgacaaaaactataaccgcactcgacgaacaccgactcacgaaaaaactctaaacaaataaaacacgtcgcctcgccctacaactctaccgccaacgctaaaacctcgacgccgattccgaaaccgatccgcgatcccacaaccgccatacgcgctctccgcgcacccaaa

SEQ ID NO: 34311 - DNA, 700 bp, Artificial Sequence
  chemically treated genomic DNA (Homo sapiens) CpG-island No: 34311
cgggaattagcgttgggttttttggaatggagaaagaagggaggggtttattcgggttttttgatcgataggttgttttttgtatttcgtgcgcgggagcgcgggattaagtcgggggtttcggggatttacggggtgggtgggggttgcgtttattttggttttttgtatcgtttcgtttagcggtagtacggcgtgttcgcggtgttcgcgggcgcggtcgtatattacgtagatggcgcgttcgtcgttttggtagtagagtttgaagggttcgttatgttgttcgtagcgggtagtcgttgttcgggtcgcggtcgtttgagattcgtgttttttcggggcggtcgcgggtaggttgaagcgtcgtaggagcgtggttatcgtcgttagttgtcggttgggtcgtagttgattggggcgcgcgggttcgcggtattgcggatagggtagtgggaaggagggcgcgcgggtggcggttttaatagatttcgcgttcgggcgtttttagtagcgttttatgtaggcgcggtagaagttgtggtcgtattcgacggatatcggtttacgaaagagttttaggtagatggagtacgtcgtttcgttttgtagttttgtcgttagcgttagagtttcggcgtcggtttcggggtcggttcgcggttttatagtcgttatgcgcgtttttcgcgtatttaga

SEQ ID NO: 34312 - DNA, 700 bp, Artificial Sequence
  chemically treated genomic DNA (Homo sapiens) CpG-island No: 34312
tctaaatacgcgaaaaacgcgcataacgactataaaaccgcgaaccgaccccgaaaccgacgccgaaactctaacgctaacgacaaaactacaaaacgaaacgacgtactccatctacctaaaactctttcgtaaaccgatatccgtcgaatacgaccacaacttctaccgcgcctacataaaacgctactaaaaacgcccgaacgcgaaatctattaaaaccgccacccgcgcgccctccttcccactaccctatccgcaataccgcgaacccgcgcgccccaatcaactacgacccaaccgacaactaacgacgataaccacgctcctacgacgcttcaacctacccgcgaccgccccgaaaaaacacgaatctcaaacgaccgcgacccgaacaacgactacccgctacgaacaacataacgaacccttcaaactctactaccaaaacgacgaacgcgccatctacgtaatatacgaccgcgcccgcgaacaccgcgaacacgccgtactaccgctaaacgaaacgatacaaaaaaccaaaataaacgcaacccccacccaccccgtaaatccccgaaacccccgacttaatcccgcgctcccgcgcacgaaatacaaaaaacaacctatcgatcaaaaaacccgaataaacccctcccttctttctccattccaaaaaacccaacgctaattcccg

SEQ ID NO: 34313 - DNA, 727 bp, Artificial Sequence
  chemically treated genomic DNA (Homo sapiens) CpG-island No: 34313
gggtcgttagtcgttattttttgtttttttttgtttgcggtgcgttgggatattttcgaggcggtttagcgttcgcggtttttagcgcgggcggggtcgcggtagaggtttttaaatcggttgtatagaaatagcgttattttttattgttcgcggggttatttgtgtgtgttttttttttaaaaataaaggcggggcgggggcggaagtgttttaaaagaaggcgggtcgaagcgaggtgcggttttttgtcgtcgcggaggggcgggggtaggacgcgtaatttcggtcggagttgttcggggtcgtgagtcggtttcgttttggtggcggcgttttttcgcggtttagaggtagacgtatcgggtgggttcgggtttttagttcggtcgggaggagggatcgggtttgcggagcggggattcggggtttcggcggggcgcgtatacgtaggcggggcggttcggggtgcggggtttttgcgcggttgattaggtttttagagcgttagcgtcgtttatggtcgagtcgttttagttagatttcggggcggtcgaggacgcggcggtttaagttgtggagacgtcgggttggaaggtttcggaggacgtcggtttttaggtaggcgtcgattcgggagcggaggggttgggttcgtttttcggttgatttgtagtgaggttagtaggttttatagagttaagtaaaaagtatagttttttaaatg

SEQ ID NO: 34314 - DNA, 727 bp, Artificial Sequence
  chemically treated genomic DNA (Homo sapiens) CpG-island No: 34314
catttaaaaaactatactttttacttaactctataaaacctactaacctcactacaaatcaaccgaaaaacgaacccaacccctccgctcccgaatcgacgcctacctaaaaaccgacgtcctccgaaaccttccaacccgacgtctccacaacttaaaccgccgcgtcctcgaccgccccgaaatctaactaaaacgactcgaccataaacgacgctaacgctctaaaaacctaatcaaccgcgcaaaaaccccgcaccccgaaccgccccgcctacgtatacgcgccccgccgaaaccccgaatccccgctccgcaaacccgatccctcctcccgaccgaactaaaaacccgaacccacccgatacgtctacctctaaaccgcgaaaaaacgccgccaccaaaacgaaaccgactcacgaccccgaacaactccgaccgaaattacgcgtcctacccccgcccctccgcgacgacaaaaaaccgcacctcgcttcgacccgccttcttttaaaacacttccgcccccgccccgcctttatttttaaaaaaaaaacacacacaaataaccccgcgaacaataaaaaataacgctatttctatacaaccgatttaaaaacctctaccgcgaccccgcccgcgctaaaaaccgcgaacgctaaaccgcctcgaaaatatcccaacgcaccgcaaacaaaaaaaaacaaaaaataacgactaacgaccc

SEQ ID NO: 34315 - DNA, 727 bp, Artificial Sequence
  chemically treated genomic DNA (Homo sapiens) CpG-island No: 34315
tatttaaaaaattgtattttttatttaattttatgggatttgttggttttattgtaaattagtcggaaggcgggtttagttttttcgttttcgagtcggcgtttatttgggggtcggcgtttttcggggttttttagttcggcgtttttatagtttgggtcgtcgcgttttcggtcgtttcggggtttggttggagcggttcggttatgggcggcgttgacgttttgggagtttggttagtcgcgtagaggtttcgtatttcgggtcgtttcgtttgcgtgtgcgcgtttcgtcgaggtttcgagttttcgtttcgtagattcggttttttttttcggtcgggttggagattcgagtttattcgatgcgtttgtttttggatcgcgagggggcgtcgttattaaggcggggtcggtttacgatttcggatagtttcggtcggagttgcgcgttttgttttcgttttttcgcggcgatagggagtcgtatttcgtttcggttcgtttttttttgaggtattttcgttttcgtttcgtttttgtttttgaaggaaaggtatatataggtggtttcgcgggtagtagggggtggcgttgtttttgtgtaatcggtttgggaatttttgtcgcggtttcgttcgcgttgggaatcgcgggcgttgagtcgtttcgagggtgttttagcgtatcgtaggtagagaaaggtaggaggtggcggttggcgattt

SEQ ID NO: 34316 - DNA, 727 bp, Artificial Sequence
  chemically treated genomic DNA (Homo sapiens) CpG-island No: 34316
aaatcgccaaccgccacctcctacctttctctacctacgatacgctaaaacaccctcgaaacgactcaacgcccgcgattcccaacgcgaacgaaaccgcgacaaaaattcccaaaccgattacacaaaaacaacgccaccccctactacccgcgaaaccacctatatatacctttccttcaaaaacaaaaacgaaacgaaaacgaaaatacctcaaaaaaaaacgaaccgaaacgaaatacgactccctatcgccgcgaaaaaacgaaaacaaaacgcgcaactccgaccgaaactatccgaaatcgtaaaccgaccccgccttaataacgacgccccctcgcgatccaaaaacaaacgcatcgaataaactcgaatctccaacccgaccgaaaaaaaaaaccgaatctacgaaacgaaaactcgaaacctcgacgaaacgcgcacacgcaaacgaaacgacccgaaatacgaaacctctacgcgactaaccaaactcccaaaacgtcaacgccgcccataaccgaaccgctccaaccaaaccccgaaacgaccgaaaacgcgacgacccaaactataaaaacgccgaactaaaaaaccccgaaaaacgccgacccccaaataaacgccgactcgaaaacgaaaaaactaaacccgccttccgactaatttacaataaaaccaacaaatcccataaaattaaataaaaaatacaattttttaaata

SEQ ID NO: 34317 - DNA, 604 bp, Artificial Sequence
  chemically treated genomic DNA (Homo sapiens) CpG-island No: 34317
gggggtcgcgggggatcgcggggacggggttttgtgatgtaggagacggagggggttggtgacggaggacgggaggtcgtaaggatgggggacgcgatatttttttttttttttatcggtttattagggatgcgttttcgcgattgttcgttttaattttagggcggaggtttcgcgtaaaatttaggcgtcgcggtttcgcgtttcggttgagggttcgcgtcgtcgttcgttcgttttttttcgttcggtcgcggttttagggacggatattttagcgcgcggttttaatcgaggttcgtggcgggtaaggtcgggaggttggggcgggtacggggtcgggagcgaggggcggcgcggggaggggatgtagttgtcgttcgtatagtcgtgtttggacgcggtttcgtaattcgatttcgtttcgtttttagttagttgttgaattaggcggtcggggacggtattgagcgttgggcgcgcgcgggagggattgtttttggggtacgggtttgttggggcggagttcgtacggtgttagtagtcgtttgtttttcgtagtattcgtaaggttcgtatttaggttttggttttaaaggtgggg

SEQ ID NO: 34318 - DNA, 604 bp, Artificial Sequence
  chemically treated genomic DNA (Homo sapiens) CpG-island No: 34318
ccccacctttaaaaccaaaacctaaatacgaaccttacgaatactacgaaaaacaaacgactactaacaccgtacgaactccgccccaacaaacccgtaccccaaaaacaatccctcccgcgcgcgcccaacgctcaataccgtccccgaccgcctaattcaacaactaactaaaaacgaaacgaaatcgaattacgaaaccgcgtccaaacacgactatacgaacgacaactacatcccctccccgcgccgcccctcgctcccgaccccgtacccgccccaacctcccgaccttacccgccacgaacctcgattaaaaccgcgcgctaaaatatccgtccctaaaaccgcgaccgaacgaaaaaaaacgaacgaacgacgacgcgaaccctcaaccgaaacgcgaaaccgcgacgcctaaattttacgcgaaacctccgccctaaaattaaaacgaacaatcgcgaaaacgcatccctaataaaccgataaaaaaaaaaaaaaatatcgcgtcccccatccttacgacctcccgtcctccgtcaccaaccccctccgtctcctacatcacaaaaccccgtccccgcgatcccccgcgaccccc

SEQ ID NO: 34319 - DNA, 604 bp, Artificial Sequence
  chemically treated genomic DNA (Homo sapiens) CpG-island No: 34319
ttttatttttggggttaaagtttgggtgcgggttttgcggatgttgcggaggataagcggttgttgatatcgtgcggatttcgttttagtagattcgtgttttagggatagtttttttcgcgcgcgtttagcgtttaatgtcgttttcggtcgtttagtttagtagttggttgggggcgggacggggtcgagttgcggggtcgcgtttagatacggttgtgcgggcgatagttgtatttttttttcgcgtcgtttttcgttttcggtttcgtattcgttttagtttttcggttttattcgttacgggtttcggttggaatcgcgcgttggagtattcgtttttgaggtcgcggtcgagcgggaaggagcgggcgggcggcggcgcggatttttagtcggagcgcggagtcgcggcgtttgggttttgcgcgaggttttcgttttgggattggggcgggtagtcgcggaggcgtatttttggtgagtcggtgggaggggaaaaggatgtcgcgttttttatttttgcggtttttcgtttttcgttattagtttttttcgttttttgtattataaggtttcgttttcgcggtttttcgcgattttt

SEQ ID NO: 34320 - DNA, 604 bp, Artificial Sequence
  chemically treated genomic DNA (Homo sapiens) CpG-island No: 34320
aaaaatcgcgaaaaaccgcgaaaacgaaaccttataatacaaaaaacgaaaaaaactaataacgaaaaacgaaaaaccgcaaaaataaaaaacgcgacatccttttcccctcccaccgactcaccaaaaatacgcctccgcgactacccgccccaatcccaaaacgaaaacctcgcgcaaaacccaaacgccgcgactccgcgctccgactaaaaatccgcgccgccgcccgcccgctccttcccgctcgaccgcgacctcaaaaacgaatactccaacgcgcgattccaaccgaaacccgtaacgaataaaaccgaaaaactaaaacgaatacgaaaccgaaaacgaaaaacgacgcgaaaaaaaaatacaactatcgcccgcacaaccgtatctaaacgcgaccccgcaactcgaccccgtcccgcccccaaccaactactaaactaaacgaccgaaaacgacattaaacgctaaacgcgcgcgaaaaaaactatccctaaaacacgaatctactaaaacgaaatccgcacgatatcaacaaccgcttatcctccgcaacatccgcaaaacccgcacccaaactttaaccccaaaaataaaa

SEQ ID NO: 34321 - DNA, 516 bp, Artificial Sequence
  chemically treated genomic DNA (Homo sapiens) CpG-island No: 34321
atggcgtgtggggtcgcgttttggacgatgtttgggatttgcgcggcgcgggcgtggtgtgtcggtaattcgggtgtagaggggtttagtaagtttatgacgtatttgtttttagtcgcggattcgtttaggtggcgttgagtcgcgtgcgttgtttgggtatcgaaattcgtttgatttagtgtaacgtgttcgcgattttgtaggagttcgcggggatttcgcgggacgtcggcgtggtgtgtttcggtgaggtcggaatcgcgttttttatggttcgtcgttacgggatttcgggcgttttgattttgtttttttatagggagttttagggtgcggttggtcgcggggtcggggcgttgtacgggggcgcgtggggtatcgtgtgtgacgatgtttgggatttgcgggacgcgtacgtggtttgtaggtagttgggttgtggtcgcgttttgagcgttttgggggtcgtatatttcggagtcggggtagggcgtatttggttggacgagttgg

SEQ ID NO: 34322 - DNA, 516 bp, Artificial Sequence
  chemically treated genomic DNA (Homo sapiens) CpG-island No: 34322
ccaactcgtccaaccaaatacgccctaccccgactccgaaatatacgacccccaaaacgctcaaaacgcgaccacaacccaactacctacaaaccacgtacgcgtcccgcaaatcccaaacatcgtcacacacgataccccacgcgcccccgtacaacgccccgaccccgcgaccaaccgcaccctaaaactccctataaaaaaacaaaatcaaaacgcccgaaatcccgtaacgacgaaccataaaaaacgcgattccgacctcaccgaaacacaccacgccgacgtcccgcgaaatccccgcgaactcctacaaaatcgcgaacacgttacactaaatcaaacgaatttcgatacccaaacaacgcacgcgactcaacgccacctaaacgaatccgcgactaaaaacaaatacgtcataaacttactaaacccctctacacccgaattaccgacacaccacgcccgcgccgcgcaaatcccaaacatcgtccaaaacgcgaccccacacgccat

SEQ ID NO: 34323 - DNA, 516 bp, Artificial Sequence
  chemically treated genomic DNA (Homo sapiens) CpG-island No: 34323
ttagttcgtttagttagatgcgttttgtttcggtttcgaagtgtgcggtttttagggcgtttagggcgcggttatagtttagttgtttgtagattacgtgcgcgtttcgtaggttttaggtatcgttatatacggtgttttacgcgttttcgtgtagcgtttcggtttcgcggttagtcgtattttgaggttttttgtggagagatagagttagggcgttcgggatttcgtggcgacgggttatgggggacgcggtttcgattttatcggagtatattacgtcggcgtttcgcgaggttttcgcgggtttttgtagggtcgcggatacgttgtattgagttaggcgggtttcggtgtttagatagcgtacgcggtttagcgttatttggacggattcgcggttgggggtaggtgcgttataggtttgttgggtttttttgtattcgagttgtcggtatattacgttcgcgtcgcgtaggttttaggtatcgtttaggacgcggttttatacgttat

SEQ ID NO: 34324 - DNA, 516 bp, Artificial Sequence
  chemically treated genomic DNA (Homo sapiens) CpG-island No: 34324
ataacgtataaaaccgcgtcctaaacgatacctaaaacctacgcgacgcgaacgtaatataccgacaactcgaatacaaaaaaacccaacaaacctataacgcacctacccccaaccgcgaatccgtccaaataacgctaaaccgcgtacgctatctaaacaccgaaacccgcctaactcaatacaacgtatccgcgaccctacaaaaacccgcgaaaacctcgcgaaacgccgacgtaatatactccgataaaatcgaaaccgcgtcccccataacccgtcgccacgaaatcccgaacgccctaactctatctctccacaaaaaacctcaaaatacgactaaccgcgaaaccgaaacgctacacgaaaacgcgtaaaacaccgtatataacgatacctaaaacctacgaaacgcgcacgtaatctacaaacaactaaactataaccgcgccctaaacgccctaaaaaccgcacacttcgaaaccgaaacaaaacgcatctaactaaacgaactaa

SEQ ID NO: 34325 - DNA, 563 bp, Artificial Sequence
  chemically treated genomic DNA (Homo sapiens) CpG-island No: 34325
cgcgtttgcgtaatgtatttttgcgcgcgtttggagatgtgaggtaatttttcggtaggtttgcgtggtattagtgcgtatgcgtaaaggcgcgagggttataaacgcggcgggaagttcgttagggttacgtgcggtcgtttaggtttgcgattggttcgttgtcgggtgttttcgcgtatgtgcgttggttttcgaggggatcggttttggttttggaggttttttttattaacgagtagtacgtatgtgtagcgtcgaagttttttgtgaagtgtgcgtgtttgacggatgacgattttataaggcgttgtggttttggtagttttatgaggttgcggttttgcgggattatatcgtcgcgggagtgtacgggttttagcgagtgaaatttgcggtagttttcgttgggttcgttgtttttgcgcgcgtagaggagcgtagtttgtttttaggtcgcgttttcgtgagttttatgtttatagtggtcgaggtcggttataagtttacggttttttttgtacggtttttgtcgcgttggggttatcgtggaggttcggagg

SEQ ID NO: 34326 - DNA, 563 bp, Artificial Sequence
  chemically treated genomic DNA (Homo sapiens) CpG-island No: 34326
cctccgaacctccacgataaccccaacgcgacaaaaaccgtacaaaaaaaaccgtaaacttataaccgacctcgaccactataaacataaaactcacgaaaacgcgacctaaaaacaaactacgctcctctacgcgcgcaaaaacaacgaacccaacgaaaactaccgcaaatttcactcgctaaaacccgtacactcccgcgacgatataatcccgcaaaaccgcaacctcataaaactaccaaaaccacaacgccttataaaatcgtcatccgtcaaacacgcacacttcacaaaaaacttcgacgctacacatacgtactactcgttaataaaaaaaacctccaaaaccaaaaccgatcccctcgaaaaccaacgcacatacgcgaaaacacccgacaacgaaccaatcgcaaacctaaacgaccgcacgtaaccctaacgaacttcccgccgcgtttataaccctcgcgcctttacgcatacgcactaataccacgcaaacctaccgaaaaattacctcacatctccaaacgcgcgcaaaaatacattacgcaaacgcg

SEQ ID NO: 34327 - DNA, 563 bp, Artificial Sequence
  chemically treated genomic DNA (Homo sapiens) CpG-island No: 34327
ttttcgggtttttacggtggttttagcgcggtagggatcgtgtagaagggatcgtgggtttgtggtcggtttcggttattgtgggtatggagtttacgggaacgcggtttaggggtaggttacgtttttttgcgcgcgtaggaatagcgggtttagcgggggttgtcgtagattttattcgttggggttcgtgtattttcgcggcggtgtggtttcgtagagtcgtaattttatgaggttgttagggttatagcgttttgtggagtcgttattcgttagatacgtatattttataggaagtttcggcgttatatatgcgtattgttcgttggtggggagggtttttagaattagggtcggttttttcggaagttagcgtatatgcgcgggggtattcggtagcgggttaatcgtaagtttggacggtcgtacgtggttttggcgggtttttcgtcgcgtttgtagttttcgcgtttttacgtatgcgtattagtgttacgtaggtttgtcggagaattattttatatttttaggcgcgcgtaggagtgtattgcgtaggcgcg

SEQ ID NO: 34328 - DNA, 563 bp, Artificial Sequence
  chemically treated genomic DNA (Homo sapiens) CpG-island No: 34328
cgcgcctacgcaatacactcctacgcgcgcctaaaaatataaaataattctccgacaaacctacgtaacactaatacgcatacgtaaaaacgcgaaaactacaaacgcgacgaaaaacccgccaaaaccacgtacgaccgtccaaacttacgattaacccgctaccgaatacccccgcgcatatacgctaacttccgaaaaaaccgaccctaattctaaaaaccctccccaccaacgaacaatacgcatatataacgccgaaacttcctataaaatatacgtatctaacgaataacgactccacaaaacgctataaccctaacaacctcataaaattacgactctacgaaaccacaccgccgcgaaaatacacgaaccccaacgaataaaatctacgacaacccccgctaaacccgctattcctacgcgcgcaaaaaaacgtaacctacccctaaaccgcgttcccgtaaactccatacccacaataaccgaaaccgaccacaaacccacgatcccttctacacgatccctaccgcgctaaaaccaccgtaaaaacccgaaaa

SEQ ID NO: 34329 - DNA, 571 bp, Artificial Sequence
  chemically treated genomic DNA (Homo sapiens) CpG-island No: 34329
ggtcgcggacggcgttttttttagggtcggtcgttagagggcgagcgcgttttttcgggcggggcggggacgggacggggacggggaggggacgggacggggacggggaggggacggggatacggatacgggaggttttcgttcgttcgcgggtggcgtttttgtttttattagagcgggttaggtttttgggtttcgttttttaagtatatagggagggtggtcgcgggttaggggcggtcgcgagattttacgtttacgtttcgggtagttttttcggaggttgggtcgcgcggttcggggagcggagcgttgcgtttttttgcgagtatttcggggtttttaggcgttttcgttttttcgttagtggggggcgcggtgtcgttttttcgcgggttaaattgttgaggaaggggcgagtttttgcggtttttgtttgtttcggttacgttttattttcgtttcgtcgcgttgcgcgttttcgcggggtttcgggtatttttggggtttcggggatttttgacgtttttttttttttaattttcgttgcgattttataggtggggtgaat

SEQ ID NO: 34330 - DNA, 571 bp, Artificial Sequence
  chemically treated genomic DNA (Homo sapiens) CpG-island No: 34330
attcaccccacctataaaatcgcaacgaaaattaaaaaaaaaaaaacgtcaaaaatccccgaaaccccaaaaatacccgaaaccccgcgaaaacgcgcaacgcgacgaaacgaaaataaaacgtaaccgaaacaaacaaaaaccgcaaaaactcgccccttcctcaacaatttaacccgcgaaaaaacgacaccgcgccccccactaacgaaaaaacgaaaacgcctaaaaaccccgaaatactcgcaaaaaaacgcaacgctccgctccccgaaccgcgcgacccaacctccgaaaaaactacccgaaacgtaaacgtaaaatctcgcgaccgcccctaacccgcgaccaccctccctatatacttaaaaaacgaaacccaaaaacctaacccgctctaataaaaacaaaaacgccacccgcgaacgaacgaaaacctcccgtatccgtatccccgtcccctccccgtccccgtcccgtcccctccccgtccccgtcccgtccccgccccgcccgaaaaaacgcgctcgccctctaacgaccgaccctaaaaaaaacgccgtccgcgacc

SEQ ID NO: 34331 - DNA, 571 bp, Artificial Sequence
  chemically treated genomic DNA (Homo sapiens) CpG-island No: 34331
gtttattttatttgtgggatcgtagcgggggttggagggaagggggcgttagagattttcggggttttaggggtgttcggggtttcgcgggaacgcgtaacgcggcggggcggaggtggggcgtggtcgggataggtaggggtcgtaggaattcgttttttttttagtagtttagttcgcggagaagcggtatcgcgttttttattgacgaggaaacgggggcgtttaaaggtttcggggtgttcgtagagaagcgtagcgtttcgtttttcgggtcgcgcggtttaattttcggagggattgttcgggacgtggacgtggagtttcgcggtcgtttttggttcgcggttattttttttgtgtgtttgagaaacggaatttagaggtttggttcgttttagtgggagtagagacgttattcgcgggcgagcggaagtttttcgtgttcgtgttttcgtttttttttcgttttcgtttcgtttttttttcgttttcgtttcgttttcgtttcgttcgggaaggcgcgttcgttttttggcggtcggttttggaagggacgtcgttcgcggtt

SEQ ID NO: 34332 - DNA, 571 bp, Artificial Sequence
  chemically treated genomic DNA (Homo sapiens) CpG-island No: 34332
aaccgcgaacgacgtcccttccaaaaccgaccgccaaaaaacgaacgcgccttcccgaacgaaacgaaaacgaaacgaaaacgaaaaaaaaacgaaacgaaaacgaaaaaaaaacgaaaacacgaacacgaaaaacttccgctcgcccgcgaataacgtctctactcccactaaaacgaaccaaacctctaaattccgtttctcaaacacacaaaaaaaataaccgcgaaccaaaaacgaccgcgaaactccacgtccacgtcccgaacaatccctccgaaaattaaaccgcgcgacccgaaaaacgaaacgctacgcttctctacgaacaccccgaaacctttaaacgcccccgtttcctcgtcaataaaaaacgcgataccgcttctccgcgaactaaactactaaaaaaaaaacgaattcctacgacccctacctatcccgaccacgccccacctccgccccgccgcgttacgcgttcccgcgaaaccccgaacacccctaaaaccccgaaaatctctaacgcccccttccctccaacccccgctacgatcccacaaataaaataaac

SEQ ID NO: 34333 - DNA, 675 bp, Artificial Sequence
  chemically treated genomic DNA (Homo sapiens) CpG-island No: 34333
tatcgttacgttatatcgagagaagcggagacgatatttttattcggtgggggcgggggcgaggtttttttagcgcggattcgggttcggggagtgtagggcgtattttttttgtgggtttttaagcgaaggtatagttcgggggtcggggtggagggcgcgttttagtaggtcgggcgtacgggtatttgtaggaggattatttgtttgttttcggatgggtggtatttgttgatgtgtcgcgtaaggtcgggcgagttgtagaaggtggtcgggtagtatttgtaggggaatatttgggcggcgtgtagtaggcgtaggtggcgtttttgagcgtttttgttggcgaacgatttttcgtatattgggtataggtggtattcggcggacgtatttaggtttagtacgtcggttttttcgtcgtcgtcggtcgttttttggggcgttttttcgtcgggttcggggtataaggttagtaggttttcggtcgggggcgttagcggcgcgtttttggtttgtagcgtttggtggtgcgttagtaggtgtttgcgtaggtaggtttgaaagaaaattttagtggtttagtgatggtattcgtttagttcgttttcggagttcgattcggatacgtcgacggggttcggcgtgtttcggtcgttgtcgtcgtcgggtgtt

SEQ ID NO: 34334 - DNA, 675 bp, Artificial Sequence
  chemically treated genomic DNA (Homo sapiens) CpG-island No: 34334
aacacccgacgacgacaacgaccgaaacacgccgaaccccgtcgacgtatccgaatcgaactccgaaaacgaactaaacgaataccatcactaaaccactaaaattttctttcaaacctacctacgcaaacacctactaacgcaccaccaaacgctacaaaccaaaaacgcgccgctaacgcccccgaccgaaaacctactaaccttataccccgaacccgacgaaaaaacgccccaaaaaacgaccgacgacgacgaaaaaaccgacgtactaaacctaaatacgtccgccgaataccacctatacccaatatacgaaaaatcgttcgccaacaaaaacgctcaaaaacgccacctacgcctactacacgccgcccaaatattcccctacaaatactacccgaccaccttctacaactcgcccgaccttacgcgacacatcaacaaataccacccatccgaaaacaaacaaataatcctcctacaaatacccgtacgcccgacctactaaaacgcgccctccaccccgacccccgaactataccttcgcttaaaaacccacaaaaaaaatacgccctacactccccgaacccgaatccgcgctaaaaaaacctcgcccccgcccccaccgaataaaaatatcgtctccgcttctctcgatataacgtaacgata

SEQ ID NO: 34335 - DNA, 675 bp, Artificial Sequence
  chemically treated genomic DNA (Homo sapiens) CpG-island No: 34335
ggtattcggcggcggtagcgatcgggatacgtcgagtttcgtcggcgtgttcgagtcgggtttcgaggacgggttaaacgagtgttattattgagttattaaagtttttttttaggtttatttacgtaagtatttgttggcgtattattaggcgttgtaggttaagggcgcgtcgttagcgttttcggtcgaggatttattggttttgtatttcgggttcgacgagaaggcgttttaggaggcggtcggcgacggcgagggggtcggcgtgttgggtttgagtgcgttcgtcgagtgttatttgtgtttagtgtgcggagagtcgttcgttagtaagggcgtttaggagcgttatttgcgtttgttgtacgtcgtttaggtgtttttttgtaagtattgttcggttattttttatagttcgttcggttttacgcggtatattaataagtgttatttattcgaaaatagataggtgatttttttgtaggtgttcgtgcgttcggtttgttagagcgcgttttttatttcggttttcgaattgtgttttcgtttggagatttataaagagagtgcgttttgtatttttcgaattcgagttcgcgttgggggagtttcgttttcgtttttatcgggtgaaagtgtcgttttcgtttttttcggtgtggcgtgacggta

SEQ ID NO: 34336 - DNA, 675 bp, Artificial Sequence
  chemically treated genomic DNA (Homo sapiens) CpG-island No: 34336
taccgtcacgccacaccgaaaaaaacgaaaacgacactttcacccgataaaaacgaaaacgaaactcccccaacgcgaactcgaattcgaaaaatacaaaacgcactctctttataaatctccaaacgaaaacacaattcgaaaaccgaaataaaaaacgcgctctaacaaaccgaacgcacgaacacctacaaaaaaatcacctatctattttcgaataaataacacttattaatataccgcgtaaaaccgaacgaactataaaaaataaccgaacaatacttacaaaaaaacacctaaacgacgtacaacaaacgcaaataacgctcctaaacgcccttactaacgaacgactctccgcacactaaacacaaataacactcgacgaacgcactcaaacccaacacgccgaccccctcgccgtcgccgaccgcctcctaaaacgccttctcgtcgaacccgaaatacaaaaccaataaatcctcgaccgaaaacgctaacgacgcgcccttaacctacaacgcctaataatacgccaacaaatacttacgtaaataaacctaaaaaaaaactttaataactcaataataacactcgtttaacccgtcctcgaaacccgactcgaacacgccgacgaaactcgacgtatcccgatcgctaccgccgccgaatacc

SEQ ID NO: 34337 - DNA, 585 bp, Artificial Sequence
  chemically treated genomic DNA (Homo sapiens) CpG-island No: 34337
gggggtcgggattcgggggtcgttcggtaggtgcggtagatgtatttgatggcgcggggttttcgcgcgcgtttttggtcgtttcgttcggcgtcgtcgtttcgttcggtttaggtatacgttcggtttcgtttttttttacggtttgttgtttttttatggggaggcgtacgtgtttgggttttgtgtttttttttcggggggcgcggagtcgttaaatgggttcgtttattagcgcgataatgtacgtttttttttcgcgcggggattattcgcgggtcgttagtaaaatagtaataaaggagaagaatggttttaaatatgttaggagggtttaattcgcgagtcggagtcgagggggaagttgtgcgcgttgattgggtgggggcgggggcgcgtcggggcggtgcgggggagatcgttgcggaggcgtagtggtttcgcgtggtgtttgggaaataaataagaattcgagagagtagtagggttcggacggttttcgttcggattttggacggatgggtcgttggatttaagaggttaagtaaaagggtttttcggggttttaagtgtggatagggggtt

SEQ ID NO: 34338 - DNA, 585 bp, Artificial Sequence
  chemically treated genomic DNA (Homo sapiens) CpG-island No: 34338
aaccccctatccacacttaaaaccccgaaaaacccttttacttaacctcttaaatccaacgacccatccgtccaaaatccgaacgaaaaccgtccgaaccctactactctctcgaattcttatttatttcccaaacaccacgcgaaaccactacgcctccgcaacgatctcccccgcaccgccccgacgcgcccccgcccccacccaatcaacgcgcacaacttccccctcgactccgactcgcgaattaaaccctcctaacatatttaaaaccattcttctcctttattactattttactaacgacccgcgaataatccccgcgcgaaaaaaaaacgtacattatcgcgctaataaacgaacccatttaacgactccgcgccccccgaaaaaaaaacacaaaacccaaacacgtacgcctccccataaaaaaacaacaaaccgtaaaaaaaaacgaaaccgaacgtatacctaaaccgaacgaaacgacgacgccgaacgaaacgaccaaaaacgcgcgcgaaaaccccgcgccatcaaatacatctaccgcacctaccgaacgacccccgaatcccgaccccc

SEQ ID NO: 34339 - DNA, 585 bp, Artificial Sequence
  chemically treated genomic DNA (Homo sapiens) CpG-island No: 34339
ggttttttgtttatatttggaatttcggggaatttttttgtttggttttttgggtttagcggtttattcgtttaaggttcgggcggaggtcgttcggattttgttgttttttcggatttttgtttattttttaaatattacgcggagttattgcgttttcgtaacgatttttttcgtatcgtttcggcgcgttttcgtttttatttaattagcgcgtataatttttttttcggtttcggttcgcggattgaatttttttgatatatttggggttattttttttttttgttgttattttgttagcgattcgcgggtaattttcgcgcgggaggggggcgtgtattgtcgcgttgatggacgggtttatttggcggtttcgcgtttttcggaggagagatataaagtttaggtacgtgcgtttttttatagagaagtagtagatcgtgaagggaggcggggtcgggcgtgtgtttggatcgggcggggcggcggcgtcgggcggggcgattaggggcgcgcgcgggggtttcgcgttattaggtatatttgtcgtatttatcgggcgattttcgagtttcggttttt

SEQ ID NO: 34340 - DNA, 585 bp, Artificial Sequence
  chemically treated genomic DNA (Homo sapiens) CpG-island No: 34340
aaaaaccgaaactcgaaaatcgcccgataaatacgacaaatatacctaataacgcgaaacccccgcgcgcgcccctaatcgccccgcccgacgccgccgccccgcccgatccaaacacacgcccgaccccgcctcccttcacgatctactacttctctataaaaaaacgcacgtacctaaactttatatctctcctccgaaaaacgcgaaaccgccaaataaacccgtccatcaacgcgacaatacacgcccccctcccgcgcgaaaattacccgcgaatcgctaacaaaataacaacaaaaaaaaaaaataaccccaaatatatcaaaaaaattcaatccgcgaaccgaaaccgaaaaaaaaattatacgcgctaattaaataaaaacgaaaacgcgccgaaacgatacgaaaaaaatcgttacgaaaacgcaataactccgcgtaatatttaaaaaataaacaaaaatccgaaaaaacaacaaaatccgaacgacctccgcccgaaccttaaacgaataaaccgctaaacccaaaaaaccaaacaaaaaaattccccgaaattccaaatataaacaaaaaacc

SEQ ID NO: 34341 - DNA, 546 bp, Artificial Sequence
  chemically treated genomic DNA (Homo sapiens) CpG-island No: 34341
cgtggttttttcgaatttattttacgttttatatcgaagttatttgttttggtattggtggtaaatattggatgtatgggtttgttgtttgtaaagcgttcgtgttttgtgcgtttttttgtatatttgtacggttttgcggtcgtttcgagttgtttttgagttttttttgcgagcgcgtcgtcgagaggatgggttatttatgaagtatcgaatatcgagggttggtaagaggttttagttcggttgtttttcgcgagggcgttgtcggttttgtgggtttcgtcgttttggttgttttcggagcgggggtgaagggagtttttgtgggtagtcgcgttgtcggcgcggttatatggggttcgggcggcggggaagaatgcgttttttgtgtttcgtcggtttgcgtaggtttaggtttttgcgttgcgttgtcgttgtatttgtcgaattttttcgggggcgtgttttcgagtttatttcgtatatttttatatggaaggtttggggcgggggagttgtttttttttttgtttcgtttttttt

SEQ ID NO: 34342 - DNA, 546 bp, Artificial Sequence
  chemically treated genomic DNA (Homo sapiens) CpG-island No: 34342
aaaaaaaacgaaacaaaaaaaaaaacaactcccccgccccaaaccttccatataaaaatatacgaaataaactcgaaaacacgcccccgaaaaaattcgacaaatacaacgacaacgcaacgcaaaaacctaaacctacgcaaaccgacgaaacacaaaaaacgcattcttccccgccgcccgaaccccatataaccgcgccgacaacgcgactacccacaaaaactcccttcacccccgctccgaaaacaaccaaaacgacgaaacccacaaaaccgacaacgccctcgcgaaaaacaaccgaactaaaacctcttaccaaccctcgatattcgatacttcataaataacccatcctctcgacgacgcgctcgcaaaaaaaactcaaaaacaactcgaaacgaccgcaaaaccgtacaaatatacaaaaaaacgcacaaaacacgaacgctttacaaacaacaaacccatacatccaatatttaccaccaataccaaaacaaataacttcgatataaaacgtaaaataaattcgaaaaaaccacg

SEQ ID NO: 34343 - DNA, 546 bp, Artificial Sequence
  chemically treated genomic DNA (Homo sapiens) CpG-island No: 34343
agaggaggcgagataggagaggaggtagttttttcgttttaaattttttatgtgggagtgtgcgaggtggattcggaaatacgttttcgaaagggttcgatagatataacggtagcgtagcgtaggggtttgggtttgcgtaggtcggcggagtataagggacgtattttttttcgtcgttcgggttttatgtgatcgcgtcgatagcgcggttgtttatagagattttttttattttcgtttcgggagtaattaaaacggcgaggtttatagggtcgatagcgttttcgcgggaggtagtcgggttggggttttttgttagttttcggtgttcgatgttttatgggtagtttattttttcggcggcgcgttcgtagggagggtttaaaggtagttcggagcggtcgtagggtcgtgtagatgtgtaaagagacgtatagagtacgggcgttttgtagatagtaagtttatatatttaatatttattattaatattagggtagatgatttcggtgtgagacgtgaggtgagttcgaaaaggttacg

SEQ ID NO: 34344 - DNA, 546 bp, Artificial Sequence
  chemically treated genomic DNA (Homo sapiens) CpG-island No: 34344
cgtaaccttttcgaactcacctcacgtctcacaccgaaatcatctaccctaatattaataataaatattaaatatataaacttactatctacaaaacgcccgtactctatacgtctctttacacatctacacgaccctacgaccgctccgaactacctttaaaccctccctacgaacgcgccgccgaaaaaataaactacccataaaacatcgaacaccgaaaactaacaaaaaaccccaacccgactacctcccgcgaaaacgctatcgaccctataaacctcgccgttttaattactcccgaaacgaaaataaaaaaaatctctataaacaaccgcgctatcgacgcgatcacataaaacccgaacgacgaaaaaaaatacgtcccttatactccgccgacctacgcaaacccaaacccctacgctacgctaccgttatatctatcgaaccctttcgaaaacgtatttccgaatccacctcgcacactcccacataaaaaatttaaaacgaaaaaactacctcctctcctatctcgcctcctct

SEQ ID NO: 34345 - DNA, 565 bp, Artificial Sequence
  chemically treated genomic DNA (Homo sapiens) CpG-island No: 34345
gtatacgtagatcgcgtttacgtttttaaagtgcgtaagcgtacggcgagatttcgtttttcgtttttttattaagacgaggcgcgcgtattagtaattagggttcgttggcgtcgtttcgggttttcgtttcggggttcgtcggtcgtcgttcggtttcggttttggtttcgtttttacgcgggaattttttagaagttttaatattcgggattagaggttggttgtagcgtatattttcggtaacgagcgtaaaggaagggattcggtgacgttttttttcgtttttttagcggtttaggttttggttttcggtgcggtagcgttatttggtgtcgagtttttcgttattcgcggaggtggtacgcgtttttttttcggaattttttagagaaatcgtggtttttgtttttttttttttcgttttggacggggagggattcgagttttcgtttcgtcgagttttcgcgcgggagggattttgtggcgattttgaagcggaagttgtttgtaggaggagttttataaatttaaaatggagcggaaattgttttttttttagttt

SEQ ID NO: 34346 - DNA, 565 bp, Artificial Sequence
  chemically treated genomic DNA (Homo sapiens) CpG-island No: 34346
aaactaaaaaaaaaacaatttccgctccattttaaatttataaaactcctcctacaaacaacttccgcttcaaaatcgccacaaaatccctcccgcgcgaaaactcgacgaaacgaaaactcgaatccctccccgtccaaaacgaaaaaaaaaaaaacaaaaaccacgatttctctaaaaaattccgaaaaaaaaacgcgtaccacctccgcgaataacgaaaaactcgacaccaaataacgctaccgcaccgaaaaccaaaacctaaaccgctaaaaaaacgaaaaaaaacgtcaccgaatcccttcctttacgctcgttaccgaaaatatacgctacaaccaacctctaatcccgaatattaaaacttctaaaaaattcccgcgtaaaaacgaaaccaaaaccgaaaccgaacgacgaccgacgaaccccgaaacgaaaacccgaaacgacgccaacgaaccctaattactaatacgcgcgcctcgtcttaataaaaaaacgaaaaacgaaatctcgccgtacgcttacgcactttaaaaacgtaaacgcgatctacgtatac

SEQ ID NO: 34347 - DNA, 565 bp, Artificial Sequence
  chemically treated genomic DNA (Homo sapiens) CpG-island No: 34347
aaattagagaaagaatagttttcgttttattttgggtttgtaaagttttttttataggtagttttcgttttagagtcgttataaagtttttttcgcgcgggaattcggcggggcggagattcgggttttttttcgtttagggcgggagaaaggaaagtaggggttacggtttttttggaaggtttcgagagaagggcgcgtgttattttcgcgggtggcgggagattcggtattagatggcgttgtcgtatcgagagttagagtttgggtcgttggggagacgggaagaggcgttatcggatttttttttttgcgttcgttgtcggaaatgtgcgttgtaattagtttttggtttcggatattaagatttttggagggttttcgcgtgagggcggggttagaatcggaatcgaacggcgatcgacgagtttcggagcggaaattcggggcggcgttagcgggttttggttgttggtgcgcgcgtttcgttttggtgggagggcgaggggcggggtttcgtcgtgcgtttgcgtattttggggacgtaggcgcggtttgcgtgtgt

SEQ ID NO: 34348 - DNA, 565 bp, Artificial Sequence
  chemically treated genomic DNA (Homo sapiens) CpG-island No: 34348
acacacgcaaaccgcgcctacgtccccaaaatacgcaaacgcacgacgaaaccccgcccctcgccctcccaccaaaacgaaacgcgcgcaccaacaaccaaaacccgctaacgccgccccgaatttccgctccgaaactcgtcgatcgccgttcgattccgattctaaccccgccctcacgcgaaaaccctccaaaaatcttaatatccgaaaccaaaaactaattacaacgcacatttccgacaacgaacgcaaaaaaaaaaatccgataacgcctcttcccgtctccccaacgacccaaactctaactctcgatacgacaacgccatctaataccgaatctcccgccacccgcgaaaataacacgcgcccttctctcgaaaccttccaaaaaaaccgtaacccctactttcctttctcccgccctaaacgaaaaaaaacccgaatctccgccccgccgaattcccgcgcgaaaaaaactttataacgactctaaaacgaaaactacctataaaaaaaactttacaaacccaaaataaaacgaaaactattctttctctaattt

SEQ ID NO: 34349 - DNA, 1084 bp, Artificial Sequence
  chemically treated genomic DNA (Homo sapiens) CpG-island No: 34349
tatcgtatcgttttacgggggttggattttttttttttttgcgggtgtgtgtgcgaggatggacgtggtaaatacgggttggtagaaggagcgaatcgcggtggaggaagtttttttgtttagttttcgtcgcggcgaggttcgcgggttaggcgcggcgacgaaggtgtacgaaggtgtttcgcgggtttggtggagttgtagcggcgcgtaggcgtattgagggtcgttcgcggtcggtttcgcggtataaagagcgttttcgcggggagtcgggcgttttttgggcggagggagtagtcggggtttcgtcggttcgcgtcgttttttttacgcgtcgtttcggggcgtagttatagttgtcgtttatcgcgggtgagaggtttgttggttcgtttcggttttttcgtttcggcggcggtcgtgcggttcgggttttaattttggcgtttgttagtcggggtcgatttcgttttttgcgtttcgttttttttcgagtttcgggttcgcggcggagcgagcgagcggtcggtaggttgggaggagcggtcgaaggtgagtgacgcggcggggtcgtgtcgcgtttcgtgtcgcggcgaggttgtttcggagcgcgaggtttttatttttgtttcgggttggtttcgcgcggagtcgatttggcgcgcgtcggggttgcgcggcggtcgtggcggtggcggagggtagttttcgcgggttttcgttcgtgcgggtgaattcggcggtttcggggcggttttgggggggggttcgagaggtggcgtcggtttcgcggtcgtcggagtttggcgcgttttgtagcggcggcgttcggtcggtttggaggagggagaggcgcgtcgggtacggagtagcgagaaagttcgggtcgggtcggtcggcgggagggtgcgggcgtttggttatttcggttcggcgttttgtttttcggatgtttttgggtttttttttagttcggggcggaacgggggattttttttgaagcggtttttcgtggagttggatgttgtttttcgcgggagggagtggcggttaagatttttttattttcggttttagaggg

SEQ ID NO: 34350 - DNA, 1084 bp, Artificial Sequence
  chemically treated genomic DNA (Homo sapiens) CpG-island No: 34350
ccctctaaaaccgaaaataaaaaaatcttaaccgccactccctcccgcgaaaaacaacatccaactccacgaaaaaccgcttcaaaaaaaatcccccgttccgccccgaactaaaaaaaaacccaaaaacatccgaaaaacaaaacgccgaaccgaaataaccaaacgcccgcaccctcccgccgaccgacccgacccgaactttctcgctactccgtacccgacgcgcctctccctcctccaaaccgaccgaacgccgccgctacaaaacgcgccaaactccgacgaccgcgaaaccgacgccacctctcgaacccccccccaaaaccgccccgaaaccgccgaattcacccgcacgaacgaaaacccgcgaaaactaccctccgccaccgccacgaccgccgcgcaaccccgacgcgcgccaaatcgactccgcgcgaaaccaacccgaaacaaaaataaaaacctcgcgctccgaaacaacctcgccgcgacacgaaacgcgacacgaccccgccgcgtcactcaccttcgaccgctcctcccaacctaccgaccgctcgctcgctccgccgcgaacccgaaactcgaaaaaaaacgaaacgcaaaaaacgaaatcgaccccgactaacaaacgccaaaattaaaacccgaaccgcacgaccgccgccgaaacgaaaaaaccgaaacgaaccaacaaacctctcacccgcgataaacgacaactataactacgccccgaaacgacgcgtaaaaaaaacgacgcgaaccgacgaaaccccgactactccctccgcccaaaaaacgcccgactccccgcgaaaacgctctttataccgcgaaaccgaccgcgaacgaccctcaatacgcctacgcgccgctacaactccaccaaacccgcgaaacaccttcgtacaccttcgtcgccgcgcctaacccgcgaacctcgccgcgacgaaaactaaacaaaaaaacttcctccaccgcgattcgctccttctaccaacccgtatttaccacgtccatcctcgcacacacacccgcaaaaaaaaaaaaaatccaacccccgtaaaacgatacgata

SEQ ID NO: 34351 - DNA, 1084 bp, Artificial Sequence
  chemically treated genomic DNA (Homo sapiens) CpG-island No: 34351
ttttttggggtcgaggataaaggggttttgatcgttattttttttcgcgaagggtaatatttaattttacggagagtcgttttagagagggtttttcgtttcgtttcgggttagggaagggtttagaggtattcgagggatagagcgtcgggtcggggtagttaggcgttcgtattttttcgtcggtcggttcggttcgaattttttcgttgtttcgtgttcggcgcgttttttttttttttagatcggtcgagcgtcgtcgttgtagagcgcgttaaatttcgacggtcgcggggtcgacgttatttttcggatttttttttaggatcgtttcgaggtcgtcgggtttattcgtacgagcgggagttcgcgggggttgtttttcgttatcgttacggtcgtcgcgtaatttcggcgcgcgttaagtcggtttcgcgcggggttagttcgaggtaggggtaggggtttcgcgtttcgggataatttcgtcgcggtacggggcgcggtacggtttcgtcgcgttatttattttcggtcgttttttttaatttgtcggtcgttcgttcgtttcgtcgcggattcggagttcggggaagggcggggcgtagggggcggagtcggtttcggttggtaagcgttagaattaaagttcgaatcgtacggtcgtcgtcggggcggggaagtcggggcggattagtaagttttttattcgcggtgggcgatagttgtggttgcgtttcggagcggcgcgtgagaagaacggcgcgggtcggcgaagtttcggttgtttttttcgtttagaggacgttcggtttttcgcgggggcgttttttgtatcgcggagtcggtcgcgggcggtttttagtgcgtttgcgcgtcgttgtaattttattaggttcgcggggtattttcgtgtattttcgtcgtcgcgtttggttcgcgggtttcgtcgcggcgagaattaagtagaagaattttttttatcgcggttcgttttttttgttaattcgtatttattacgtttattttcgtatatatattcgtaaggggagaagaaatttagttttcgtgagacggtgcggtg

SEQ ID NO: 34352 - DNA, 1084 bp, Artificial Sequence
  chemically treated genomic DNA (Homo sapiens) CpG-island No: 34352
caccgcaccgtctcacgaaaactaaatttcttctccccttacgaatatatatacgaaaataaacgtaataaatacgaattaacaaaaaaaacgaaccgcgataaaaaaaattcttctacttaattctcgccgcgacgaaacccgcgaaccaaacgcgacgacgaaaatacacgaaaataccccgcgaacctaataaaattacaacgacgcgcaaacgcactaaaaaccgcccgcgaccgactccgcgatacaaaaaacgcccccgcgaaaaaccgaacgtcctctaaacgaaaaaaacaaccgaaacttcgccgacccgcgccgttcttctcacgcgccgctccgaaacgcaaccacaactatcgcccaccgcgaataaaaaacttactaatccgccccgacttccccgccccgacgacgaccgtacgattcgaactttaattctaacgcttaccaaccgaaaccgactccgccccctacgccccgcccttccccgaactccgaatccgcgacgaaacgaacgaacgaccgacaaattaaaaaaaacgaccgaaaataaataacgcgacgaaaccgtaccgcgccccgtaccgcgacgaaattatcccgaaacgcgaaacccctacccctacctcgaactaaccccgcgcgaaaccgacttaacgcgcgccgaaattacgcgacgaccgtaacgataacgaaaaacaacccccgcgaactcccgctcgtacgaataaacccgacgacctcgaaacgatcctaaaaaaaaatccgaaaaataacgtcgaccccgcgaccgtcgaaatttaacgcgctctacaacgacgacgctcgaccgatctaaaaaaaaaaaaaacgcgccgaacacgaaacaacgaaaaaattcgaaccgaaccgaccgacgaaaaaatacgaacgcctaactaccccgacccgacgctctatccctcgaatacctctaaacccttccctaacccgaaacgaaacgaaaaaccctctctaaaacgactctccgtaaaattaaatattacccttcgcgaaaaaaaataacgatcaaaacccctttatcctcgaccccaaaaaa

SEQ ID NO: 34353 - DNA, 501 bp, Artificial Sequence
  chemically treated genomic DNA (Homo sapiens) CpG-island No: 34353
ggtttcgggtcgtttttcgttaatttcgaggtggtttcggtcggggttggagggcggggaggcgggggaggggcgtgggcgttgcggtttttggggcggtttaattcggcgcgggtagcgtgggttttcgaggtttcgcggttttaggtcgagggaaggtgtaggggttttgaagcgggttggttttcgaatgttgcgttttttgtgtcgttttgggtaatacgtagtggcgttcgcggtagttacggttttttgatcgtttattttttttattcgggtttcgtggaatttttagaggtaattgtttttggtggtttttgcgggttagtacgagtcgtgttgtacgagcgtgatttagtgaaggttttgggcgagttggcgttaataatttatggcgttcgttagcgttcgtttttcgtacgtggtttttgcggagggttagtttattttattaaatagtggattttattagattttgatattcgaggttaataaggaagt

SEQ ID NO: 34354 - DNA, 501 bp, Artificial Sequence
  chemically treated genomic DNA (Homo sapiens) CpG-island No: 34354
acttccttattaacctcgaatatcaaaatctaataaaatccactatttaataaaataaactaaccctccgcaaaaaccacgtacgaaaaacgaacgctaacgaacgccataaattattaacgccaactcgcccaaaaccttcactaaatcacgctcgtacaacacgactcgtactaacccgcaaaaaccaccaaaaacaattacctctaaaaattccacgaaacccgaataaaaaaaataaacgatcaaaaaaccgtaactaccgcgaacgccactacgtattacccaaaacgacacaaaaaacgcaacattcgaaaaccaacccgcttcaaaacccctacaccttccctcgacctaaaaccgcgaaacctcgaaaacccacgctacccgcgccgaattaaaccgccccaaaaaccgcaacgcccacgcccctcccccgcctccccgccctccaaccccgaccgaaaccacctcgaaattaacgaaaaacgacccgaaacc

SEQ ID NO: 34355 - DNA, 501 bp, Artificial Sequence
  chemically treated genomic DNA (Homo sapiens) CpG-island No: 34355
gtttttttattagtttcgggtattagggtttaatagaatttattatttaataagatgggttgatttttcgtagaggttacgtgcggaaagcgagcgttggcggacgttataaattgttaacgttaattcgtttaaggtttttattaggttacgttcgtgtagtacggttcgtgttgattcgtaagagttattaagaatagttgtttttgaaagttttacgggattcgggtgaaggagatgaacggttaaggagtcgtggttgtcgcgagcgttattgcgtgttgtttaaagcggtatagaaaacgtaatattcggggattagttcgttttagggtttttatattttttttcgatttggaatcgcgggatttcggaaatttacgttgttcgcgtcgggttgggtcgttttagaggtcgtagcgtttacgtttttttttcgttttttcgttttttagtttcggtcgaagttatttcggagttggcggagggcgattcgaggtt

SEQ ID NO: 34356 - DNA, 501 bp, Artificial Sequence
  chemically treated genomic DNA (Homo sapiens) CpG-island No: 34356
aacctcgaatcgccctccgccaactccgaaataacttcgaccgaaactaaaaaacgaaaaaacgaaaaaaaaacgtaaacgctacgacctctaaaacgacccaacccgacgcgaacaacgtaaatttccgaaatcccgcgattccaaatcgaaaaaaaatataaaaaccctaaaacgaactaatccccgaatattacgttttctataccgctttaaacaacacgcaataacgctcgcgacaaccacgactccttaaccgttcatctccttcacccgaatcccgtaaaactttcaaaaacaactattcttaataactcttacgaatcaacacgaaccgtactacacgaacgtaacctaataaaaaccttaaacgaattaacgttaacaatttataacgtccgccaacgctcgctttccgcacgtaacctctacgaaaaatcaacccatcttattaaataataaattctattaaaccctaatacccgaaactaataaaaaaac

SEQ ID NO: 34357 - DNA, 508 bp, Artificial Sequence
  chemically treated genomic DNA (Homo sapiens) CpG-island No: 34357
gggtcgcggagcggggtcgggagaggttagtttcggggcgtttttcggggcgcggtttaggcggatagcggtagcggcggcgggttcggggttttcggcgcgtagagtggttcgtttcggaggggtttcgcgttttcgtttcgttttcgtcgtttttttttattatatttcggtcggcgtagcgtttcgagtagattatagcgcggtttttgtcgggcgggtttggttttcggttaggcgtttaaataataaataatttttcgggtgcgggtagggggtttcgtcggtcgtagttaggttttaggtgtgcgttggcgaatatttttattaatcgcgaggagggatcgggtcgggggcgcgggcgtcgcggcgggcgtttttattttttatttatagttgttttacgttggtttcgagggtcgttgtttttaattttatcgcgaaggttttaaatatgaggaggtttataattaagaatttgtcgtagtttttttgaatgtaataattt

SEQ ID NO: 34358 - DNA, 508 bp, Artificial Sequence
  chemically treated genomic DNA (Homo sapiens) CpG-island No: 34358
aaattattacattcaaaaaaactacgacaaattcttaattataaacctcctcatatttaaaaccttcgcgataaaattaaaaacaacgaccctcgaaaccaacgtaaaacaactataaataaaaaataaaaacgcccgccgcgacgcccgcgcccccgacccgatccctcctcgcgattaataaaaatattcgccaacgcacacctaaaacctaactacgaccgacgaaaccccctacccgcacccgaaaaattatttattatttaaacgcctaaccgaaaaccaaacccgcccgacaaaaaccgcgctataatctactcgaaacgctacgccgaccgaaatataataaaaaaaaacgacgaaaacgaaacgaaaacgcgaaacccctccgaaacgaaccactctacgcgccgaaaaccccgaacccgccgccgctaccgctatccgcctaaaccgcgccccgaaaaacgccccgaaactaacctctcccgaccccgctccgcgaccc

SEQ ID NO: 34359 - DNA, 508 bp, Artificial Sequence
  chemically treated genomic DNA (Homo sapiens) CpG-island No: 34359
gggttgttatatttaaaaaaattgcggtaagtttttggttgtgggtttttttatatttggggttttcgcggtgggattaaaagtagcgattttcgagattaacgtggagtagttgtgggtggaaggtaagagcgttcgtcgcggcgttcgcgttttcggttcggttttttttcgcggttgatagagatattcgttagcgtatatttagagtttggttgcggtcggcgaaattttttgttcgtattcgggggattgtttattgtttgggcgtttggtcgggagttaggttcgttcgataaaggtcgcgttgtaatttattcggggcgttgcgtcggtcgaggtgtggtgggagagagcggcgggggcgggacgggggcgcggggttttttcgggacggattattttgcgcgtcgggggtttcgggttcgtcgtcgttgtcgttgttcgtttgggtcgcgtttcgagaggcgtttcggggttggtttttttcggtttcgtttcgcggttt

SEQ ID NO: 34360 - DNA, 508 bp, Artificial Sequence
  chemically treated genomic DNA (Homo sapiens) CpG-island No: 34360
aaaccgcgaaacgaaaccgaaaaaaaccaaccccgaaacgcctctcgaaacgcgacccaaacgaacaacgacaacgacgacgaacccgaaacccccgacgcgcaaaataatccgtcccgaaaaaaccccgcgcccccgtcccgcccccgccgctctctcccaccacacctcgaccgacgcaacgccccgaataaattacaacgcgacctttatcgaacgaacctaactcccgaccaaacgcccaaacaataaacaatcccccgaatacgaacaaaaaatttcgccgaccgcaaccaaactctaaatatacgctaacgaatatctctatcaaccgcgaaaaaaaaccgaaccgaaaacgcgaacgccgcgacgaacgctcttaccttccacccacaactactccacgttaatctcgaaaatcgctacttttaatcccaccgcgaaaaccccaaatataaaaaaacccacaaccaaaaacttaccgcaatttttttaaatataacaaccc

SEQ ID NO: 34361 - DNA, 1043 bp, Artificial Sequence
  chemically treated genomic DNA (Homo sapiens) CpG-island No: 34361
aaggcggcgtcgtagtagttgggtcggtgtagatagtttcggttcggcgcggtagtacggcgtagttttttcgttcgtttgcgtttttcgtttttagtcggtcgtttcggggtatcgatatagtcgttgtcgtcgtcgtcgcggttttggggttcggcggcgttattagtcgaggttatgttgtcgtcgtcgtcgtcgtcgtcgcggggacggaggtttttcgggcggttcggcgcgttgttgtcgttgttgcgggtttttggcgcgtttgggcgttcggtttgcgaggacgttgttggtcgtaggttgttcgggttcgggtttcggttgatagattagtcgttgttgttgtttatacggcgggcgttgttgtcgttgcggtcgcggtcgttgtcggggagttagattttgcgttttttattgttatattgcgcgggggtttcgaggtttttgcggtcgtcgttgtttatatttagttcgcggaagagcgagagtcggcgcgtcgagcgagtttgtttttcgggcgttttcgcggtattttttgcggtttttaattttttttattcgtttttcgtttcgcgtcgcgatttttttattgtagaaagagttagcgaattttcgttgttttcgtcggtcgcgttggttttttcggcgtttttcgggtcgttcgagcggtcgcggagggtaagcgtagagtcgtcgtcgtcgcggggttcgagggtgttcggcgggttttagcgttgtcgggttcgggtagtcgtagttgtcgttgttttcgcggtggttgttgttggcggtggcggttttaggagttgttgttcgggttgttcgggttttggttgttgggttcgcggtggttgttcggtttcggattttgtttttttgtgtttttcggtaattcgttggattattttgttttcgtgtagcgcgtttttttcgttttcgggatttggggatttcgttttgtgtgtgtgtagcgggtagcggtcgtagtagttttttgatttaatagatgagatggaagaagaaaaaaaagaattttt

SEQ ID NO: 34362 - DNA, 1043 bp, Artificial Sequence
  chemically treated genomic DNA (Homo sapiens) CpG-island No: 34362
aaaaattcttttttttcttcttccatctcatctattaaatcaaaaaactactacgaccgctacccgctacacacacacaaaacgaaatccccaaatcccgaaaacgaaaaaaacgcgctacacgaaaacaaaataatccaacgaattaccgaaaaacacaaaaaaacaaaatccgaaaccgaacaaccaccgcgaacccaacaaccaaaacccgaacaacccgaacaacaactcctaaaaccgccaccgccaacaacaaccaccgcgaaaacaacgacaactacgactacccgaacccgacaacgctaaaacccgccgaacaccctcgaaccccgcgacgacgacgactctacgcttaccctccgcgaccgctcgaacgacccgaaaaacgccgaaaaaaccaacgcgaccgacgaaaacaacgaaaattcgctaactctttctacaataaaaaaatcgcgacgcgaaacgaaaaacgaataaaaaaaattaaaaaccgcaaaaaataccgcgaaaacgcccgaaaaacaaactcgctcgacgcgccgactctcgctcttccgcgaactaaatataaacaacgacgaccgcaaaaacctcgaaacccccgcgcaatataacaataaaaaacgcaaaatctaactccccgacaacgaccgcgaccgcaacgacaacaacgcccgccgtataaacaacaacaacgactaatctatcaaccgaaacccgaacccgaacaacctacgaccaacaacgtcctcgcaaaccgaacgcccaaacgcgccaaaaacccgcaacaacgacaacaacgcgccgaaccgcccgaaaaacctccgtccccgcgacgacgacgacgacgacgacaacataacctcgactaataacgccgccgaaccccaaaaccgcgacgacgacgacaacgactatatcgataccccgaaacgaccgactaaaaacgaaaaacgcaaacgaacgaaaaaactacgccgtactaccgcgccgaaccgaaactatctacaccgacccaactactacgacgccgcctt

SEQ ID NO: 34363 - DNA, 1043 bp, Artificial Sequence
  chemically treated genomic DNA (Homo sapiens) CpG-island No: 34363
gagagtttttttttttttttttttattttatttattgaattaaggagttgttgcggtcgttgttcgttgtatatatatagagcggagtttttaggtttcgggagcgagagaggcgcgttgtacggggatagaatggtttagcgggttgtcgaggagtataagaaagtagagttcgggatcgagtagttatcgcgaatttagtagttagagttcgagtagttcgagtagtagtttttggagtcgttatcgttagtagtagttatcgcgggagtagcggtagttgcggttgttcgggttcggtagcgttgagattcgtcgggtattttcggatttcgcggcggcggcggttttgcgtttgtttttcgcggtcgttcgggcgattcgggaggcgtcgagagagttagcgcggtcggcgggagtagcggggattcgttggttttttttgtagtgaaggggtcgcggcgcggggcggggggcgggtagggggagttggggatcgtaaggagtgtcgcggaagcgttcgaaggataggttcgttcggcgcgtcggttttcgttttttcgcgaattggatgtgggtagcggcggtcgtagagatttcgggattttcgcgtaatgtggtaatggaaggcgtagggtttgatttttcggtagcggtcgcggtcgtagcggtagtagcgttcgtcgtgtgagtagtagtagcggttggtttgttaatcggagttcgagttcgagtagtttgcggttagtagcgttttcgtaagtcgagcgtttaggcgcgttaggagttcgtagtagcggtagtagcgcgtcgggtcgttcgggaagttttcgttttcgcggcggcggcggcggcggcggtaatatggtttcggttggtaacgtcgtcgagttttaggatcgcggcggcggcggtagcggttgtatcggtgtttcgggacggtcggttggaggcgggaggcgtagacggacgggggggttgcgtcgtgttgtcgcgtcggatcgggattatttgtatcggtttagttattgcgacgtcgtttt

SEQ ID NO: 34364 - DNA, 1043 bp, Artificial Sequence
  chemically treated genomic DNA (Homo sapiens) CpG-island No: 34364
aaaacgacgtcgcaataactaaaccgatacaaataatcccgatccgacgcgacaacacgacgcaacccccccgtccgtctacgcctcccgcctccaaccgaccgtcccgaaacaccgatacaaccgctaccgccgccgccgcgatcctaaaactcgacgacgttaccaaccgaaaccatattaccgccgccgccgccgccgccgcgaaaacgaaaacttcccgaacgacccgacgcgctactaccgctactacgaactcctaacgcgcctaaacgctcgacttacgaaaacgctactaaccgcaaactactcgaactcgaactccgattaacaaaccaaccgctactactactcacacgacgaacgctactaccgctacgaccgcgaccgctaccgaaaaatcaaaccctacgccttccattaccacattacgcgaaaatcccgaaatctctacgaccgccgctacccacatccaattcgcgaaaaaacgaaaaccgacgcgccgaacgaacctatccttcgaacgcttccgcgacactccttacgatccccaactccccctacccgccccccgccccgcgccgcgaccccttcactacaaaaaaaaccaacgaatccccgctactcccgccgaccgcgctaactctctcgacgcctcccgaatcgcccgaacgaccgcgaaaaacaaacgcaaaaccgccgccgccgcgaaatccgaaaatacccgacgaatctcaacgctaccgaacccgaacaaccgcaactaccgctactcccgcgataactactactaacgataacgactccaaaaactactactcgaactactcgaactctaactactaaattcgcgataactactcgatcccgaactctactttcttatactcctcgacaacccgctaaaccattctatccccgtacaacgcgcctctctcgctcccgaaacctaaaaactccgctctatatatatacaacgaacaacgaccgcaacaactccttaattcaataaataaaataaaaaaaaaaaaaaaaaaactctc

SEQ ID NO: 34365 - DNA, 551 bp, Artificial Sequence
  chemically treated genomic DNA (Homo sapiens) CpG-island No: 34365
acgtgatttcgcgttaggaggttcggtgcgcgcgcgcgttcggttttcggatttttcgcgttcgcgcggtcggggtagagtaggtagggaggcggatgcgtcgggtcggtttcgggtttttagcgcggtttttcgagagtttaggcgaggcgcgcgtttagtcggcgcggacggacgtgtcggacgcgtcgtagtatatttttgaaggcggatcggtttttttacgttgtttaatgttcgcgtcgttttttcgcgatcggttaatggtcgcgtttacgagtttttgtttatttagcggtttcgcgttggttgttcgggcgcgttgggggttgcggcggggcgcgtcggttatcggggcggtttacgcggttttcgtagggggttcgttcgtcggtttttttcgtttttttttttttttttcggcggtttttttttttcgtttttttttttcggtttgcgtttttttttttttttttcgtttcgtttttttttttaatttttttttttttattagtttggttattttttttttagttttttttttttttcgg

SEQ ID NO: 34366 - DNA, 551 bp, Artificial Sequence
  chemically treated genomic DNA (Homo sapiens) CpG-island No: 34366
ccgaaaaaaaaaaaaaactaaaaaaaaaataaccaaactaataaaaaaaaaaaaattaaaaaaaaaaacgaaacgaaaaaaaaaaaaaaaaacgcaaaccgaaaaaaaaaaacgaaaaaaaaaaaccgccgaaaaaaaaaaaaaaaaacgaaaaaaaccgacgaacgaaccccctacgaaaaccgcgtaaaccgccccgataaccgacgcgccccgccgcaacccccaacgcgcccgaacaaccaacgcgaaaccgctaaataaacaaaaactcgtaaacgcgaccattaaccgatcgcgaaaaaacgacgcgaacattaaacaacgtaaaaaaaccgatccgccttcaaaaatatactacgacgcgtccgacacgtccgtccgcgccgactaaacgcgcgcctcgcctaaactctcgaaaaaccgcgctaaaaacccgaaaccgacccgacgcatccgcctccctacctactctaccccgaccgcgcgaacgcgaaaaatccgaaaaccgaacgcgcgcgcgcaccgaacctcctaacgcgaaatcacgt

SEQ ID NO: 34367 - DNA, 551 bp, Artificial Sequence
  chemically treated genomic DNA (Homo sapiens) CpG-island No: 34367
tcggggaggaggagaggttggagggaaggtggttaggttggtgggggaggggagattgagggagggagcggggcgagggaggaaggagaaggcgtaggtcgaaggaaggaagcggggaggggaaatcgtcggggaggaaggaagggggcggggagagtcggcggacgggttttttgcgggagtcgcgtggatcgtttcggtggtcggcgcgtttcgtcgtagtttttagcgcgttcgggtagttagcgcggggtcgttgaatgggtagggattcgtgagcgcgattattggtcggtcgcggggaggcggcgcgggtattgggtagcgtaagggggtcggttcgtttttaggaatgtattacggcgcgttcggtacgttcgttcgcgtcggttgggcgcgcgtttcgtttgggttttcgggagatcgcgttggaggttcggagtcggttcggcgtattcgtttttttatttattttgtttcggtcgcgcgggcgcggggagttcgggagtcgggcgcgcgcgcgtatcgggttttttggcgcggggttacgt

SEQ ID NO: 34368 - DNA, 551 bp, Artificial Sequence
  chemically treated genomic DNA (Homo sapiens) CpG-island No: 34368
acgtaaccccgcgccaaaaaacccgatacgcgcgcgcgcccgactcccgaactccccgcgcccgcgcgaccgaaacaaaataaataaaaaaacgaatacgccgaaccgactccgaacctccaacgcgatctcccgaaaacccaaacgaaacgcgcgcccaaccgacgcgaacgaacgtaccgaacgcgccgtaatacattcctaaaaacgaaccgacccccttacgctacccaatacccgcgccgcctccccgcgaccgaccaataatcgcgctcacgaatccctacccattcaacgaccccgcgctaactacccgaacgcgctaaaaactacgacgaaacgcgccgaccaccgaaacgatccacgcgactcccgcaaaaaacccgtccgccgactctccccgcccccttccttcctccccgacgatttcccctccccgcttccttccttcgacctacgccttctccttcctccctcgccccgctccctccctcaatctcccctcccccaccaacctaaccaccttccctccaacctctcctcctccccga

SEQ ID NO: 34369 - DNA, 587 bp, Artificial Sequence
  chemically treated genomic DNA (Homo sapiens) CpG-island No: 34369
tttcggcgatttttttcgtgagaatttttttcggagtcgttttttagtcggggttcgtcgcggttagtttttttttcgttacgcggggttggtttcgggggcgggggttcgggcgtgcgagcgagcgtggaggcgcgggattcgcgttttcgcgtttaggcggcgtagtttattcggttttacggtttcggcgcgcggttcgttttttttgttcggcgttcggggttcgttttttcgttcgtcgcgcggggcgtttcgcgttttcgtgttttcgcgtcgttcgaggagtacggcgcgcgaggcgaggtggcgtcggcggtcgtcgcgttggttgtatttattatagtcggtcgttaatttttgttcggagcgcgggtgtcgatggcgcggacgttgggtttggattttatattaattttttttttttttttggttttttttttttcgtttttcgttttttcgtttttttttagttttttttcgttttttttttgttttgtcgttgcgggtttttttgttttttttgtcgttttttttttttttttcgttttttttttttttttttttttttttttcgtttttataaa

SEQ ID NO: 34370 - DNA, 587 bp, Artificial Sequence
  chemically treated genomic DNA (Homo sapiens) CpG-island No: 34370
tttataaaaacgaaaaaaaaaaaaaaaaaaaaaaaaaaaacgaaaaaaaaaaaaaaaacgacaaaaaaaacaaaaaaacccgcaacgacaaaacaaaaaaaaaacgaaaaaaaactaaaaaaaaacgaaaaaacgaaaaacgaaaaaaaaaaaaccaaaaaaaaaaaaaaaattaatataaaatccaaacccaacgtccgcgccatcgacacccgcgctccgaacaaaaattaacgaccgactataataaatacaaccaacgcgacgaccgccgacgccacctcgcctcgcgcgccgtactcctcgaacgacgcgaaaacacgaaaacgcgaaacgccccgcgcgacgaacgaaaaaacgaaccccgaacgccgaacaaaaaaaacgaaccgcgcgccgaaaccgtaaaaccgaataaactacgccgcctaaacgcgaaaacgcgaatcccgcgcctccacgctcgctcgcacgcccgaacccccgcccccgaaaccaaccccgcgtaacgaaaaaaaaactaaccgcgacgaaccccgactaaaaaacgactccgaaaaaaattctcacgaaaaaaatcgccgaaa

SEQ ID NO: 34371 - DNA, 587 bp, Artificial Sequence
  chemically treated genomic DNA (Homo sapiens) CpG-island No: 34371
tttgtaaagacggaggaggaggagaagaagaagaagaaaacggaggagaagaaaaagacgataggggagataaagagattcgtagcgataaggtaagggggagacgagggaagattgggagaagacggaggagcggaggacgaggaaaggggggttagggaaaaaaaaggaattgatgtgaaatttaagtttagcgttcgcgttatcggtattcgcgtttcgagtaggggttgacggtcggttatggtgagtgtagttagcgcggcggtcgtcgacgttatttcgtttcgcgcgtcgtgtttttcgggcggcgcggggatacggggacgcgggacgtttcgcgcggcggacggaggagcgagtttcgagcgtcgggtaggaggggcgggtcgcgcgtcggggtcgtggagtcgggtgggttgcgtcgtttgggcgcgggagcgcgggtttcgcgtttttacgttcgttcgtacgttcgggttttcgttttcgaggttagtttcgcgtggcggggagggggttggtcgcggcgggtttcggttgaggaacggtttcggggggaatttttacggagggggtcgtcggag

SEQ ID NO: 34372 - DNA, 587 bp, Artificial Sequence
  chemically treated genomic DNA (Homo sapiens) CpG-island No: 34372
ctccgacgaccccctccgtaaaaattccccccgaaaccgttcctcaaccgaaacccgccgcgaccaaccccctccccgccacgcgaaactaacctcgaaaacgaaaacccgaacgtacgaacgaacgtaaaaacgcgaaacccgcgctcccgcgcccaaacgacgcaacccacccgactccacgaccccgacgcgcgacccgcccctcctacccgacgctcgaaactcgctcctccgtccgccgcgcgaaacgtcccgcgtccccgtatccccgcgccgcccgaaaaacacgacgcgcgaaacgaaataacgtcgacgaccgccgcgctaactacactcaccataaccgaccgtcaacccctactcgaaacgcgaataccgataacgcgaacgctaaacttaaatttcacatcaattccttttttttccctaacccccctttcctcgtcctccgctcctccgtcttctcccaatcttccctcgtctcccccttaccttatcgctacgaatctctttatctcccctatcgtctttttcttctcctccgttttcttcttcttcttctcctcctcctccgtctttacaaa

SEQ ID NO: 34373 - DNA, 826 bp, Artificial Sequence
  chemically treated genomic DNA (Homo sapiens) CpG-island No: 34373
gcgtatcgaggaacgagtttttgggcgcgtttcggttcgtcgcggggtttcggggtaaattttggtttggcggggtttcggggtaaattttggtttggcggcgtcggcgagtttcgtggcgggtggtcggacgcgtttcggagttagcgcggcgttttttgcgtgtttcgcgttcggttggacggcggaagggtggttacgggttagggggtttgggcgggcgggggtcggcgggcgttttttattttgggtagtagtttcgcgtgcggttagtagtagcgcggttagtagcgttaggagcggcgggcgcgtttcgcggcggcgcggtcggtgtattttttttttcgttgaggcggcggcggcggcggtttttaggtcgcgcgtagaatatttacgggtttttttcgggttttcggtcgtttcgtttcggtcgttggcgttcgtaggacgtcggggacgtttgtaaagttttttgtttttttaatttgttttttcgttttcgtttggtcgtttttggatgtcgcgagcgcgatttttttttagttttttggttgtagtttcgtttgggtcggcgggttagttttaggttgttcgggtcgtattagtgggcgtgagtcgttttgggtcggatttcgagaatagcgtattttgcgtttaggggttgtcgtttcggggttttttcggcggcggcggtggcggttgttttagttttttacgttttttttttcgtttaatttgttattttttattaattttttagtttagcgttttagtttcgattaatgggagacgcggtttaggttggcgatttagcgttttttgttgt

SEQ ID NO: 34374 - DNA, 826 bp, Artificial Sequence
  chemically treated genomic DNA (Homo sapiens) CpG-island No: 34374
acaacaaaaaacgctaaatcgccaacctaaaccgcgtctcccattaatcgaaactaaaacgctaaactaaaaaattaataaaaaataacaaattaaacgaaaaaaaaaacgtaaaaaactaaaacaaccgccaccgccgccgccgaaaaaaccccgaaacgacaacccctaaacgcaaaatacgctattctcgaaatccgacccaaaacgactcacgcccactaatacgacccgaacaacctaaaactaacccgccgacccaaacgaaactacaaccaaaaaactaaaaaaaaatcgcgctcgcgacatccaaaaacgaccaaacgaaaacgaaaaaacaaattaaaaaaacaaaaaactttacaaacgtccccgacgtcctacgaacgccaacgaccgaaacgaaacgaccgaaaacccgaaaaaaacccgtaaatattctacgcgcgacctaaaaaccgccgccgccgccgcctcaacgaaaaaaaaaatacaccgaccgcgccgccgcgaaacgcgcccgccgctcctaacgctactaaccgcgctactactaaccgcacgcgaaactactacccaaaataaaaaacgcccgccgacccccgcccgcccaaaccccctaacccgtaaccacccttccgccgtccaaccgaacgcgaaacacgcaaaaaacgccgcgctaactccgaaacgcgtccgaccacccgccacgaaactcgccgacgccgccaaaccaaaatttaccccgaaaccccgccaaaccaaaatttaccccgaaaccccgcgacgaaccgaaacgcgcccaaaaactcgttcctcgatacgc

SEQ ID NO: 34375 - DNA, 826 bp, Artificial Sequence
  chemically treated genomic DNA (Homo sapiens) CpG-island No: 34375
gtagtagagggcgttgggtcgttagtttgggtcgcgttttttattggtcggggttggggcgttgggttggagagttggtggaaagtgataagttgagcgagagagggagcgtggagagttggagtagtcgttatcgtcgtcgtcgagggagtttcgggacggtagtttttgggcgtagggtgcgttgttttcggagttcgatttagggcgatttacgtttattggtgcgattcggatagtttgggattgattcgtcggtttaggcgaggttgtagttagagggttgggaagggatcgcgttcgcggtatttagaggcggttaggcggaggcgagggagtaggttagagggataaagagttttgtagacgttttcggcgttttgcgagcgttagcggtcgggacgaggcggtcgggagttcgggaagagttcgtggatgttttgcgcgcggtttgggagtcgtcgtcgtcgtcgttttagcgagaggaggaatgtatcggtcgcgtcgtcgcgggacgcgttcgtcgtttttggcgttgttggtcgcgttgttgttggtcgtacgcggggttgttgtttaaggtaagaggcgttcgtcggttttcgttcgtttagattttttgattcgtggttattttttcgtcgtttagtcgggcgcgggatacgtaggaagcgtcgcgttggtttcggggcgcgttcggttattcgttacggggttcgtcggcgtcgttaggttagggtttgtttcggagtttcgttaggttagggtttgtttcggagtttcgcggcgggtcggggcgcgtttagggattcgtttttcggtgcgt

SEQ ID NO: 34376 - DNA, 826 bp, Artificial Sequence
  chemically treated genomic DNA (Homo sapiens) CpG-island No: 34376
acgcaccgaaaaacgaatccctaaacgcgccccgacccgccgcgaaactccgaaacaaaccctaacctaacgaaactccgaaacaaaccctaacctaacgacgccgacgaaccccgtaacgaataaccgaacgcgccccgaaaccaacgcgacgcttcctacgtatcccgcgcccgactaaacgacgaaaaaataaccacgaatcaaaaaatctaaacgaacgaaaaccgacgaacgcctcttaccttaaacaacaaccccgcgtacgaccaacaacaacgcgaccaacaacgccaaaaacgacgaacgcgtcccgcgacgacgcgaccgatacattcctcctctcgctaaaacgacgacgacgacgactcccaaaccgcgcgcaaaacatccacgaactcttcccgaactcccgaccgcctcgtcccgaccgctaacgctcgcaaaacgccgaaaacgtctacaaaactctttatccctctaacctactccctcgcctccgcctaaccgcctctaaataccgcgaacgcgatcccttcccaaccctctaactacaacctcgcctaaaccgacgaatcaatcccaaactatccgaatcgcaccaataaacgtaaatcgccctaaatcgaactccgaaaacaacgcaccctacgcccaaaaactaccgtcccgaaactccctcgacgacgacgataacgactactccaactctccacgctccctctctcgctcaacttatcactttccaccaactctccaacccaacgccccaaccccgaccaataaaaaacgcgacccaaactaacgacccaacgccctctactac

SEQ ID NO: 34377 - DNA, 712 bp, Artificial Sequence
  chemically treated genomic DNA (Homo sapiens) CpG-island No: 34377
taagtacgacgaggagtcgtaggtcgagtacgaattcgaggagatttattatttcgagattcgcggtgacgagtacggtttagggatggtattttacgggatttatggtacgtcggatcgttttatttacgtggtagagatgatttcgaacggtgacgtagttttggtgtcgtatggttggtatgggtcgtgtgtagtcgttttcggttacgatttgtattattttaatgtgatggcggggttaggcgtcgttgagtggaaattagtcgacgattcgtattacgggtggattcgttaaatttggtaggattaagatatcgattcgcgtttgtcgttagcggtggacgatttaaaggagtgattatgattgagtagattgtgaggtttagcgtcggataggttatcgtgcgttatttgatttattagtatatcgagcgggacggggttgaacgtcgttttatacgcggagtttttgggattttcggttatggaaatgttattggtttgggttaggcgtttttgtagaatgaggcggttttcgacgatgaggaaggtcgatttgagtattggatgggtcggaacgagtaaggtatggtttacgtttgtttcgtttacgttcgcgttacgaatcggttgtaggcgttagttgttatcgcgtttattgggtcgggttcgtttaatatggttatcggtgcggttttcgttattatta

SEQ ID NO: 34378 - DNA, 712 bp, Artificial Sequence
  chemically treated genomic DNA (Homo sapiens) CpG-island No: 34378
taataataacgaaaaccgcaccgataaccatattaaacgaacccgacccaataaacgcgataacaactaacgcctacaaccgattcgtaacgcgaacgtaaacgaaacaaacgtaaaccataccttactcgttccgacccatccaatactcaaatcgaccttcctcatcgtcgaaaaccgcctcattctacaaaaacgcctaacccaaaccaataacatttccataaccgaaaatcccaaaaactccgcgtataaaacgacgttcaaccccgtcccgctcgatatactaataaatcaaataacgcacgataacctatccgacgctaaacctcacaatctactcaatcataatcactcctttaaatcgtccaccgctaacgacaaacgcgaatcgatatcttaatcctaccaaatttaacgaatccacccgtaatacgaatcgtcgactaatttccactcaacgacgcctaaccccgccatcacattaaaataatacaaatcgtaaccgaaaacgactacacacgacccataccaaccatacgacaccaaaactacgtcaccgttcgaaatcatctctaccacgtaaataaaacgatccgacgtaccataaatcccgtaaaataccatccctaaaccgtactcgtcaccgcgaatctcgaaataataaatctcctcgaattcgtactcgacctacgactcctcgtcgtactta

SEQ ID NO: 34379 - DNA, 712 bp, Artificial Sequence
  chemically treated genomic DNA (Homo sapiens) CpG-island No: 34379
tggtggtggcgagagtcgtatcggtgattatgttgagcgaattcggtttaatggacgcggtggtagttaacgtttgtaatcggttcgtagcgcgggcgtaggcggaataggcgtgaattatattttgttcgtttcggtttatttagtatttaagtcggttttttttatcgtcgggggtcgttttattttgtaaaagcgtttggtttaaattagtagtatttttatggtcgaagattttaaagatttcgcgtatgaagcggcgtttaatttcgtttcgttcggtgtattgatgagttagatagcgtacgatggtttgttcgacgttgagttttatagtttgtttagttataattatttttttgagtcgtttatcgttagcggtaggcgcgggtcgatattttggttttgttaagtttgacgaatttattcgtaatgcggatcgtcgattgatttttatttagcggcgtttggtttcgttattatattgaggtagtataagtcgtagtcgggggcggttgtatacggtttatgttagttatgcggtattagagttacgttatcgttcgaaattatttttgttacgtggatgggacggttcggcgtgttataggtttcgtggaatgttatttttgggtcgtgttcgttatcgcgaatttcgaaatagtagattttttcgagttcgtgttcgatttgcgatttttcgtcgtgtttg

SEQ ID NO: 34380 - DNA, 712 bp, Artificial Sequence
  chemically treated genomic DNA (Homo sapiens) CpG-island No: 34380
caaacacgacgaaaaatcgcaaatcgaacacgaactcgaaaaaatctactatttcgaaattcgcgataacgaacacgacccaaaaataacattccacgaaacctataacacgccgaaccgtcccatccacgtaacaaaaataatttcgaacgataacgtaactctaataccgcataactaacataaaccgtatacaaccgcccccgactacgacttatactacctcaatataataacgaaaccaaacgccgctaaataaaaatcaatcgacgatccgcattacgaataaattcgtcaaacttaacaaaaccaaaatatcgacccgcgcctaccgctaacgataaacgactcaaaaaaataattataactaaacaaactataaaactcaacgtcgaacaaaccatcgtacgctatctaactcatcaatacaccgaacgaaacgaaattaaacgccgcttcatacgcgaaatctttaaaatcttcgaccataaaaatactactaatttaaaccaaacgcttttacaaaataaaacgacccccgacgataaaaaaaaccgacttaaatactaaataaaccgaaacgaacaaaatataattcacgcctattccgcctacgcccgcgctacgaaccgattacaaacgttaactaccaccgcgtccattaaaccgaattcgctcaacataatcaccgatacgactctcgccaccacca

SEQ ID NO: 34381 - DNA, 932 bp, Artificial Sequence
  chemically treated genomic DNA (Homo sapiens) CpG-island No: 34381
ggcgggaacgtacgtgtcgaaatattgcgtacggtgacgtacgttttcgttattcgtcggggcgattttttggtagtggtcggtgttgagatcggtaagattttggtcgaaggtgacgtcgaggtttttgaggttatcgattttgttgtttggtatgtcgatcgagtcgaggagttcgagggcgtcgacggtgtttagtttgtgtcgttacgagtgatcgtcgttatttcgtcgtggaatttcgttttgtttattatcgtcggatttatttttgtcgttttggtcgtcggatcgttagtattatttaagttcgttttataggttcgttattgtgttgtcgttatttttgaatgtttgtgggaggttgggatttcgcgggacgttttgtagttcgtcgatgttgaggaaaatgaggttggtaaatatttggtgagttatttcgaggtcgatcgggttatttttacgggagtttgggaaacggttaagttgtttcggtcgtggcgttatgatttgttagtgttggtcgagattagtggtaagaattttattatcgttatagagaacgttgattacgatttggtcgtagtcgatattattaagtcggttttcggtaatgtcggatagaagtgttcggtagtatcgtttattattttggtgggttaggtttatcggttttagcgattgcgttattagatttttgacgtcgtttttttaattcgggtgggatcgtcgtcggatttgcgtttttagatgggttcgtttgtcgagttcgttagcggtaaattgttcgatggtttgacgaagtttgattcgggttaggaatgggttttggaatcggtgcgtatcgacgaggaaggtcggtattggtttttcggcgtgcgtagtggtattaaatcgggggattcgtattattttattgagtatttcggttt

SEQ ID NO: 34382 - DNA, 932 bp, Artificial Sequence
  chemically treated genomic DNA (Homo sapiens) CpG-island No: 34382
aaaccgaaatactcaataaaataatacgaatcccccgatttaataccactacgcacgccgaaaaaccaataccgaccttcctcgtcgatacgcaccgattccaaaacccattcctaacccgaatcaaacttcgtcaaaccatcgaacaatttaccgctaacgaactcgacaaacgaacccatctaaaaacgcaaatccgacgacgatcccacccgaattaaaaaaacgacgtcaaaaatctaataacgcaatcgctaaaaccgataaacctaacccaccaaaataataaacgatactaccgaacacttctatccgacattaccgaaaaccgacttaataatatcgactacgaccaaatcgtaatcaacgttctctataacgataataaaattcttaccactaatctcgaccaacactaacaaatcataacgccacgaccgaaacaacttaaccgtttcccaaactcccgtaaaaataacccgatcgacctcgaaataactcaccaaatatttaccaacctcattttcctcaacatcgacgaactacaaaacgtcccgcgaaatcccaacctcccacaaacattcaaaaataacgacaacacaataacgaacctataaaacgaacttaaataatactaacgatccgacgaccaaaacgacaaaaataaatccgacgataataaacaaaacgaaattccacgacgaaataacgacgatcactcgtaacgacacaaactaaacaccgtcgacgccctcgaactcctcgactcgatcgacataccaaacaacaaaatcgataacctcaaaaacctcgacgtcaccttcgaccaaaatcttaccgatctcaacaccgaccactaccaaaaaatcgccccgacgaataacgaaaacgtacgtcaccgtacgcaatatttcgacacgtacgttcccgcc

SEQ ID NO: 34383 - DNA, 932 bp, Artificial Sequence
  chemically treated genomic DNA (Homo sapiens) CpG-island No: 34383
gggtcgaagtatttagtgaggtggtacggatttttcggtttgatgttattgcgtacgtcgggagattagtatcggtttttttcgtcgatgcgtatcggttttagggtttatttttggttcgggttaagtttcgttaaattatcgagtaatttgtcgttggcgggttcggtaagcggatttatttgggagcgtaggttcgacggcgattttattcgaattgaggaggcggcgttaaggatttggtggcgtaatcgttgagatcgataggtttgatttattaggataatgagcgatgttgtcgagtatttttgttcggtattgtcgaaagtcgatttgatgatgtcggttgcggttaagtcgtagttagcgttttttgtgacgataatggagtttttgttattagtttcggttagtattggtaggttatgacgttacgatcggaatagtttggtcgttttttaagttttcgtgaggatgattcgatcgatttcggggtggtttattaggtgtttattagttttattttttttaatatcgacgagttgtagaacgtttcgcgggattttagttttttataggtatttagagatgacggtagtatagtggcgggtttgtggagcgggtttgagtagtattgacgattcggcggttagagcggtaagggtggattcggcggtaatagatagggcgaagttttacggcggggtgacgacggttattcgtggcggtataaattgggtatcgtcgacgttttcgagtttttcggttcggtcgatatattaagtagtaaagtcgatagttttagaaatttcgacgttattttcggttaggattttgtcggttttagtatcggttattgttaaaaggtcgtttcggcgagtagcgaaagcgtgcgttatcgtgcgtagtatttcggtacgtgcgttttcgtt

SEQ ID NO: 34384 - DNA, 932 bp, Artificial Sequence
  chemically treated genomic DNA (Homo sapiens) CpG-island No: 34384
aacgaaaacgcacgtaccgaaatactacgcacgataacgcacgctttcgctactcgccgaaacgaccttttaacaataaccgatactaaaaccgacaaaatcctaaccgaaaataacgtcgaaatttctaaaactatcgactttactacttaatatatcgaccgaaccgaaaaactcgaaaacgtcgacgatacccaatttataccgccacgaataaccgtcgtcaccccgccgtaaaacttcgccctatctattaccgccgaatccacccttaccgctctaaccgccgaatcgtcaatactactcaaacccgctccacaaacccgccactatactaccgtcatctctaaatacctataaaaaactaaaatcccgcgaaacgttctacaactcgtcgatattaaaaaaaataaaactaataaacacctaataaaccaccccgaaatcgatcgaatcatcctcacgaaaacttaaaaaacgaccaaactattccgatcgtaacgtcataacctaccaatactaaccgaaactaataacaaaaactccattatcgtcacaaaaaacgctaactacgacttaaccgcaaccgacatcatcaaatcgactttcgacaataccgaacaaaaatactcgacaacatcgctcattatcctaataaatcaaacctatcgatctcaacgattacgccaccaaatccttaacgccgcctcctcaattcgaataaaatcgccgtcgaacctacgctcccaaataaatccgcttaccgaacccgccaacgacaaattactcgataatttaacgaaacttaacccgaaccaaaaataaaccctaaaaccgatacgcatcgacgaaaaaaaccgatactaatctcccgacgtacgcaataacatcaaaccgaaaaatccgtaccacctcactaaatacttcgaccc

SEQ ID NO: 34385 - DNA, 572 bp, Artificial Sequence
  chemically treated genomic DNA (Homo sapiens) CpG-island No: 34385
gtcgtggttatagtgcgtggataggtcgtggttgtagtgtgtggatagatcgtggttgtagtgtgtggataggtcgtggttatagtgtgtggataggtcgtggttatagtgtgtggataggtcgtggttatagtgtgtggatagatcgtggttgtagtgtgtggataggtcgtggttatagtgtgtggataggtcgtggttatagtgtgtggataggtcgtggttgtagtgcgtggataggtcgtggttgtagtgcgtggataggtcgtggttgtagtgtgtggataggtcgtggttatagtgtgtggataggtcgtggttatagtgtgtggataggtcgtggttgtagcgtgtggatgggtcgtggttatagcgtgtggataggtcgtggttatagcgtgtggatgggtcgtggttatagcgtgtggatgggtcgtggttatagcgtgtggatgggtcgtggttatagcgtgtggatgggtcgtggttatagcgtgtggatgggtcgtggttatagtgtgtggatagatcgtggttacgttttgtggataaagtatggttatagtgtttag

SEQ ID NO: 34386 - DNA, 572 bp, Artificial Sequence
  chemically treated genomic DNA (Homo sapiens) CpG-island No: 34386
ctaaacactataaccatactttatccacaaaacgtaaccacgatctatccacacactataaccacgacccatccacacgctataaccacgacccatccacacgctataaccacgacccatccacacgctataaccacgacccatccacacgctataaccacgacccatccacacgctataaccacgacctatccacacgctataaccacgacccatccacacgctacaaccacgacctatccacacactataaccacgacctatccacacactataaccacgacctatccacacactacaaccacgacctatccacgcactacaaccacgacctatccacgcactacaaccacgacctatccacacactataaccacgacctatccacacactataaccacgacctatccacacactacaaccacgatctatccacacactataaccacgacctatccacacactataaccacgacctatccacacactataaccacgacctatccacacactacaaccacgatctatccacacactacaaccacgacctatccacgcactataaccacgac

SEQ ID NO: 34387 - DNA, 572 bp, Artificial Sequence
  chemically treated genomic DNA (Homo sapiens) CpG-island No: 34387
ttaaatattgtaattatgttttatttataaaacgtaattacggtttatttatatattgtaattacggtttatttatacgttgtgattacggtttatttatacgttgtgattacggtttatttatacgttgtgattacggtttatttatacgttgtaattacggtttatttatacgttgtaattacggtttatttatacgttgtaattacggtttatttatacgttgtaattacggtttatttatatattgtaattacggtttatttatatattgtaattacggtttatttatatattgtaattacggtttatttacgtattgtaattacggtttatttacgtattgtaattacggtttatttatatattgtaattacggtttatttatatattgtaattacggtttatttatatattgtagttacggtttatttatatattgtagttacggtttatttatatattgtagttacggtttatttatatattgtaattacggtttatttatatattgtagttacggtttatttatatattgtaattacggtttatttacgtattgtaattacggt

SEQ ID NO: 34388 - DNA, 572 bp, Artificial Sequence
  chemically treated genomic DNA (Homo sapiens) CpG-island No: 34388
accgtaattacaatacgtaaataaaccgtaattacaatatataaataaaccgtaactacaatatataaataaaccgtaattacaatatataaataaaccgtaactacaatatataaataaaccgtaactacaatatataaataaaccgtaactacaatatataaataaaccgtaattacaatatataaataaaccgtaattacaatatataaataaaccgtaattacaatacgtaaataaaccgtaattacaatacgtaaataaaccgtaattacaatatataaataaaccgtaattacaatatataaataaaccgtaattacaatatataaataaaccgtaattacaacgtataaataaaccgtaattacaacgtataaataaaccgtaattacaacgtataaataaaccgtaattacaacgtataaataaaccgtaatcacaacgtataaataaaccgtaatcacaacgtataaataaaccgtaatcacaacgtataaataaaccgtaattacaatatataaataaaccgtaattacgttttataaataaaacataattacaatatttaa

SEQ ID NO: 34389 - DNA, 528 bp, Artificial Sequence
  chemically treated genomic DNA (Homo sapiens) CpG-island No: 34389
tatatgtatttgttatatacgtgtattttttatatacgtgttttttttatatatatgtattttttatatacgtgtattttttatatacgtgtattttttatatatatgtattttttatatacgtgtattttttatatacgtgttttttttatatatatgtatttgttatatacgtgtattttttatatacgtgttttttttatatatatgtattttttatatacgtgttttttttatatatatgtattttttatatacgtgtatttttatatatatgtattttttatatacgtgtattttttttatacgtgtattttttatatacgtgtattttttatatatgtgtattttttatatacgtgttttttttatatacgtgtattttttatatacgtgttttttttatatacgtgtttattttttatatacgtgtattttttatatacgtgtattttttatatatgtgtattttttatatacgtgtatatttatattgatgtattttttatatacgtgttttttttatat

SEQ ID NO: 34390 - DNA, 528 bp, Artificial Sequence
  chemically treated genomic DNA (Homo sapiens) CpG-island No: 34390
atataaaaaaaacacgtatataaaaaatacatcaatataaatatacacgtatataaaaaatacacatatataaaaaatacacgtatataaaaaatacacgtatataaaaaataaacacgtatataaaaaaaacacgtatataaaaaatacacgtatataaaaaaaacacgtatataaaaaatacacatatataaaaaatacacgtatataaaaaatacacgtataaaaaaaatacacgtatataaaaaatacatatatataaaaatacacgtatataaaaaatacatatatataaaaaaaacacgtatataaaaaatacatatatataaaaaaaacacgtatataaaaaatacacgtatataacaaatacatatatataaaaaaaacacgtatataaaaaatacacgtatataaaaaatacatatatataaaaaatacacgtatataaaaaatacacgtatataaaaaatacatatatataaaaaaaacacgtatataaaaaatacacgtatataacaaatacatata

SEQ ID NO: 34391 - DNA, 528 bp, Artificial Sequence
  chemically treated genomic DNA (Homo sapiens) CpG-island No: 34391
gtgtgaagagagtacgtgtgtgaggggtgtattagtgtgggtgtgtacgtgtgtgaggggtgtatatgtatgaggggtgtacgtgtgtgaggggtgtacgtgtgtgaggggtgagtacgtgtgtgaggggagtacgtgtgtgaggggtgtacgtgtgtgaggggagtacgtgtgtgagggatgtatatgtgtgaggggtgtacgtgtgtgaggggtgtacgtgtgagaggggtgtacgtgtgtgaggggtgtatgtgtgtgggggtgtacgtgtgtgagggatgtatgtgtgtgaggagagtacgtgtgtgagggatgtatgtgtgtgaggagagtacgtgtgtgaggggtgtacgtgtgtgatagatgtatgtgtgtgaggagagtacgtgtgtgaggggtgtacgtgtgtgaggggtgtatgtgtgtgaggggtgtacgtgtgtgagggatgtacgtgtgtgaggggtgtatgtgtgtgaggagagtacgtgtgtgaggggtgtacgtgtgtgatagatgtatgtg

SEQ ID NO: 34392 - DNA, 528 bp, Artificial Sequence
  chemically treated genomic DNA (Homo sapiens) CpG-island No: 34392
cacatacatctatcacacacgtacacccctcacacacgtactctcctcacacacatacacccctcacacacgtacatccctcacacacgtacacccctcacacacatacacccctcacacacgtacacccctcacacacgtactctcctcacacacatacatctatcacacacgtacacccctcacacacgtactctcctcacacacatacatccctcacacacgtactctcctcacacacatacatccctcacacacgtacacccccacacacatacacccctcacacacgtacacccctctcacacgtacacccctcacacacgtacacccctcacacatatacatccctcacacacgtactcccctcacacacgtacacccctcacacacgtactcccctcacacacgtactcacccctcacacacgtacacccctcacacacgtacacccctcatacatatacacccctcacacacgtacacacccacactaatacacccctcacacacgtactctcttcacac

SEQ ID NO: 34393 - DNA, 500 bp, Artificial Sequence
  chemically treated genomic DNA (Homo sapiens) CpG-island No: 34393
  unsure (498)
attagttcgtttgtaaggagagaatcggaggttacgcggtcgtcgttaggaataatacgcgtagtatggaacggggataaggagagtagataagaagagggcgattagtgaaacgatatagatagttttataacgatttatatagtggagtttattaaacggtatattatcgataatcgagtagtatagacgtgtttttggatcgataattagtatcgataatattagtcggaatgtatatgtaacggttattttcgattcgcgtttcgtgagatcgtagtaagatttaaagtgtcgttttcgtttcgtatgttgagatcgtacgaaggcgatatacgaaattttttttaaatatttacgaattcggtttttatacgtagattagatagaacgtcggtttcgttatatcgttgtcgcgatcgtttgttataatatatataatacgaagaattgttacgagaatcgggcgcgcgacgttatataagtaaaaggattaanta

SEQ ID NO: 34394 - DNA, 500 bp, Artificial Sequence
  chemically treated genomic DNA (Homo sapiens) CpG-island No: 34394
  unsure (3)
tanttaatccttttacttatataacgtcgcgcgcccgattctcgtaacaattcttcgtattatatatattataacaaacgatcgcgacaacgatataacgaaaccgacgttctatctaatctacgtataaaaaccgaattcgtaaatatttaaaaaaaatttcgtatatcgccttcgtacgatctcaacatacgaaacgaaaacgacactttaaatcttactacgatctcacgaaacgcgaatcgaaaataaccgttacatatacattccgactaatattatcgatactaattatcgatccaaaaacacgtctatactactcgattatcgataatataccgtttaataaactccactatataaatcgttataaaactatctatatcgtttcactaatcgccctcttcttatctactctccttatccccgttccatactacgcgtattattcctaacgacgaccgcgtaacctccgattctctccttacaaacgaactaat

SEQ ID NO: 34395 - DNA, 500 bp, Artificial Sequence
  chemically treated genomic DNA (Homo sapiens) CpG-island No: 34395
  unsure (3)
tgnttaatttttttgtttgtgtggcgtcgcgcgttcggttttcgtaatagtttttcgtattatgtgtgttgtagtagacgatcgcggtagcggtgtaacggggtcgacgttttatttgatttgcgtgtagaggtcgggttcgtaggtgtttggagagagtttcgtgtgtcgttttcgtgcggttttagtatgcggagcgggagcgatattttgggttttgttgcggttttacggagcgcgggtcggagatggtcgttgtatgtatatttcggttagtgttgtcggtgttagttgtcggtttaggggtacgtttatattgttcgattgtcggtggtgtatcgtttggtgggttttattgtgtggatcgttgtggggttgtttgtgtcgttttattgatcgttttttttttgtttattttttttgttttcgttttatgttgcgcgtgttatttttggcggcggtcgcgtggttttcggttttttttttgtaggcggattggt

SEQ ID NO: 34396 - DNA, 500 bp, Artificial Sequence
  chemically treated genomic DNA (Homo sapiens) CpG-island No: 34396
  unsure (498)
accaatccgcctacaaaaaaaaaaccgaaaaccacgcgaccgccgccaaaaataacacgcgcaacataaaacgaaaacaaaaaaaataaacaaaaaaaaaacgatcaataaaacgacacaaacaaccccacaacgatccacacaataaaacccaccaaacgatacaccaccgacaatcgaacaatataaacgtacccctaaaccgacaactaacaccgacaacactaaccgaaatatacatacaacgaccatctccgacccgcgctccgtaaaaccgcaacaaaacccaaaatatcgctcccgctccgcatactaaaaccgcacgaaaacgacacacgaaactctctccaaacacctacgaacccgacctctacacgcaaatcaaataaaacgtcgaccccgttacaccgctaccgcgatcgtctactacaacacacataatacgaaaaactattacgaaaaccgaacgcgcgacgccacacaaacaaaaaaattaanca

SEQ ID NO: 34397 - DNA, 1050 bp, Artificial Sequence
  chemically treated genomic DNA (Homo sapiens) CpG-island No: 34397
gagtcgatattttagatttagtattttttcgggattttttcgcgaggacgaagggagtcgatattttatatttagtattttttcgggattttttcgcgaggaggaagggagtcgatattttagatttagtattttttcgggattttttcgcgaggacgaagggagtcgatattttagatttagtattttttcgggattttttcgcgaggacgaagggagtcgatattttagatttagtattttttcgtgattttttcgcgaggaggaagggagtcgatattttagatttagtattttttcgggattttttcgcgaggacgaagggagtcgatattttagatttagtattttttcgggattttttcgcgaggacgaagggagtcgatattttagatttagtattttttcgggattttttcgcgaggacgaagggagtcgatattttagatttagtattttttcgggattttttcgcgaggacgaagggagtcgatattttagatttagtattttttcgggattttttcgcgaggacgaagggagtcgatattttagatttagtattttttcgggattttttcgcgaggaggaagggagtcgatattttagatttagtattttttcgggattttttcgcgaggaggaagggagtcgatattttagatttagtattttttcgggattttttcgcgaggaggaagggagtcgatattttagatttagtattttttcgggattttttcgcgaggaggaagggagtcgatattttagatttagtattttttcgggattttttcgcgaggaggaagggagtcgatattttagatttagtattttttcgggattttttcgcgaggaggaagggagtcgatattttagatttagtattttttcgtgattttttcgcgaggaggaagggagtcgatattttagatttagtattttttcgggattttttcgcgaggaggaagggagtcgatattttagatttagtattttttcgggatggtttcgcgaggacgaagggagtcgagattttagatttagtat

SEQ ID NO: 34398 - DNA, 1050 bp, Artificial Sequence
  chemically treated genomic DNA (Homo sapiens) CpG-island No: 34398
atactaaatctaaaatctcgactcccttcgtcctcgcgaaaccatcccgaaaaaatactaaatctaaaatatcgactcccttcctcctcgcgaaaaaatcccgaaaaaatactaaatctaaaatatcgactcccttcctcctcgcgaaaaaatcacgaaaaaatactaaatctaaaatatcgactcccttcctcctcgcgaaaaaatcccgaaaaaatactaaatctaaaatatcgactcccttcctcctcgcgaaaaaatcccgaaaaaatactaaatctaaaatatcgactcccttcctcctcgcgaaaaaatcccgaaaaaatactaaatctaaaatatcgactcccttcctcctcgcgaaaaaatcccgaaaaaatactaaatctaaaatatcgactcccttcctcctcgcgaaaaaatcccgaaaaaatactaaatctaaaatatcgactcccttcctcctcgcgaaaaaatcccgaaaaaatactaaatctaaaatatcgactcccttcgtcctcgcgaaaaaatcccgaaaaaatactaaatctaaaatatcgactcccttcgtcctcgcgaaaaaatcccgaaaaaatactaaatctaaaatatcgactcccttcgtcctcgcgaaaaaatcccgaaaaaatactaaatctaaaatatcgactcccttcgtcctcgcgaaaaaatcccgaaaaaatactaaatctaaaatatcgactcccttcgtcctcgcgaaaaaatcccgaaaaaatactaaatctaaaatatcgactcccttcctcctcgcgaaaaaatcacgaaaaaatactaaatctaaaatatcgactcccttcgtcctcgcgaaaaaatcccgaaaaaatactaaatctaaaatatcgactcccttcgtcctcgcgaaaaaatcccgaaaaaatactaaatctaaaatatcgactcccttcctcctcgcgaaaaaatcccgaaaaaatactaaatataaaatatcgactcccttcgtcctcgcgaaaaaatcccgaaaaaatactaaatctaaaatatcgactc

SEQ ID NO: 34399 - DNA, 1050 bp, Artificial Sequence
  chemically treated genomic DNA (Homo sapiens) CpG-island No: 34399
gtgttgagtttggagtttcgatttttttcgttttcgcggggttatttcggggaagtgttgagtttggagtatcgatttttttttttttcgcggggaaatttcggggaagtgttgagtttggagtatcgatttttttttttttcgcggggaaattacggggaagtgttgagtttggagtatcgatttttttttttttcgcggggaaatttcggggaagtgttgagtttggagtatcgatttttttttttttcgcggggaaatttcggggaagtgttgagtttggagtatcgatttttttttttttcgcggggaaatttcggggaagtgttgagtttggagtatcgatttttttttttttcgcggggaaatttcggggaagtgttgagtttggagtatcgatttttttttttttcgcggggaaatttcggggaagtgttgagtttggagtatcgatttttttttttttcgcggggaaatttcggggaagtgttgagtttggagtatcgatttttttcgttttcgcggggaaatttcggggaagtgttgagtttggagtatcgatttttttcgttttcgcggggaaatttcggggaagtgttgagtttggagtatcgatttttttcgttttcgcggggaaatttcggggaagtgttgagtttggagtatcgatttttttcgttttcgcggggaaatttcggggaagtgttgagtttggagtatcgatttttttcgttttcgcggggaaatttcggggaagtgttgagtttggagtatcgatttttttttttttcgcggggaaattacggggaagtgttgagtttggagtatcgatttttttcgttttcgcggggaaatttcggggaagtgttgagtttggagtatcgatttttttcgttttcgcggggaaatttcggggaagtgttgagtttggagtatcgatttttttttttttcgcggggaaatttcggggaagtgttgagtatggagtatcgatttttttcgttttcgcggggaaatttcggggaagtgttgagtttggagtatcgattt

SEQ ID NO: 34400 - DNA, 1050 bp, Artificial Sequence
  chemically treated genomic DNA (Homo sapiens) CpG-island No: 34400
aaatcgatactccaaactcaacacttccccgaaatttccccgcgaaaacgaaaaaaatcgatactccatactcaacacttccccgaaatttccccgcgaaaaaaaaaaaaatcgatactccaaactcaacacttccccgaaatttccccgcgaaaacgaaaaaaatcgatactccaaactcaacacttccccgaaatttccccgcgaaaacgaaaaaaatcgatactccaaactcaacacttccccgtaatttccccgcgaaaaaaaaaaaaatcgatactccaaactcaacacttccccgaaatttccccgcgaaaacgaaaaaaatcgatactccaaactcaacacttccccgaaatttccccgcgaaaacgaaaaaaatcgatactccaaactcaacacttccccgaaatttccccgcgaaaacgaaaaaaatcgatactccaaactcaacacttccccgaaatttccccgcgaaaacgaaaaaaatcgatactccaaactcaacacttccccgaaatttccccgcgaaaacgaaaaaaatcgatactccaaactcaacacttccccgaaatttccccgcgaaaaaaaaaaaaatcgatactccaaactcaacacttccccgaaatttccccgcgaaaaaaaaaaaaatcgatactccaaactcaacacttccccgaaatttccccgcgaaaaaaaaaaaaatcgatactccaaactcaacacttccccgaaatttccccgcgaaaaaaaaaaaaatcgatactccaaactcaacacttccccgaaatttccccgcgaaaaaaaaaaaaatcgatactccaaactcaacacttccccgaaatttccccgcgaaaaaaaaaaaaatcgatactccaaactcaacacttccccgtaatttccccgcgaaaaaaaaaaaaatcgatactccaaactcaacacttccccgaaatttccccgcgaaaaaaaaaaaaatcgatactccaaactcaacacttccccgaaataaccccgcgaaaacgaaaaaaatcgaaactccaaactcaacac

SEQ ID NO: 34401 - DNA, 509 bp, Artificial Sequence
  chemically treated genomic DNA (Homo sapiens) CpG-island No: 34401
ttacggggattggcgaggcggcgagagcgcgggacgttttttcgggattgtatggtggagatggcgacgggcgttgacggcgagaaaggttgtaggattaggttttggtttttttttaattttttttcgttgacgttaagataagtcgcgttttggaatagattgcggtacgggtcgtatttttgaatttagttttatttcgcggtgaggtttttttttattgtatagatagtggttgatttatttttttttattttcgcgtttttttttcgttttcgttcgtttttataggattcgttggtttgtagtcgcggaagtttttattgtcgcgttggcgatttcgttaggcgttcgggagaattattgtttttaggttgtttttcgcgtttcgaggtttgttggggttttcggacggtcgggcggggatagagggaaagaaatcgttttgtatgttgggagtagtagtttgtgtaatatcgcgagttgttttttagttgattgttttaata

SEQ ID NO: 34402 - DNA, 509 bp, Artificial Sequence
  chemically treated genomic DNA (Homo sapiens) CpG-island No: 34402
tattaaaacaatcaactaaaaaacaactcgcgatattacacaaactactactcccaacatacaaaacgatttctttccctctatccccgcccgaccgtccgaaaaccccaacaaacctcgaaacgcgaaaaacaacctaaaaacaataattctcccgaacgcctaacgaaatcgccaacgcgacaataaaaacttccgcgactacaaaccaacgaatcctataaaaacgaacgaaaacgaaaaaaaaacgcgaaaataaaaaaaaataaatcaaccactatctatacaataaaaaaaaacctcaccgcgaaataaaactaaattcaaaaatacgacccgtaccgcaatctattccaaaacgcgacttatcttaacgtcaacgaaaaaaaattaaaaaaaaaccaaaacctaatcctacaacctttctcgccgtcaacgcccgtcgccatctccaccatacaatcccgaaaaaacgtcccgcgctctcgccgcctcgccaatccccgtaa

SEQ ID NO: 34403 - DNA, 509 bp, Artificial Sequence
  chemically treated genomic DNA (Homo sapiens) CpG-island No: 34403
tgttagagtagttaattaaaggatagttcgcgatattatataaattattatttttaatatgtaaagcggtttttttttttttgttttcgttcggtcgttcgagagttttagtaggtttcggggcgcgaaaggtaatttgggagtagtagttttttcgggcgtttagcgggatcgttagcgcggtagtgggggttttcgcggttgtaagttagcgggttttgtgagggcgagcggaggcggagaaagggcgcgggagtgagagagggtgagttagttattgtttatgtaataaagggaggttttatcgcgggatagggttgaatttagaagtgcggttcgtgtcgtagtttgttttaggacgcggtttgttttagcgttagcgagggaaggttgaggaggagttagagtttggttttgtagtttttttcgtcgttagcgttcgtcgttatttttattatgtagtttcgggaagacgtttcgcgttttcgtcgtttcgttagttttcgtgg

SEQ ID NO: 34404 - DNA, 509 bp, Artificial Sequence
  chemically treated genomic DNA (Homo sapiens) CpG-island No: 34404
ccacgaaaactaacgaaacgacgaaaacgcgaaacgtcttcccgaaactacataataaaaataacgacgaacgctaacgacgaaaaaaactacaaaaccaaactctaactcctcctcaaccttccctcgctaacgctaaaacaaaccgcgtcctaaaacaaactacgacacgaaccgcacttctaaattcaaccctatcccgcgataaaacctccctttattacataaacaataactaactcaccctctctcactcccgcgccctttctccgcctccgctcgccctcacaaaacccgctaacttacaaccgcgaaaacccccactaccgcgctaacgatcccgctaaacgcccgaaaaaactactactcccaaattacctttcgcgccccgaaacctactaaaactctcgaacgaccgaacgaaaacaaaaaaaaaaaaaccgctttacatattaaaaataataatttatataatatcgcgaactatcctttaattaactactctaaca

SEQ ID NO: 34405 - DNA, 511 bp, Artificial Sequence
  chemically treated genomic DNA (Homo sapiens) CpG-island No: 34405
tacggggattggttaggcggcgagagcgcggggcgttttttcgggattgtatggtggagatggcgacgggcgttgatggcgagaaacgttgtaggattcggttttggtttttttttaattttttttcgttgacgttaagatagtagcgttttcgaagagatagtagtacgagtttatttattgaatttaattttatttcgtagagtcgtttttcgttatcgtttagatagtggttgatttatttttttttattttcgcgtttttttttcgcgtttgttcgtttttataggattcgttggtttggagtcgtagaagtcgttattgtagcgtgggcgataatgttaggcgtttaggagaattatcgtttttaggttgtttttcgcgtttcgagggttgttgggattttcggattttcgggtcgagatcgagggaaagaattcgttttgtatgtcgggagtagtagtttgtgtaatatcgcgatttttttttggtgttttttgttttagttgat

SEQ ID NO: 34406 - DNA, 511 bp, Artificial Sequence
  chemically treated genomic DNA (Homo sapiens) CpG-island No: 34406
atcaactaaaacaaaaaacaccaaaaaaaaatcgcgatattacacaaactactactcccgacatacaaaacgaattctttccctcgatctcgacccgaaaatccgaaaatcccaacaaccctcgaaacgcgaaaaacaacctaaaaacgataattctcctaaacgcctaacattatcgcccacgctacaataacgacttctacgactccaaaccaacgaatcctataaaaacgaacaaacgcgaaaaaaaaacgcgaaaataaaaaaaaataaatcaaccactatctaaacgataacgaaaaacgactctacgaaataaaattaaattcaataaataaactcgtactactatctcttcgaaaacgctactatcttaacgtcaacgaaaaaaaattaaaaaaaaaccaaaaccgaatcctacaacgtttctcgccatcaacgcccgtcgccatctccaccatacaatcccgaaaaaacgccccgcgctctcgccgcctaaccaatccccgta

SEQ ID NO: 34407 - DNA, 511 bp, Artificial Sequence
  chemically treated genomic DNA (Homo sapiens) CpG-island No: 34407
gttagttaaaataaggaatattagagaaggatcgcgatattatataaattattattttcgatatgtaaagcggattttttttttcggtttcggttcgggagttcgagagttttagtagttttcggggcgcgaaaggtaatttgggagcggtagtttttttgggcgtttagtattgtcgtttacgttgtagtagcggtttttgcggttttaagttagcgggttttgtgaaggcgaatagacgcggagaaaggacgcgggagtgagagagggtgagttagttattgtttaaacgataacgggaggcggttttgcggggtagggttgaatttagtaaatgggttcgtgttgttgttttttcggagacgttgttattttagcgttagcgagggaaggttgaggaggagttagagtcgggttttgtagcgtttttcgttattagcgttcgtcgttatttttattatgtagtttcgggaagacgtttcgcgttttcgtcgtttagttagttttcgtg

SEQ ID NO: 34408 - DNA, 511 bp, Artificial Sequence
  chemically treated genomic DNA (Homo sapiens) CpG-island No: 34408
cacgaaaactaactaaacgacgaaaacgcgaaacgtcttcccgaaactacataataaaaataacgacgaacgctaataacgaaaaacgctacaaaacccgactctaactcctcctcaaccttccctcgctaacgctaaaataacaacgtctccgaaaaaacaacaacacgaacccatttactaaattcaaccctaccccgcaaaaccgcctcccgttatcgtttaaacaataactaactcaccctctctcactcccgcgtcctttctccgcgtctattcgccttcacaaaacccgctaacttaaaaccgcaaaaaccgctactacaacgtaaacgacaatactaaacgcccaaaaaaactaccgctcccaaattacctttcgcgccccgaaaactactaaaactctcgaactcccgaaccgaaaccgaaaaaaaaaatccgctttacatatcgaaaataataatttatataatatcgcgatccttctctaatattccttattttaactaac

SEQ ID NO: 34409 - DNA, 696 bp, Artificial Sequence
  chemically treated genomic DNA (Homo sapiens) CpG-island No: 34409
cggcgttagtttcggtttcgtttcgtaggtcgttgttacggaggcgttcgttcgttgtttcgttttttggcggtgtttgcgtgtgttcgggtgtgggtatatgtatttgtgtttgtaaattagggcgggttttttaaatcgaaagttgcgcggagttgggtttttgggattttagggttgcgggtaagggagatgggggattttttcgggatttcgatttcgatttgagtttagatttttcgcgttttggttttttgtttcgtatttttagggtcgtagtgttaatttcgtgtttttcgaagtggttcgttatttgtttcgtcgaggggagtcgttttttgggttaacgttgcgggagttcggacggttcgaagtatgttggttaggcgtaaggggagatcgatttataggggagagggtgggtaaggggacggcggttgggtttcggtatttcgcgaggggggttttgcgattttgatttagtagcggcgttttcgggttcgcgaggttttgacgattagcgggcgttttttcgggaattatatttgtttttcgttggtttcgagcgtttagagcgcgaagcggcggagtacggcgaatttacgattcgtgatgtttggtttaattttttgttttttatgggtgcgggtaggaacggagtagcggttgatgttttttttttaattttaaagtttt

SEQ ID NO: 34410 - DNA, 696 bp, Artificial Sequence
  chemically treated genomic DNA (Homo sapiens) CpG-island No: 34410
aaaactttaaaattaaaaaaaaaacatcaaccgctactccgttcctacccgcacccataaaaaacaaaaaattaaaccaaacatcacgaatcgtaaattcgccgtactccgccgcttcgcgctctaaacgctcgaaaccaacgaaaaacaaatataattcccgaaaaaacgcccgctaatcgtcaaaacctcgcgaacccgaaaacgccgctactaaatcaaaatcgcaaaacccccctcgcgaaataccgaaacccaaccgccgtccccttacccaccctctcccctataaatcgatctccccttacgcctaaccaacatacttcgaaccgtccgaactcccgcaacgttaacccaaaaaacgactcccctcgacgaaacaaataacgaaccacttcgaaaaacacgaaattaacactacgaccctaaaaatacgaaacaaaaaaccaaaacgcgaaaaatctaaactcaaatcgaaatcgaaatcccgaaaaaatcccccatctcccttacccgcaaccctaaaatcccaaaaacccaactccgcgcaactttcgatttaaaaaacccgccctaatttacaaacacaaatacatatacccacacccgaacacacgcaaacaccgccaaaaaacgaaacaacgaacgaacgcctccgtaacaacgacctacgaaacgaaaccgaaactaacgccg

SEQ ID NO: 34411 - DNA, 696 bp, Artificial Sequence
  chemically treated genomic DNA (Homo sapiens) CpG-island No: 34411
ggggttttgggattagggaggggatattagtcgttatttcgtttttgttcgtatttatgaagggtagaggattaggttaagtattacgaatcgtaggttcgtcgtgtttcgtcgtttcgcgttttggacgttcgagattagcgggaaataaatgtggttttcgagggggcgttcgttggtcgttaaaatttcgcgggttcggaggcgtcgttgttgggttagaatcgtagagtttttttcgcggggtatcgaggtttagtcgtcgtttttttgtttatttttttttttgtgagtcggtttttttttgcgtttggttagtatgtttcggatcgttcggattttcgtagcgttggtttaaggggcggtttttttcggcggagtaggtgacgaattatttcggaggatacggaattgatattgcggttttagagatacgggataaggggttagaacgcggggagtttaggtttagatcggagtcgggatttcgggaaaattttttattttttttgttcgtagttttagaattttagaaatttaatttcgcgtagttttcggtttggagagttcgttttggtttgtaagtatagatatatgtgtttatattcgaatatacgtagatatcgttagagagcgagatagcgagcgggcgttttcgtagtagcggtttgcggggcggaatcggagttggcgtcg

SEQ ID NO: 34412 - DNA, 696 bp, Artificial Sequence
  chemically treated genomic DNA (Homo sapiens) CpG-island No: 34412
cgacgccaactccgattccgccccgcaaaccgctactacgaaaacgcccgctcgctatctcgctctctaacgatatctacgtatattcgaatataaacacatatatctatacttacaaaccaaaacgaactctccaaaccgaaaactacgcgaaattaaatttctaaaattctaaaactacgaacaaaaaaaataaaaaattttcccgaaatcccgactccgatctaaacctaaactccccgcgttctaaccccttatcccgtatctctaaaaccgcaatatcaattccgtatcctccgaaataattcgtcacctactccgccgaaaaaaaccgccccttaaaccaacgctacgaaaatccgaacgatccgaaacatactaaccaaacgcaaaaaaaaaccgactcacaaaaaaaaaaataaacaaaaaaacgacgactaaacctcgataccccgcgaaaaaaactctacgattctaacccaacaacgacgcctccgaacccgcgaaattttaacgaccaacgaacgccccctcgaaaaccacatttatttcccgctaatctcgaacgtccaaaacgcgaaacgacgaaacacgacgaacctacgattcgtaatacttaacctaatcctctacccttcataaatacgaacaaaaacgaaataacgactaatatcccctccctaatcccaaaacccc

SEQ ID NO: 34413 - DNA, 580 bp, Artificial Sequence
  chemically treated genomic DNA (Homo sapiens) CpG-island No: 34413
ggaacgtcgtttcggtgtttggtaatattgttagtttttgtaattttttttaaaagtatttgtttggtcgagtagttaatttttttaaaaataaaaattcggtttgcgttcgtttaagtagcggggtttgtatatggagatgttataggtttcgcgtatagcgtagagggtcgcgatttttaagcgtatgttttaatagaaggtgcggttggaagattcgggttttcgggtttcgtttcggtttgttttttttcgtaggtgcgttggttagcgttcggcgtaggttgaagttttttttttttttttttaatttttataaaagtttggggcggcgcggtagtagtattgttgttttttcggtttttcgttttatttcggtcgggtcgggttcgttacgtttggcgcgttgagtaggttcggtcgcgtagcgtttatttttttttcgtttcgggtcggtagtgtggggcggcgcgttgggggcgcggcgtgtttggggatattttgtgatgttggcgagaataggatatgattttatatggcgagaagttttttagttttttaattattttacggtgttttt

SEQ ID NO: 34414 - DNA, 580 bp, Artificial Sequence
  chemically treated genomic DNA (Homo sapiens) CpG-island No: 34414
aaaaacaccgtaaaataattaaaaaactaaaaaacttctcgccatataaaatcatatcctattctcgccaacatcacaaaatatccccaaacacgccgcgcccccaacgcgccgccccacactaccgacccgaaacgaaaaaaaaataaacgctacgcgaccgaacctactcaacgcgccaaacgtaacgaacccgacccgaccgaaataaaacgaaaaaccgaaaaaacaacaatactactaccgcgccgccccaaacttttataaaaattaaaaaaaaaaaaaaaaaacttcaacctacgccgaacgctaaccaacgcacctacgaaaaaaaacaaaccgaaacgaaacccgaaaacccgaatcttccaaccgcaccttctattaaaacatacgcttaaaaatcgcgaccctctacgctatacgcgaaacctataacatctccatatacaaaccccgctacttaaacgaacgcaaaccgaatttttatttttaaaaaaattaactactcgaccaaacaaatacttttaaaaaaaattacaaaaactaacaatattaccaaacaccgaaacgacgttcc

SEQ ID NO: 34415 - DNA, 580 bp, Artificial Sequence
  chemically treated genomic DNA (Homo sapiens) CpG-island No: 34415
gaaggtatcgtgaaatgattaaggaattaaagagtttttcgttatgtgagattatgttttgttttcgttaatattataagatgtttttagatacgtcgcgtttttagcgcgtcgttttatattgtcggttcggagcgaggaaagggtaggcgttgcgcggtcgggtttgtttagcgcgttagacgtggcggattcggttcggtcggagtagagcgggaagtcgggagagtagtagtgttgttgtcgcgtcgttttagatttttataggggttggggggagggaaggaaggttttagtttgcgtcgggcgttagttagcgtatttacgggaaggggtagatcgaagcggagttcgggagttcgggttttttagtcgtattttttattaagatatgcgtttgggggtcgcggttttttgcgttgtgcgcggggtttgtgatatttttatgtgtaaatttcgttgtttagacgagcgtaggtcgggtttttgtttttgaagaaattaattgttcggttaagtaggtgtttttgaaaggggttgtaaaggttggtagtgttgttaggtatcgaggcgacgtttt

SEQ ID NO: 34416 - DNA, 580 bp, Artificial Sequence
  chemically treated genomic DNA (Homo sapiens) CpG-island No: 34416
aaaacgtcgcctcgatacctaacaacactaccaacctttacaacccctttcaaaaacacctacttaaccgaacaattaatttcttcaaaaacaaaaacccgacctacgctcgtctaaacaacgaaatttacacataaaaatatcacaaaccccgcgcacaacgcaaaaaaccgcgacccccaaacgcatatcttaataaaaaatacgactaaaaaacccgaactcccgaactccgcttcgatctaccccttcccgtaaatacgctaactaacgcccgacgcaaactaaaaccttccttccctccccccaacccctataaaaatctaaaacgacgcgacaacaacactactactctcccgacttcccgctctactccgaccgaaccgaatccgccacgtctaacgcgctaaacaaacccgaccgcgcaacgcctaccctttcctcgctccgaaccgacaatataaaacgacgcgctaaaaacgcgacgtatctaaaaacatcttataatattaacgaaaacaaaacataatctcacataacgaaaaactctttaattccttaatcatttcacgataccttc

SEQ ID NO: 34417 - DNA, 540 bp, Artificial Sequence
  chemically treated genomic DNA (Homo sapiens) CpG-island No: 34417
tttattcgcgtttcgggtattcgtttttggggcgttttcgtttgggacgtttttcgcgacgtagtggtcgcgcggacgggtagcgatagcgcgtatagcgttagggatagcgcgtaaagtaacgcgggcgcggggcggtgcggaattatggtggcgatagcggtaggggatttagtcggtagtcgcggtttcgggtcgtcgattttaagtagtcgttcgtttatttcgtttaagtcggggatcgtttttaagggagggcgcggggcggggatttgtttcggattttggagatatttgggtttttattcggatcgattcgatagggcgcggtagtttttgtattttagtttcggggcggagatttagtattaggtttgatatacggcgggcgttagttgtgtgtatattaaatgggcgtaggtacgagcggcggcgagtttagttgagttttttgcgacgtacgcgagttttttcgttttttcgtatttaatatttttagtaaaaaaataatatgaattaataatttttgaaagaaaaata

SEQ ID NO: 34418 - DNA, 540 bp, Artificial Sequence
  chemically treated genomic DNA (Homo sapiens) CpG-island No: 34418
tatttttctttcaaaaattattaattcatattatttttttactaaaaatattaaatacgaaaaaacgaaaaaactcgcgtacgtcgcaaaaaactcaactaaactcgccgccgctcgtacctacgcccatttaatatacacacaactaacgcccgccgtatatcaaacctaatactaaatctccgccccgaaactaaaatacaaaaactaccgcgccctatcgaatcgatccgaataaaaacccaaatatctccaaaatccgaaacaaatccccgccccgcgccctcccttaaaaacgatccccgacttaaacgaaataaacgaacgactacttaaaatcgacgacccgaaaccgcgactaccgactaaatcccctaccgctatcgccaccataattccgcaccgccccgcgcccgcgttactttacgcgctatccctaacgctatacgcgctatcgctacccgtccgcgcgaccactacgtcgcgaaaaacgtcccaaacgaaaacgccccaaaaacgaatacccgaaacgcgaataaa

SEQ ID NO: 34419 - DNA, 540 bp, Artificial Sequence
  chemically treated genomic DNA (Homo sapiens) CpG-island No: 34419
tgttttttttttaaaaattgttagtttatgttatttttttgttggaggtgttaggtgcggagaggcgagggggttcgcgtgcgtcgtaggaggtttagttgggttcgtcgtcgttcgtgtttgcgtttatttagtgtgtatatagttagcgttcgtcgtatgttaggtttggtgttgggttttcgtttcggagttggggtgtaggggttgtcgcgttttgtcgggtcgattcgggtgggaatttagatgtttttaagattcgagatagattttcgtttcgcgtttttttttgggggcggttttcggtttgggcgggatgggcgggcggttatttaaggtcggcgattcgaggtcgcggttgtcgattgggttttttgtcgttgtcgttattatggtttcgtatcgtttcgcgttcgcgttgttttgcgcgttgtttttggcgttgtgcgcgttgtcgttgttcgttcgcgcggttattgcgtcgcggggggcgttttaggcgggggcgttttaggggcgggtgttcgaggcgcgggtgag

SEQ ID NO: 34420 - DNA, 540 bp, Artificial Sequence
  chemically treated genomic DNA (Homo sapiens) CpG-island No: 34420
ctcacccgcgcctcgaacacccgcccctaaaacgcccccgcctaaaacgccccccgcgacgcaataaccgcgcgaacgaacaacgacaacgcgcacaacgccaaaaacaacgcgcaaaacaacgcgaacgcgaaacgatacgaaaccataataacgacaacgacaaaaaacccaatcgacaaccgcgacctcgaatcgccgaccttaaataaccgcccgcccatcccgcccaaaccgaaaaccgcccccaaaaaaaaacgcgaaacgaaaatctatctcgaatcttaaaaacatctaaattcccacccgaatcgacccgacaaaacgcgacaacccctacaccccaactccgaaacgaaaacccaacaccaaacctaacatacgacgaacgctaactatatacacactaaataaacgcaaacacgaacgacgacgaacccaactaaacctcctacgacgcacgcgaaccccctcgcctctccgcacctaacacctccaacaaaaaaataacataaactaacaatttttaaaaaaaaaaca

SEQ ID NO: 34421 - DNA, 663 bp, Artificial Sequence
  chemically treated genomic DNA (Homo sapiens) CpG-island No: 34421
cgcgtcgtggagggataggagggcggggattgggaggtgggtttttttcgattttgggcgttgattggttaatttttacgagggcgggatttcgattgggggcggggcggtaatttgggttttgtgtttttggttttttagggtattttcggcggtttcgggtttggtaacgaggacgggggagtgcgattgcgtttcgggtagtatggtcgagaagcggtatatacgggatttcgaagtttagcggtttttcgatttttttaagggtgagtttcgcgttttttgattttttttcgtggatcgagttttcgttcgtagcgtgcgtttcgaggtttgatagtcgggtttttggttagttttcgttgtttcgggttgggcgagattttaaagtcgcggtttttttttagtaaattgagtattacgaattttgtttggtagattgaggttacgatggaggggtggcgggttgttaacggtacgttttttatcgtacgggttttggttatttcgcggtcgttagatgttaagttttatgttagggttgtattatttcgtgttacgtacgcggattaggaaacgtagagggaattggtagttagcgaggcggggatcgggattttatattttattttttgtttatttttttttttttcgatttatttt

SEQ ID NO: 34422 - DNA, 663 bp, Artificial Sequence
  chemically treated genomic DNA (Homo sapiens) CpG-island No: 34422
aaaataaatcgaaaaaaaaaaaaataaacaaaaaataaaatataaaatcccgatccccgcctcgctaactaccaattccctctacgtttcctaatccgcgtacgtaacacgaaataatacaaccctaacataaaacttaacatctaacgaccgcgaaataaccaaaacccgtacgataaaaaacgtaccgttaacaacccgccacccctccatcgtaacctcaatctaccaaacaaaattcgtaatactcaatttactaaaaaaaaaccgcgactttaaaatctcgcccaacccgaaacaacgaaaactaaccaaaaacccgactatcaaacctcgaaacgcacgctacgaacgaaaactcgatccacgaaaaaaaatcaaaaaacgcgaaactcacccttaaaaaaatcgaaaaaccgctaaacttcgaaatcccgtatataccgcttctcgaccatactacccgaaacgcaatcgcactcccccgtcctcgttaccaaacccgaaaccgccgaaaataccctaaaaaaccaaaaacacaaaacccaaattaccgccccgcccccaatcgaaatcccgccctcgtaaaaattaaccaatcaacgcccaaaatcgaaaaaaacccacctcccaatccccgccctcctatccctccacgacgcg

SEQ ID NO: 34423 - DNA, 663 bp, Artificial Sequence
  chemically treated genomic DNA (Homo sapiens) CpG-island No: 34423
agagtgagtcgggaaaaaggggagtgggtaaagggtgagatgtggggtttcggttttcgtttcgttggttgttagttttttttgcgttttttagttcgcgtgcgtgatacgagatagtgtagttttggtatggggtttggtatttggcggtcgcgagataattagggttcgtgcgatgggaaacgtgtcgttggtagttcgttatttttttatcgtgattttagtttgttaaatagggttcgtgatgtttagtttattagggaggagtcgcggttttgagatttcgtttagttcgaagtagcggagattggttaggagttcggttgttagatttcggagcgtacgttgcgggcgggggttcggtttacgggggagggttaggggacgcgggatttatttttgaaggagtcggggagtcgttgggtttcggagtttcgtgtgtgtcgtttttcggttatgttgttcgagacgtagtcgtattttttcgttttcgttgttaaattcggagtcgtcgggaatgttttgaggagttagaggtataagatttagattgtcgtttcgtttttaatcgaggtttcgttttcgtgagagttggttaattaacgtttaggatcgaggaggatttattttttaattttcgtttttttgtttttttacggcgcg

SEQ ID NO: 34424 - DNA, 663 bp, Artificial Sequence
  chemically treated genomic DNA (Homo sapiens) CpG-island No: 34424
cgcgccgtaaaaaaacaaaaaaacgaaaattaaaaaataaatcctcctcgatcctaaacgttaattaaccaactctcacgaaaacgaaacctcgattaaaaacgaaacgacaatctaaatcttatacctctaactcctcaaaacattcccgacgactccgaatttaacaacgaaaacgaaaaaatacgactacgtctcgaacaacataaccgaaaaacgacacacacgaaactccgaaacccaacgactccccgactccttcaaaaataaatcccgcgtcccctaaccctcccccgtaaaccgaacccccgcccgcaacgtacgctccgaaatctaacaaccgaactcctaaccaatctccgctacttcgaactaaacgaaatctcaaaaccgcgactcctccctaataaactaaacatcacgaaccctatttaacaaactaaaatcacgataaaaaaataacgaactaccaacgacacgtttcccatcgcacgaaccctaattatctcgcgaccgccaaataccaaaccccataccaaaactacactatctcgtatcacgcacgcgaactaaaaaacgcaaaaaaaactaacaaccaacgaaacgaaaaccgaaaccccacatctcaccctttacccactcccctttttcccgactcactct

SEQ ID NO: 34425 - DNA, 530 bp, Artificial Sequence
  chemically treated genomic DNA (Homo sapiens) CpG-island No: 34425
tcgggatcgggtttggcgttcgtcgtcggttgtaagcgtaagtattattttggttaggaggaggaggaagacgacgaggaggatgcgggcgggttgggggtcgagtttttcgggggcgtttcgttcgttttttgtaagcgcgttcgtttcgaggatttttgttcggattcgttttcggacgcgtttaatattttaaatttgatttttatttttggtttcggtttttcggggttggtgagtcgatagtcggatttttcggagtagtcgtcgtcgtttaacgggtagttgtgcgttaagtaggcgttcgttagtttcggcgtttggattcgagttattgtcgttttttagggattttcgagggtatagggattcggggtttcgcggggttggggttagataaagattcggtaaaggggcgagaggagggaacgagcgggcgtcgggttattcggggttgagttgggggcgagcgggggtaggcggttgatgttttataaattgtaaaataaaaaaaaaagaaatttaaaatt

SEQ ID NO: 34426 - DNA, 530 bp, Artificial Sequence
  chemically treated genomic DNA (Homo sapiens) CpG-island No: 34426
aattttaaatttcttttttttttattttacaatttataaaacatcaaccgcctacccccgctcgcccccaactcaaccccgaataacccgacgcccgctcgttccctcctctcgcccctttaccgaatctttatctaaccccaaccccgcgaaaccccgaatccctataccctcgaaaatccctaaaaaacgacaataactcgaatccaaacgccgaaactaacgaacgcctacttaacgcacaactacccgttaaacgacgacgactactccgaaaaatccgactatcgactcaccaaccccgaaaaaccgaaaccaaaaataaaaatcaaatttaaaatattaaacgcgtccgaaaacgaatccgaacaaaaatcctcgaaacgaacgcgcttacaaaaaacgaacgaaacgcccccgaaaaactcgacccccaacccgcccgcatcctcctcgtcgtcttcctcctcctcctaaccaaaataatacttacgcttacaaccgacgacgaacgccaaacccgatcccga

SEQ ID NO: 34427 - DNA, 530 bp, Artificial Sequence
  chemically treated genomic DNA (Homo sapiens) CpG-island No: 34427
gattttagattttttttttttttattttataatttataaaatattagtcgtttgttttcgttcgtttttagtttagtttcgagtggttcggcgttcgttcgtttttttttttcgtttttttgtcgagtttttgtttggttttagtttcgcggggtttcgggtttttgtgttttcgggggtttttagaaggcgataatggttcgagtttaggcgtcgaggttggcgagcgtttgtttggcgtatagttgttcgttgagcggcggcggttgtttcgaggagttcggttgtcggtttattagtttcgagaagtcggagttaaagatggagattaagtttgagatgttggacgcgttcggggacgagttcgggtagaagttttcgaagcgggcgcgtttgtagggggcgaacggggcgttttcggggggttcggtttttagttcgttcgtatttttttcgtcgttttttttttttttttggttagggtaatatttgcgtttgtagtcggcggcggacgttaggttcggtttcgg

SEQ ID NO: 34428 - DNA, 530 bp, Artificial Sequence
  chemically treated genomic DNA (Homo sapiens) CpG-island No: 34428
ccgaaaccgaacctaacgtccgccgccgactacaaacgcaaatattaccctaaccaaaaaaaaaaaaaaaacgacgaaaaaaatacgaacgaactaaaaaccgaaccccccgaaaacgccccgttcgccccctacaaacgcgcccgcttcgaaaacttctacccgaactcgtccccgaacgcgtccaacatctcaaacttaatctccatctttaactccgacttctcgaaactaataaaccgacaaccgaactcctcgaaacaaccgccgccgctcaacgaacaactatacgccaaacaaacgctcgccaacctcgacgcctaaactcgaaccattatcgccttctaaaaacccccgaaaacacaaaaacccgaaaccccgcgaaactaaaaccaaacaaaaactcgacaaaaaaacgaaaaaaaaaaacgaacgaacgccgaaccactcgaaactaaactaaaaacgaacgaaaacaaacgactaatattttataaattataaaataaaaaaaaaaaaaatctaaaatc

SEQ ID NO: 34429 - DNA, 613 bp, Artificial Sequence
  chemically treated genomic DNA (Homo sapiens) CpG-island No: 34429
gaggttcgtagcgtcgtcggggttagaagagacgcgtagttttaggttgtcgttgaggagaaaaaattttggtggtttttgaagcggtagcgttcgtaggttttgttgaggagtgtggggcgtaggattttgggagcgagcggcgggttggagagggcgtttgcgaatgttgggtgagtgttggtcggggaggtttagtcgttcgcgtcgtagttgtcgtttttttttcgggtttgttttgaggaggagaggcgacggtagtggtagcgacgcgtttttttggttgcgttttgtaatggttttcgagacgtcgagattttcgtagttagcgtttcgagattattatatgatcgaggttgagggatttagtcgtcgtcgtcgcgtttgtagttgaagaaggggtaagaaggcgtcgtgtttcgttttcgtttttttttttatttcgtttcgggcgttttttatttatcgcgtttattattcgttcggtagtttttagttatttttcggtgcggcgggtggcgtaggttgttcgtcgggagggggtatagtttcgggtgtatttttcgtagttgcgttttattcgggttattaagtacggtggagggggaatagg

SEQ ID NO: 34430 - DNA, 613 bp, Artificial Sequence
  chemically treated genomic DNA (Homo sapiens) CpG-island No: 34430
cctattccccctccaccgtacttaataacccgaataaaacgcaactacgaaaaatacacccgaaactataccccctcccgacgaacaacctacgccacccgccgcaccgaaaaataactaaaaactaccgaacgaataataaacgcgataaataaaaaacgcccgaaacgaaataaaaaaaaaaacgaaaacgaaacacgacgccttcttaccccttcttcaactacaaacgcgacgacgacgactaaatccctcaacctcgatcatataataatctcgaaacgctaactacgaaaatctcgacgtctcgaaaaccattacaaaacgcaaccaaaaaaacgcgtcgctaccactaccgtcgcctctcctcctcaaaacaaacccgaaaaaaaaacgacaactacgacgcgaacgactaaacctccccgaccaacactcacccaacattcgcaaacgccctctccaacccgccgctcgctcccaaaatcctacgccccacactcctcaacaaaacctacgaacgctaccgcttcaaaaaccaccaaaattttttctcctcaacgacaacctaaaactacgcgtctcttctaaccccgacgacgctacgaacctc

SEQ ID NO: 34431 - DNA, 613 bp, Artificial Sequence
  chemically treated genomic DNA (Homo sapiens) CpG-island No: 34431
tttgttttttttttatcgtgtttggtggttcgggtggggcgtagttgcgggaaatgtattcggagttgtgttttttttcggcgaatagtttgcgttattcgtcgtatcgggaggtggttgggggttgtcgagcgagtggtgaacgcgatgggtggagagcgttcgaaacgaggtggaaaagggggcgggggcgaggtacggcgtttttttgttttttttttagttatagacgcggcggcggcggttgagttttttagtttcggttatgtgatagtttcgaagcgttagttgcgggggtttcggcgtttcggggattattataaaacgtagttaggagagcgcgtcgttgttattgtcgtcgttttttttttttaagataagttcgggagaaaggcggtagttgcggcgcggacggttgagttttttcggttagtatttatttagtattcgtagacgttttttttagttcgtcgttcgtttttagagttttgcgttttatattttttagtagaatttgcgggcgttgtcgttttagaaattattaaagttttttttttttagcgatagtttagggttgcgcgttttttttaatttcggcgacgttgcgagtttt

SEQ ID NO: 34432 - DNA, 613 bp, Artificial Sequence
  chemically treated genomic DNA (Homo sapiens) CpG-island No: 34432
aaaactcgcaacgtcgccgaaattaaaaaaaacgcgcaaccctaaactatcgctaaaaaaaaaaaactttaataatttctaaaacgacaacgcccgcaaattctactaaaaaatataaaacgcaaaactctaaaaacgaacgacgaactaaaaaaaacgtctacgaatactaaataaatactaaccgaaaaaactcaaccgtccgcgccgcaactaccgcctttctcccgaacttatcttaaaaaaaaaaaacgacgacaataacaacgacgcgctctcctaactacgttttataataatccccgaaacgccgaaacccccgcaactaacgcttcgaaactatcacataaccgaaactaaaaaactcaaccgccgccgccgcgtctataactaaaaaaaaaacaaaaaaacgccgtacctcgcccccgcccccttttccacctcgtttcgaacgctctccacccatcgcgttcaccactcgctcgacaacccccaaccacctcccgatacgacgaataacgcaaactattcgccgaaaaaaaacacaactccgaatacatttcccgcaactacgccccacccgaaccaccaaacacgataaaaaaaaaacaaa

SEQ ID NO: 34433 - DNA, 625 bp, Artificial Sequence
  chemically treated genomic DNA (Homo sapiens) CpG-island No: 34433
gtgttttggcggattataggatatacgtgttttggcggattttataggatatacgtgttttggcggattttataggatatacgtgttttggcggattataggatatacgtgttttggcggattttataggatatacgtgttttggcggattataggatatacgtgttttggcggattataggatatacgtgttttggcggattttataggatatacgtgttttggcggattttataggatatacgtgttttggcggattatataggatatacgtgttttggcggattttataggatatacgtgttttggcggattttataggatatacgtgttttggcggattataggatatacgtgttttggcggattataggatatacgtgttttggcggattttataggatatacgtgttttggcggattttataggatatacgtgttttggcggattataggatatacgtgttttggcggattttataggatatacgtgttttggcggattttataggatatacgtgttttggcggattttataggatatacgtgttttggcggattataggatatacgtgttttggcggattatataggatatacgtgttttggtagattttataggtat

SEQ ID NO: 34434 - DNA, 625 bp, Artificial Sequence
  chemically treated genomic DNA (Homo sapiens) CpG-island No: 34434
atacctataaaatctaccaaaacacgtatatcctatataatccgccaaaacacgtatatcctataatccgccaaaacacgtatatcctataaaatccgccaaaacacgtatatcctataaaatccgccaaaacacgtatatcctataaaatccgccaaaacacgtatatcctataatccgccaaaacacgtatatcctataaaatccgccaaaacacgtatatcctataaaatccgccaaaacacgtatatcctataatccgccaaaacacgtatatcctataatccgccaaaacacgtatatcctataaaatccgccaaaacacgtatatcctataaaatccgccaaaacacgtatatcctatataatccgccaaaacacgtatatcctataaaatccgccaaaacacgtatatcctataaaatccgccaaaacacgtatatcctataatccgccaaaacacgtatatcctataatccgccaaaacacgtatatcctataaaatccgccaaaacacgtatatcctataatccgccaaaacacgtatatcctataaaatccgccaaaacacgtatatcctataaaatccgccaaaacacgtatatcctataatccgccaaaacac

SEQ ID NO: 34435 - DNA, 625 bp, Artificial Sequence
  chemically treated genomic DNA (Homo sapiens) CpG-island No: 34435
gtgtttgtgagatttgttagagtacgtgtgttttgtgtgattcgttagagtacgtgtgttttgtgattcgttagagtacgtgtgttttgtgagattcgttagagtacgtgtgttttgtgaaattcgttagagtacgtgtgttttgtgagattcgttagagtacgtgtgttttgtgattcgttagagtacgtgtgttttgtgagattcgttagagtacgtgtgttttgtgagattcgttagagtacgtgtgttttgtgattcgttagagtacgtgtgttttgtgattcgttagagtacgtgtgttttgtgagattcgttagagtacgtgtgttttgtgagattcgttagagtacgtgtgttttgtgtgattcgttagagtacgtgtgttttgtgagattcgttagagtacgtgtgttttgtgagattcgttagagtacgtgtgttttgtgattcgttagagtacgtgtgttttgtgattcgttagagtacgtgtgttttgtgagattcgttagagtacgtgtgttttgtgattcgttagagtacgtgtgttttgtgagattcgttagagtacgtgtgttttgtgagattcgttagagtacgtgtgttttgtgattcgttagagtat

SEQ ID NO: 34436 - DNA, 625 bp, Artificial Sequence
  chemically treated genomic DNA (Homo sapiens) CpG-island No: 34436
atactctaacgaatcacaaaacacacgtactctaacgaatctcacaaaacacacgtactctaacgaatctcacaaaacacacgtactctaacgaatcacaaaacacacgtactctaacgaatctcacaaaacacacgtactctaacgaatcacaaaacacacgtactctaacgaatcacaaaacacacgtactctaacgaatctcacaaaacacacgtactctaacgaatctcacaaaacacacgtactctaacgaatcacacaaaacacacgtactctaacgaatctcacaaaacacacgtactctaacgaatctcacaaaacacacgtactctaacgaatcacaaaacacacgtactctaacgaatcacaaaacacacgtactctaacgaatctcacaaaacacacgtactctaacgaatctcacaaaacacacgtactctaacgaatcacaaaacacacgtactctaacgaatctcacaaaacacacgtactctaacgaatttcacaaaacacacgtactctaacgaatctcacaaaacacacgtactctaacgaatcacaaaacacacgtactctaacgaatcacacaaaacacacgtactctaacaaatctcacaaacac

SEQ ID NO: 34437 - DNA, 526 bp, Artificial Sequence
  chemically treated genomic DNA (Homo sapiens) CpG-island No: 34437
gtcgagtgacgttggttagaggttgggtgtggagttcgcgtttgtagggttttttttcgtttcgcgggcgtttttttttattttattcgtttcggtatcgtagtgatatcgcggcgacgtcgattataggtggttgtgaggatagcgagattttgaggggaaagaatgagagaagcgcgtatttattgggtagaaggttcgtttttgcgtcgttttgcggaggttttcgggtattttttattttagggaagagaaaatttaattttatttgttataggcgcgggatttgcgtattttttttgggagtataagaatcgaggtaggattcggatttaggttaggcggtaaaggcgtttttttttttttatttataggtcgcgcggaatttttagtttattttcgtttttgtttttttttatttatttttcgcgttttttattcggacgttaggagatgtcgggagtttttttcgttagagtgtcggggagaaaaataaatttggagttatatggtagatatgtttaga

SEQ ID NO: 34438 - DNA, 526 bp, Artificial Sequence
  chemically treated genomic DNA (Homo sapiens) CpG-island No: 34438
tctaaacatatctaccatataactccaaatttatttttctccccgacactctaacgaaaaaaactcccgacatctcctaacgtccgaataaaaaacgcgaaaaataaataaaaaaaaacaaaaacgaaaataaactaaaaattccgcgcgacctataaataaaaaaaaaaaaacgcctttaccgcctaacctaaatccgaatcctacctcgattcttatactcccaaaaaaaatacgcaaatcccgcgcctataacaaataaaattaaattttctcttccctaaaataaaaaatacccgaaaacctccgcaaaacgacgcaaaaacgaaccttctacccaataaatacgcgcttctctcattctttcccctcaaaatctcgctatcctcacaaccacctataatcgacgtcgccgcgatatcactacgataccgaaacgaataaaataaaaaaaaacgcccgcgaaacgaaaaaaaaccctacaaacgcgaactccacacccaacctctaaccaacgtcactcgac

SEQ ID NO: 34439 - DNA, 526 bp, Artificial Sequence
  chemically treated genomic DNA (Homo sapiens) CpG-island No: 34439
tttgggtatgtttgttatatggttttaggtttgttttttttttcggtattttgacggggagggttttcggtattttttggcgttcgggtagaggacgcggagggtgagtaagggagggtaggggcgagggtggattgggggtttcgcgcggtttatgggtgggagagagggaacgtttttgtcgtttggtttgggttcgaattttgtttcggtttttgtgtttttaaagggaatgcgtaagtttcgcgtttgtgataagtgaggttggatttttttttttttgaggtgaaggatgttcggaggttttcgtaggacggcgtaaaaacgggttttttgtttaatagatgcgcgttttttttattttttttttttagaatttcgttgtttttataattatttgtggtcggcgtcgtcgcggtgttattgcgatgtcgaggcgaatggggtggggggaagcgttcgcggggcggggagggattttgtaggcgcggattttatatttagtttttggttagcgttattcggt

SEQ ID NO: 34440 - DNA, 526 bp, Artificial Sequence
  chemically treated genomic DNA (Homo sapiens) CpG-island No: 34440
accgaataacgctaaccaaaaactaaatataaaatccgcgcctacaaaatccctccccgccccgcgaacgcttccccccaccccattcgcctcgacatcgcaataacaccgcgacgacgccgaccacaaataattataaaaacaacgaaattctaaaaaaaaaaaataaaaaaaacgcgcatctattaaacaaaaaacccgtttttacgccgtcctacgaaaacctccgaacatccttcacctcaaaaaaaaaaaaatccaacctcacttatcacaaacgcgaaacttacgcattccctttaaaaacacaaaaaccgaaacaaaattcgaacccaaaccaaacgacaaaaacgttccctctctcccacccataaaccgcgcgaaacccccaatccaccctcgcccctaccctcccttactcaccctccgcgtcctctacccgaacgccaaaaaataccgaaaaccctccccgtcaaaataccgaaaaaaaaaacaaacctaaaaccatataacaaacatacccaaa

SEQ ID NO: 34441 - DNA, 687 bp, Artificial Sequence
  chemically treated genomic DNA (Homo sapiens) CpG-island No: 34441
cggggagtcgattttggtcggtcgtcggggttttgttcggtttttttgaaattttcgttttttttagtagggggcgggtcggggtcgcgtttcggggggaaggcgattaggtcgttttttttttcgattttttcgttttttaggatagtttttagtttagaggggcggttcgggggcggggtcgtatcgttttttttcgtttttaatttcggggcggtcgggcgggggtgggtagggggcgtgaggtcgtttttgcgtttcgggggtttttcgaaaacgcgtttcgggtgttcggttttttcgttgcgttttgtcgtcgttttttcgggggtttcgggcggtcgcggtcgtgtttttcgcgtttcggcggcgcggcgggaggggtcggcgtgacgtagcggttgttacgggtcgtttttataaataatcgggtttaggagaaattttagcgagttagagtcgcgtacgggattgggaaggggatttattcgagggtttagttattagtttttttattaatagcggttatttcggtagcggcggtagtagtagtagcgacgtagcggcgatagtttagagtagggaggtcgcgttatttgcgggtcggtcggagcgggtagttttaggtttttttttcgggtattcgcgtttatgtaacgtttggtggtttgggatttagtatgtttt

SEQ ID NO: 34442 - DNA, 687 bp, Artificial Sequence
  chemically treated genomic DNA (Homo sapiens) CpG-island No: 34442
aaaacatactaaatcccaaaccaccaaacgttacataaacgcgaatacccgaaaaaaaaacctaaaactacccgctccgaccgacccgcaaataacgcgacctccctactctaaactatcgccgctacgtcgctactactactaccgccgctaccgaaataaccgctattaataaaaaaactaataactaaaccctcgaataaatccccttcccaatcccgtacgcgactctaactcgctaaaatttctcctaaacccgattatttataaaaacgacccgtaacaaccgctacgtcacgccgacccctcccgccgcgccgccgaaacgcgaaaaacacgaccgcgaccgcccgaaacccccgaaaaaacgacgacaaaacgcaacgaaaaaaccgaacacccgaaacgcgttttcgaaaaacccccgaaacgcaaaaacgacctcacgccccctacccacccccgcccgaccgccccgaaattaaaaacgaaaaaaaacgatacgaccccgcccccgaaccgcccctctaaactaaaaactatcctaaaaaacgaaaaaatcgaaaaaaaaaacgacctaatcgccttccccccgaaacgcgaccccgacccgccccctactaaaaaaaacgaaaatttcaaaaaaaccgaacaaaaccccgacgaccgaccaaaatcgactccccg

SEQ ID NO: 34443 - DNA, 687 bp, Artificial Sequence
  chemically treated genomic DNA (Homo sapiens) CpG-island No: 34443
gagatatgttgggttttaggttattaggcgttgtatgaacgcgggtgttcggggagggggtttggggttgttcgtttcggtcggttcgtaggtggcgcggtttttttgttttgagttgtcgtcgttgcgtcgttgttgttgttgtcgtcgttgtcggggtggtcgttattagtgagggggttggtggttggattttcgggtgggttttttttttagtttcgtgcgcggttttgattcgttaaagttttttttgagttcggttatttataagggcggttcgtagtaatcgttgcgttacgtcggtttttttcgtcgcgtcgtcgggacgcgaaggatacggtcgcggtcgttcgagattttcgggaggacggcggtagggcgtagcggagggatcgggtattcggagcgcgttttcggggggttttcgggacgtaggggcggttttacgttttttgtttattttcgttcggtcgtttcgggattgggagcgagagggggcggtgcgatttcgttttcggatcgtttttttgggttggaggttgttttggaaggcgggggaatcggaggagggggcgatttgatcgtttttttttcgagacgcggtttcggttcgttttttgttggaggaggcggaggttttaggagggtcgagtagagtttcgacggtcgattagggtcggtttttcg

SEQ ID NO: 34444 - DNA, 687 bp, Artificial Sequence
  chemically treated genomic DNA (Homo sapiens) CpG-island No: 34444
cgaaaaaccgaccctaatcgaccgtcgaaactctactcgaccctcctaaaacctccgcctcctccaacaaaaaacgaaccgaaaccgcgtctcgaaaaaaaaacgatcaaatcgccccctcctccgattcccccgccttccaaaacaacctccaacccaaaaaaacgatccgaaaacgaaatcgcaccgccccctctcgctcccaatcccgaaacgaccgaacgaaaataaacaaaaaacgtaaaaccgcccctacgtcccgaaaaccccccgaaaacgcgctccgaatacccgatccctccgctacgccctaccgccgtcctcccgaaaatctcgaacgaccgcgaccgtatccttcgcgtcccgacgacgcgacgaaaaaaaccgacgtaacgcaacgattactacgaaccgcccttataaataaccgaactcaaaaaaaactttaacgaatcaaaaccgcgcacgaaactaaaaaaaaaacccacccgaaaatccaaccaccaaccccctcactaataacgaccaccccgacaacgacgacaacaacaacaacgacgcaacgacgacaactcaaaacaaaaaaaccgcgccacctacgaaccgaccgaaacgaacaaccccaaaccccctccccgaacacccgcgttcatacaacgcctaataacctaaaacccaacatatctc

SEQ ID NO: 34445 - DNA, 1168 bp, Artificial Sequence
  chemically treated genomic DNA (Homo sapiens) CpG-island No: 34445
gtcgtcgtcgtcgtttgtttttaaatttatggaagtggttaatttttattacgaggcggattgtttggttgttgcgtacggcggtaaggcggttttcgcggcgtttttcgcggttagattcgggtcgcgttttttcgtcggcgagttgggtagtatcggcgattacgagcgcgttatcgattttagttcgtatttggagtcgttgggcgcgtcgtaggtttcggcgttcgttacggttacggatattttcgaggcggtttcgttcgcgttcgttttcgcgttcgtttttttcgggtagtattacgatttttttttcgatttttttttcgacgattacgggggtaagaattgtaagaagtcggtcgagtacggttacgtgagtttggggcgtttgggggtcgttaagggcgcgttgtatttcggttgtttcgcgtttttgtatttatcgttttcgtcgtcgtcgtcgttcgtcgagtttaaggcggagtcgggtttcgagttcgcggattgtaagcggaaggaggaggtcggggcgtcgggcggcggcgtaggtatggcggcgggtttttcgtacgcgttgcgcgtttatttcggttattaggcggtgtcgagcggtagtagcgggagtttttttacgtttttttcgtttagttcgttcggtacgtcgagtttcgttgacgttaaggcgttttcgatcgtttgttacgcgggggtcgcgtcggcgttttcgtaggttaagagtaaggttaagaagatcgtggataagtatagcgacgagtataagattcggcgcgagcgtaataatatcgtcgtgcgtaagagtcgcgataaggttaagatgcgtaatttggagacgtagtataaggttttggagtttacggtcgagaacgagcggttgtagaagaaggtggagtagttgtcgcgcgagtttagtattttgcggaatttgtttaagtagttgttcgagtttttgttcgtttttttcggttattgttagcgcggttttcgcgcgcgtttttttgtcggtcggggttgagatttcggggagcgttcgcgttcgcgttttcgttttcgttttcggcggcgtcggtaaaattttggtattggggtatttggtagcgcggggagttcgtcggtaattttaatattttattatatatatatattt

SEQ ID NO: 34446 - DNA, 1168 bp, Artificial Sequence
  chemically treated genomic DNA (Homo sapiens) CpG-island No: 34446
aaatatatatatataataaaatattaaaattaccgacgaactccccgcgctaccaaataccccaataccaaaattttaccgacgccgccgaaaacgaaaacgaaaacgcgaacgcgaacgctccccgaaatctcaaccccgaccgacaaaaaaacgcgcgcgaaaaccgcgctaacaataaccgaaaaaaacgaacaaaaactcgaacaactacttaaacaaattccgcaaaatactaaactcgcgcgacaactactccaccttcttctacaaccgctcgttctcgaccgtaaactccaaaaccttatactacgtctccaaattacgcatcttaaccttatcgcgactcttacgcacgacgatattattacgctcgcgccgaatcttatactcgtcgctatacttatccacgatcttcttaaccttactcttaacctacgaaaacgccgacgcgacccccgcgtaacaaacgatcgaaaacgccttaacgtcaacgaaactcgacgtaccgaacgaactaaacgaaaaaaacgtaaaaaaactcccgctactaccgctcgacaccgcctaataaccgaaataaacgcgcaacgcgtacgaaaaacccgccgccatacctacgccgccgcccgacgccccgacctcctccttccgcttacaatccgcgaactcgaaacccgactccgccttaaactcgacgaacgacgacgacgacgaaaacgataaatacaaaaacgcgaaacaaccgaaatacaacgcgcccttaacgacccccaaacgccccaaactcacgtaaccgtactcgaccgacttcttacaattcttacccccgtaatcgtcgaaaaaaaaatcgaaaaaaaaatcgtaatactacccgaaaaaaacgaacgcgaaaacgaacgcgaacgaaaccgcctcgaaaatatccgtaaccgtaacgaacgccgaaacctacgacgcgcccaacgactccaaatacgaactaaaatcgataacgcgctcgtaatcgccgatactacccaactcgccgacgaaaaaacgcgacccgaatctaaccgcgaaaaacgccgcgaaaaccgccttaccgccgtacgcaacaaccaaacaatccgcctcgtaataaaaattaaccacttccataaatttaaaaacaaacgacgacgacgac

SEQ ID NO: 34447 - DNA, 1168 bp, Artificial Sequence
  chemically treated genomic DNA (Homo sapiens) CpG-island No: 34447
agatatatatatataataaaatattaaaattatcgacgggtttttcgcgttgttaagtgttttagtgttaaagttttgtcggcgtcgtcgggggcgggggcgagggcgcgggcgcgggcgtttttcggagttttagtttcggtcggtagggggacgcgcgcgggggtcgcgttagtagtggtcggaggaggcgagtaggggttcgggtagttgtttgaataagtttcgtagggtgttgagttcgcgcgatagttgttttatttttttttgtagtcgttcgttttcggtcgtgagttttaggattttgtgttgcgtttttaggttgcgtattttggttttgtcgcggtttttgcgtacggcgatgttgttgcgttcgcgtcggattttgtattcgtcgttgtgtttgtttacggtttttttggttttgtttttgatttgcgagggcgtcggcgcggttttcgcgtagtaggcggtcgggggcgttttggcgttagcggggttcggcgtgtcgggcgggttggacgaggaggacgtggagaggttttcgttgttgtcgttcggtatcgtttggtagtcgaggtaagcgcgtagcgcgtacgggaagttcgtcgttatgtttgcgtcgtcgttcggcgtttcggtttttttttttcgtttgtagttcgcgggttcgaagttcggtttcgttttgagttcggcgggcggcggcggcggcgggggcggtgggtgtaggggcgcgaagtagtcggggtgtagcgcgtttttggcggtttttaggcgttttaggtttacgtagtcgtattcggtcggttttttgtagtttttgttttcgtagtcgtcggagaagaggtcggagaggaagtcgtggtgttgttcggaggaggcgggcgcgggggcgggcgcgggcggagtcgtttcgaaggtgttcgtggtcgtggcgggcgtcggggtttgcggcgcgtttagcggttttaggtacgggttgaagtcgatggcgcgttcgtggtcgtcgatgttgtttagttcgtcggcgggggggcgcggttcgggtttggtcgcggggggcgtcgcgggggtcgttttgtcgtcgtacgtagtagttaagtagttcgtttcgtagtagaagttggttatttttatggatttaaaggtaggcggcggcggcggt

SEQ ID NO: 34448 - DNA, 1168 bp, Artificial Sequence
  chemically treated genomic DNA (Homo sapiens) CpG-island No: 34448
accgccgccgccgcctacctttaaatccataaaaataaccaacttctactacgaaacgaactacttaactactacgtacgacgacaaaacgacccccgcgacgccccccgcgaccaaacccgaaccgcgcccccccgccgacgaactaaacaacatcgacgaccacgaacgcgccatcgacttcaacccgtacctaaaaccgctaaacgcgccgcaaaccccgacgcccgccacgaccacgaacaccttcgaaacgactccgcccgcgcccgcccccgcgcccgcctcctccgaacaacaccacgacttcctctccgacctcttctccgacgactacgaaaacaaaaactacaaaaaaccgaccgaatacgactacgtaaacctaaaacgcctaaaaaccgccaaaaacgcgctacaccccgactacttcgcgcccctacacccaccgcccccgccgccgccgccgcccgccgaactcaaaacgaaaccgaacttcgaacccgcgaactacaaacgaaaaaaaaaaaccgaaacgccgaacgacgacgcaaacataacgacgaacttcccgtacgcgctacgcgcttacctcgactaccaaacgataccgaacgacaacaacgaaaacctctccacgtcctcctcgtccaacccgcccgacacgccgaaccccgctaacgccaaaacgcccccgaccgcctactacgcgaaaaccgcgccgacgccctcgcaaatcaaaaacaaaaccaaaaaaaccgtaaacaaacacaacgacgaatacaaaatccgacgcgaacgcaacaacatcgccgtacgcaaaaaccgcgacaaaaccaaaatacgcaacctaaaaacgcaacacaaaatcctaaaactcacgaccgaaaacgaacgactacaaaaaaaaataaaacaactatcgcgcgaactcaacaccctacgaaacttattcaaacaactacccgaacccctactcgcctcctccgaccactactaacgcgacccccgcgcgcgtccccctaccgaccgaaactaaaactccgaaaaacgcccgcgcccgcgccctcgcccccgcccccgacgacgccgacaaaactttaacactaaaacacttaacaacgcgaaaaacccgtcgataattttaatattttattatatatatatatct

SEQ ID NO: 34449 - DNA, 664 bp, Artificial Sequence
  chemically treated genomic DNA (Homo sapiens) CpG-island No: 34449
tagttcggcgttttgttttcgcgttttttgtatatagtgggcgtttaacgttgtcggtttaagaaatgtttatttttgggttttgtttcggtttattgtatgggttcgtgaatcgaagtttagttgggcggcgacgcgtcgcgagtttttagtgggttggagtcgggagttttgtcggggttgagttgggaaggcgggtacgcgttttcgttttaagttttcgcgtttagttgcgtttagttgcgttttagttttcggttcgcggcggttggttgcggtttagcgacgttcgattggtttgcgcggtttcggcgcgagtttcgattggttgtgacgcgcggtcgggcgaggatttcgttcgcgtcgtcgtcgcgttcggcgttgggcggttattgggcggcgtgatttcgtcgcggtttcgcggttttgtcgtcgtcgtcgttagtagagcgtatcgggtcgatcgggcgagtggttatggcgggcgtcgaggattggtcgggttagtagttggagttggacgaggacgaggcgttttgttgtcgttggggcgcgtagtacgtcggggttcgcgagttggttgcgttttattcgttaggtaagatttttgggtttttttttaggtttgcggttattagtttcggttgcggatagcgattttaga

SEQ ID NO: 34450 - DNA, 664 bp, Artificial Sequence
  chemically treated genomic DNA (Homo sapiens) CpG-island No: 34450
tctaaaatcgctatccgcaaccgaaactaataaccgcaaacctaaaaaaaaacccaaaaatcttacctaacgaataaaacgcaaccaactcgcgaaccccgacgtactacgcgccccaacgacaacaaaacgcctcgtcctcgtccaactccaactactaacccgaccaatcctcgacgcccgccataaccactcgcccgatcgacccgatacgctctactaacgacgacgacgacaaaaccgcgaaaccgcgacgaaatcacgccgcccaataaccgcccaacgccgaacgcgacgacgacgcgaacgaaatcctcgcccgaccgcgcgtcacaaccaatcgaaactcgcgccgaaaccgcgcaaaccaatcgaacgtcgctaaaccgcaaccaaccgccgcgaaccgaaaactaaaacgcaactaaacgcaactaaacgcgaaaacttaaaacgaaaacgcgtacccgccttcccaactcaaccccgacaaaactcccgactccaacccactaaaaactcgcgacgcgtcgccgcccaactaaacttcgattcacgaacccatacaataaaccgaaacaaaacccaaaaataaacatttcttaaaccgacaacgttaaacgcccactatatacaaaaaacgcgaaaacaaaacgccgaacta

SEQ ID NO: 34451 - DNA, 664 bp, Artificial Sequence
  chemically treated genomic DNA (Homo sapiens) CpG-island No: 34451
tttggggtcgttgttcgtagtcggggttggtgatcgtaggtttggaggggggtttagaggttttatttggcgagtagagcgtagttagttcgcgggtttcggcgtgttgcgcgttttagcggtaataagacgtttcgttttcgtttagttttagttgttggttcggttagttttcggcgttcgttatggttattcgttcgatcggttcggtgcgttttgttggcggcggcggcggtagggtcgcggaatcgcggcgagattacgtcgtttaatgatcgtttagcgtcgggcgcggcggcggcgcgggcggggttttcgttcggtcgcgcgttatagttaatcggggttcgcgtcggagtcgcgtaggttaatcggacgtcgttgagtcgtagttaatcgtcgcgagtcggaggttgggacgtagttggacgtagttgggcgcggaagtttggggcggaggcgcgtgttcgtttttttagtttagtttcggtagggttttcggttttagtttattgggagttcgcggcgcgtcgtcgtttagttaggtttcggtttacgggtttatgtaatgggtcgaggtagggtttagaaatgggtattttttgagtcggtagcgttaagcgtttattgtgtgtaaggaacgcgagggtagggcgtcgggttg

SEQ ID NO: 34452 - DNA, 664 bp, Artificial Sequence
  chemically treated genomic DNA (Homo sapiens) CpG-island No: 34452
caacccgacgccctaccctcgcgttccttacacacaataaacgcttaacgctaccgactcaaaaaatacccatttctaaaccctacctcgacccattacataaacccgtaaaccgaaacctaactaaacgacgacgcgccgcgaactcccaataaactaaaaccgaaaaccctaccgaaactaaactaaaaaaacgaacacgcgcctccgccccaaacttccgcgcccaactacgtccaactacgtcccaacctccgactcgcgacgattaactacgactcaacgacgtccgattaacctacgcgactccgacgcgaaccccgattaactataacgcgcgaccgaacgaaaaccccgcccgcgccgccgccgcgcccgacgctaaacgatcattaaacgacgtaatctcgccgcgattccgcgaccctaccgccgccgccgccaacaaaacgcaccgaaccgatcgaacgaataaccataacgaacgccgaaaactaaccgaaccaacaactaaaactaaacgaaaacgaaacgtcttattaccgctaaaacgcgcaacacgccgaaacccgcgaactaactacgctctactcgccaaataaaacctctaaacccccctccaaacctacgatcaccaaccccgactacgaacaacgaccccaaa

SEQ ID NO: 34453 - DNA, 625 bp, Artificial Sequence
  chemically treated genomic DNA (Homo sapiens) CpG-island No: 34453
  unsure (37..)
gggcggtgggggttagggtgggggcggggggttaggnntgttgtgtcgcggcgtttttcgttcgagttttcgtttcgcgttttttcggtcggtgtcgttttttttcggtgttcgtgtgtatatacgcgtatattcgcgcgtatttcggcgtgtacgcgtcgtttttgggtatttgtagttcgcgtacgtgtgggcgtacgtttttttttgttgttttcggtatttcgttattttttttcgaggcggtgttgcgttcgtttcgtttgcggcggggatttttaggcggtagtttcgggcgcggtataagtttttttgtatcgtagttgggatttgggtattgtcggtttgggtgtttcgcggataggtgttcgtcggcgggcgtttaggttgtagttgtcgttgtgttttcgcgtttcgtgtatttttatttttttttttttcgtttttgtttttttagttttcgaatggtaaagcgtatttattatcgggtgtttattttttgtttaggtttttttttttcgttgtcgtagcgtgatttttgaaatttggaattttaggggagttttaaaacgagcgtgttgttcgtgaggataagtgtttttagagaagtttgaatgggttgttt

SEQ ID NO: 34454 - DNA, 625 bp, Artificial Sequence
  chemically treated genomic DNA (Homo sapiens) CpG-island No: 34454
  unsure (588..)
aaacaacccattcaaacttctctaaaaacacttatcctcacgaacaacacgctcgttttaaaactcccctaaaattccaaatttcaaaaatcacgctacgacaacgaaaaaaaaaaacctaaacaaaaaataaacacccgataataaatacgctttaccattcgaaaactaaaaaaacaaaaacgaaaaaaaaaaaaataaaaatacacgaaacgcgaaaacacaacgacaactacaacctaaacgcccgccgacgaacacctatccgcgaaacacccaaaccgacaatacccaaatcccaactacgatacaaaaaaacttataccgcgcccgaaactaccgcctaaaaatccccgccgcaaacgaaacgaacgcaacaccgcctcgaaaaaaaataacgaaataccgaaaacaacaaaaaaaaacgtacgcccacacgtacgcgaactacaaatacccaaaaacgacgcgtacacgccgaaatacgcgcgaatatacgcgtatatacacacgaacaccgaaaaaaaacgacaccgaccgaaaaaacgcgaaacgaaaactcgaacgaaaaacgccgcgacacaacanncctaaccccccgcccccaccctaacccccaccgccc

SEQ ID NO: 34455 - DNA, 625 bp, Artificial Sequence
  chemically treated genomic DNA (Homo sapiens) CpG-island No: 34455
  unsure (588..)
gaatagtttatttagatttttttgaaggtatttatttttacggataatacgttcgttttagggtttttttagagttttaggttttaaaagttacgttgcggtagcgaaggaaggaaatttagataaggggtaaatattcgatggtgggtacgttttgttattcgggggttggggggataggggcgagaaggaaagaaatgagggtgtacggagcgcggaggtatagcggtagttgtagtttgagcgttcgtcgacgggtatttgttcgcgggatatttaggtcggtagtgtttaagttttagttgcggtgtagaggaatttgtgtcgcgttcggggttgtcgtttgggggttttcgtcgtaagcgaggcgaacgtagtatcgtttcgggagaaggtgacggggtgtcgagggtaatagagaggggcgtgcgtttatacgtgcgcgagttgtaggtgtttaggggcggcgcgtgtacgtcggagtgcgcgcgagtgtgcgcgtgtgtatatacggatatcggaaggaggcggtatcggtcgggagggcgcgaggcgggagttcgggcggagggcgtcgcggtataatanntttgatttttcgtttttattttaatttttatcgttt

SEQ ID NO: 34456 - DNA, 625 bp, Artificial Sequence
  chemically treated genomic DNA (Homo sapiens) CpG-island No: 34456
  unsure (37..)
aaacgataaaaattaaaataaaaacgaaaaatcaaanntattataccgcgacgccctccgcccgaactcccgcctcgcgccctcccgaccgataccgcctccttccgatatccgtatatacacacgcgcacactcgcgcgcactccgacgtacacgcgccgcccctaaacacctacaactcgcgcacgtataaacgcacgcccctctctattaccctcgacaccccgtcaccttctcccgaaacgatactacgttcgcctcgcttacgacgaaaacccccaaacgacaaccccgaacgcgacacaaattcctctacaccgcaactaaaacttaaacactaccgacctaaatatcccgcgaacaaatacccgtcgacgaacgctcaaactacaactaccgctatacctccgcgctccgtacaccctcatttctttccttctcgcccctatccccccaacccccgaataacaaaacgtacccaccatcgaatatttaccccttatctaaatttccttccttcgctaccgcaacgtaacttttaaaacctaaaactctaaaaaaaccctaaaacgaacgtattatccgtaaaaataaataccttcaaaaaaatctaaataaactattc

SEQ ID NO: 34457 - DNA, 637 bp, Artificial Sequence
  chemically treated genomic DNA (Homo sapiens) CpG-island No: 34457
tcggtttcgtcgttttcgtttttatttatcggggtcgttcggggtcggcggattttatattgtcggttttgcgttgtttagcggagttcgagggtcggtttgttgggttgagggcggatagtatgtagcgttggttgagttgtcgagttgaggcgtgggcggcggcggcggcgcgtgggcggcggcggcgcgtgcgtttacgcgaggtttttttggtcggtaggtgggcgcgcgttgcgtttcgtttcgcgttttcgcgtttcgaggtattggtttttcgaattagttaggggtatcggcgtgtttacggtggggggacgcggaagtggggttttatgggttcggatgagtagtgggtttaggtgttagttggcgttttttacgagcgttttggattgcggcgcggggattgaaatagtcggttaattgtagtaagaatagtgttcgttcggagggggcgtagggttgaggtcgttaatattttgtttcgtttttgttcgtaagggtgagaatgatttttttagcgattttcgttttcgtgttttttcgttaagttgtttattttaggtttttaggtttacgacgttggtattcggatattttttgtagtattttataggttttcggaatgtttaaa

SEQ ID NO: 34458 - DNA, 637 bp, Artificial Sequence
  chemically treated genomic DNA (Homo sapiens) CpG-island No: 34458
tttaaacattccgaaaacctataaaatactacaaaaaatatccgaataccaacgtcgtaaacctaaaaacctaaaataaacaacttaacgaaaaaacacgaaaacgaaaatcgctaaaaaaatcattctcacccttacgaacaaaaacgaaacaaaatattaacgacctcaaccctacgccccctccgaacgaacactattcttactacaattaaccgactatttcaatccccgcgccgcaatccaaaacgctcgtaaaaaacgccaactaacacctaaacccactactcatccgaacccataaaaccccacttccgcgtccccccaccgtaaacacgccgatacccctaactaattcgaaaaaccaatacctcgaaacgcgaaaacgcgaaacgaaacgcaacgcgcgcccacctaccgaccaaaaaaacctcgcgtaaacgcacgcgccgccgccgcccacgcgccgccgccgccgcccacgcctcaactcgacaactcaaccaacgctacatactatccgccctcaacccaacaaaccgaccctcgaactccgctaaacaacgcaaaaccgacaatataaaatccgccgaccccgaacgaccccgataaataaaaacgaaaacgacgaaaccga

SEQ ID NO: 34459 - DNA, 637 bp, Artificial Sequence
  chemically treated genomic DNA (Homo sapiens) CpG-island No: 34459
tttggatatttcggaggtttgtggagtattgtagagagtgttcgaatgttagcgtcgtgagtttggaggtttagggtgggtagtttggcgagagagtacgagggcgaaagtcgttggaagagttatttttatttttacgggtaggagcggaataaagtgttagcggttttagttttgcgtttttttcgggcggatattgtttttgttgtagttggtcggttgttttagttttcgcgtcgtagtttagggcgttcgtagagggcgttaattggtatttgggtttattatttattcgagtttatggaattttattttcgcgtttttttatcgtaagtacgtcggtgtttttagttgattcgggaggttagtatttcggggcgcgggggcgcggggcggaacgtagcgcgcgtttatttgtcggttaagaaagtttcgcgtgggcgtacgcgtcgtcgtcgtttacgcgtcgtcgtcgtcgtttacgttttaattcggtagtttagttagcgttgtatgttgttcgtttttagtttagtaagtcggttttcgagtttcgttgggtagcgtagggtcggtagtatagagttcgtcggtttcggacggtttcggtaagtggggacgggggcggcgggatcgg

SEQ ID NO: 34460 - DNA, 637 bp, Artificial Sequence
  chemically treated genomic DNA (Homo sapiens) CpG-island No: 34460
ccgatcccgccgcccccgtccccacttaccgaaaccgtccgaaaccgacgaactctatactaccgaccctacgctacccaacgaaactcgaaaaccgacttactaaactaaaaacgaacaacatacaacgctaactaaactaccgaattaaaacgtaaacgacgacgacgacgcgtaaacgacgacgacgcgtacgcccacgcgaaactttcttaaccgacaaataaacgcgcgctacgttccgccccgcgcccccgcgccccgaaatactaacctcccgaatcaactaaaaacaccgacgtacttacgataaaaaaacgcgaaaataaaattccataaactcgaataaataataaacccaaataccaattaacgccctctacgaacgccctaaactacgacgcgaaaactaaaacaaccgaccaactacaacaaaaacaatatccgcccgaaaaaaacgcaaaactaaaaccgctaacactttattccgctcctacccgtaaaaataaaaataactcttccaacgactttcgccctcgtactctctcgccaaactacccaccctaaacctccaaactcacgacgctaacattcgaacactctctacaatactccacaaacctccgaaatatccaaa

SEQ ID NO: 34461 - DNA, 525 bp, Artificial Sequence
  chemically treated genomic DNA (Homo sapiens) CpG-island No: 34461
cgcggtttttggtacgagttcgtgtatcgcggtcgtttcgtttcggtgggagagagggacggaggaagttgtcggtataacgggaggagagcgttaggcggagttggggcgtttttttcgttcgttttttgattcgcgttgttgtcggtcgtttttcgcgtttagtgttcgggacgcgtttgaatttgtcgttttcgtgtttggggcggcgtcgcgcggtttcgagcgttttagaaagttgcggcgcgagttcgcggggtcgatttcggagacgtagttggggtcgggcgcggtttggcgggagggtttgtagcgtcgagggaggttgttagtgcgtgaggaagagagttagagattggataggggagatagagtagcgtcggagtcgcgtaggggacgggagtgagagcgggagtgagagtaggaacgacgtagagcggtcgtcgttttgttcgggttttagggcgtttggttgaagagagtatggttttagtggtttgggtcgtttttaaggtgttgttgttt

SEQ ID NO: 34462 - DNA, 525 bp, Artificial Sequence
  chemically treated genomic DNA (Homo sapiens) CpG-island No: 34462
aaacaacaacaccttaaaaacgacccaaaccactaaaaccatactctcttcaaccaaacgccctaaaacccgaacaaaacgacgaccgctctacgtcgttcctactctcactcccgctctcactcccgtcccctacgcgactccgacgctactctatctcccctatccaatctctaactctcttcctcacgcactaacaacctccctcgacgctacaaaccctcccgccaaaccgcgcccgaccccaactacgtctccgaaatcgaccccgcgaactcgcgccgcaactttctaaaacgctcgaaaccgcgcgacgccgccccaaacacgaaaacgacaaattcaaacgcgtcccgaacactaaacgcgaaaaacgaccgacaacaacgcgaatcaaaaaacgaacgaaaaaaacgccccaactccgcctaacgctctcctcccgttataccgacaacttcctccgtccctctctcccaccgaaacgaaacgaccgcgatacacgaactcgtaccaaaaaccgcg

SEQ ID NO: 34463 - DNA, 525 bp, Artificial Sequence
  chemically treated genomic DNA (Homo sapiens) CpG-island No: 34463
aagtagtagtattttgaggacggtttaggttattgaagttatgttttttttagttaggcgttttgagattcgggtaaggcgacggtcgttttgcgtcgtttttgtttttattttcgtttttattttcgttttttgcgcggtttcgacgttgttttgttttttttgtttagtttttagtttttttttttacgtattggtagtttttttcggcgttgtagattttttcgttaagtcgcgttcggttttagttgcgttttcgaggtcggtttcgcggattcgcgtcgtagttttttggagcgttcggggtcgcgcggcgtcgttttaggtacggaggcggtaggtttaggcgcgtttcggatattaggcgcgggaggcggtcggtagtaacgcgagttaagaagcgagcgggagggacgttttagtttcgtttggcgtttttttttcgttatatcggtagtttttttcgttttttttttttatcggggcggggcggtcgcggtgtacggattcgtgttaaagatcgcg

SEQ ID NO: 34464 - DNA, 525 bp, Artificial Sequence
  chemically treated genomic DNA (Homo sapiens) CpG-island No: 34464
cgcgatctttaacacgaatccgtacaccgcgaccgccccgccccgataaaaaaaaaaaacgaaaaaaactaccgatataacgaaaaaaaaacgccaaacgaaactaaaacgtccctcccgctcgcttcttaactcgcgttactaccgaccgcctcccgcgcctaatatccgaaacgcgcctaaacctaccgcctccgtacctaaaacgacgccgcgcgaccccgaacgctccaaaaaactacgacgcgaatccgcgaaaccgacctcgaaaacgcaactaaaaccgaacgcgacttaacgaaaaaatctacaacgccgaaaaaaactaccaatacgtaaaaaaaaaaactaaaaactaaacaaaaaaaacaaaacaacgtcgaaaccgcgcaaaaaacgaaaataaaaacgaaaataaaaacaaaaacgacgcaaaacgaccgtcgccttacccgaatctcaaaacgcctaactaaaaaaaacataacttcaataacctaaaccgtcctcaaaatactactactt

SEQ ID NO: 34465 - DNA, 1242 bp, Artificial Sequence
  chemically treated genomic DNA (Homo sapiens) CpG-island No: 34465
gggtgtatatatcgttatcgttaatgattatttggttcgagtgtagttagagtagatgggtcgtgtgtatcggtttttaggattgtcgatttcggcgattttgtcggatatgtcgtcgatggttcgtaaggaggtttataaggtcgacgttatttatggtacgaataacgagtttggtttcgattatttgcgtgataatatggttagttcgtttagcgagtgcgtgtagcgcggttattattacgcgattgttgacgaggttgattttattttcgttgacgaagttcgtatttcgttgattatttttggatttgtcgaggagaataagtagtggtattcggaattcgttaagatcgtttcgcggttcgaacgcgacgttgattacgaggtggacgagaagaaacgtatcgtttttgtatttgggtacggaattatcgtcgttgaggagaggttcggtatcgagaatttttacgagttagcgaatatttcgtttatcgggtattttaataacgttattaaggttaaggagtttttttatcgcgataaggattacgtcgtcgtcggtggtgaagtttttatcgttgacgagtatatcggtcggatttttgttggtcgtcgttataacgaaggtttttattaagtttttgaggttaaagaatacgtcgagattaaggacgagtattagattttcgttacgattattttgtagaattattttcgtatgtacgataagttcgtcggtatgacgggtatagttaagatcgaggaaagcgagttttagaagatttacggtttgggagttatttcgatttcgacgaatcgttcgatgattcgtaaagattagaaggattttatttatcgtatcgaggatgttaagttcgacgttattatcgtcgatgttgttgagcgttacgaggcgggttagtcgatttttatcggtattgcgtcggtggttaagtcggagttgtttttcgaaaagtttaagcgtgtcggtgtttcgtataaggtgttgaacgttaagtattatgagtttgaagtcgttattgtcgttttggttggtcgtaagggggtcgtgacggtgtcgacgaatatggttggtcgtggtatcgatattattttcggcggtaatttcgagttttttatcgagtttgatttgcgggaaaagggtttggattttttcgaggattaggacgcgtattagattgcgtggaataatattttggttaagtacgaggaatagtt

SEQ ID NO: 34466 - DNA, 1242 bp, Artificial Sequence
  chemically treated genomic DNA (Homo sapiens) CpG-island No: 34466
aactattcctcgtacttaaccaaaatattattccacgcaatctaatacgcgtcctaatcctcgaaaaaatccaaacccttttcccgcaaatcaaactcgataaaaaactcgaaattaccgccgaaaataatatcgataccacgaccaaccatattcgtcgacaccgtcacgacccccttacgaccaaccaaaacgacaataacgacttcaaactcataatacttaacgttcaacaccttatacgaaacaccgacacgcttaaacttttcgaaaaacaactccgacttaaccaccgacgcaataccgataaaaatcgactaacccgcctcgtaacgctcaacaacatcgacgataataacgtcgaacttaacatcctcgatacgataaataaaatccttctaatctttacgaatcatcgaacgattcgtcgaaatcgaaataactcccaaaccgtaaatcttctaaaactcgctttcctcgatcttaactatacccgtcataccgacgaacttatcgtacatacgaaaataattctacaaaataatcgtaacgaaaatctaatactcgtccttaatctcgacgtattctttaacctcaaaaacttaataaaaaccttcgttataacgacgaccaacaaaaatccgaccgatatactcgtcaacgataaaaacttcaccaccgacgacgacgtaatccttatcgcgataaaaaaactccttaaccttaataacgttattaaaatacccgataaacgaaatattcgctaactcgtaaaaattctcgataccgaacctctcctcaacgacgataattccgtacccaaatacaaaaacgatacgtttcttctcgtccacctcgtaatcaacgtcgcgttcgaaccgcgaaacgatcttaacgaattccgaataccactacttattctcctcgacaaatccaaaaataatcaacgaaatacgaacttcgtcaacgaaaataaaatcaacctcgtcaacaatcgcgtaataataaccgcgctacacgcactcgctaaacgaactaaccatattatcacgcaaataatcgaaaccaaactcgttattcgtaccataaataacgtcgaccttataaacctccttacgaaccatcgacgacatatccgacaaaatcgccgaaatcgacaatcctaaaaaccgatacacacgacccatctactctaactacactcgaaccaaataatcattaacgataacgatatatacaccc

SEQ ID NO: 34467 - DNA, 1242 bp, Artificial Sequence
  chemically treated genomic DNA (Homo sapiens) CpG-island No: 34467
gattgtttttcgtatttggttagggtgttgttttacgtagtttggtacgcgttttggttttcgagggggtttaagtttttttttcgtaggttaagttcggtgaggaattcggggttgtcgtcgaggataatgtcggtattacggttagttatattcgtcgatatcgttacggtttttttacggttagttagggcgataatagcggttttagatttatggtgtttggcgtttagtattttgtgcggaatatcggtacgtttgagtttttcggaaagtagtttcgatttggttatcgacgtagtgtcgataaggatcggttggttcgtttcgtgacgtttaataatatcggcgataatggcgtcgaatttggtattttcggtgcggtaaatgaggtttttttgatttttgcggattatcggacggttcgtcgggatcgggatgatttttagatcgtaaattttttggaattcgtttttttcggttttagttgtattcgttatgtcggcgagtttgtcgtatatgcggaagtaattttgtagggtgatcgtggcgagagtttgatattcgtttttgatttcgacgtgttttttggttttaggggtttggtggaggttttcgttgtaacgacggttagtaagagttcggtcggtgtgttcgttaacgataaggattttattatcgacgacgacgtagtttttgtcgcggtggaaaagttttttggttttgatggcgttgttgaggtattcgataagcggagtgttcgttgattcgtaaaggttttcgatatcgagtttttttttaacgacggtaatttcgtgtttaagtatagagacggtgcgttttttttcgtttatttcgtagttaacgtcgcgttcgagtcgcgagacgattttggcgaatttcgggtattattgtttgtttttttcggtaggtttagagatgattagcggggtacgagtttcgttaacgagaatggagttaatttcgttaataatcgcgtaatggtgatcgcgttgtacgtattcgttgagcgaattggttatattgttacgtaggtagtcgaagttaaattcgttgttcgtgttataggtgacgtcggttttataggtttttttgcgggttatcggcggtatgttcgataggatcgtcgagatcgataattttaggaatcggtgtatacggtttatttgttttgattgtattcgggttaggtagttattgacggtgacgatatgtatattt

SEQ ID NO: 34468 - DNA, 1242 bp, Artificial Sequence
  chemically treated genomic DNA (Homo sapiens) CpG-island No: 34468
aaatatacatatcgtcaccgtcaataactacctaacccgaatacaatcaaaacaaataaaccgtatacaccgattcctaaaattatcgatctcgacgatcctatcgaacataccgccgataacccgcaaaaaaacctataaaaccgacgtcacctataacacgaacaacgaatttaacttcgactacctacgtaacaatataaccaattcgctcaacgaatacgtacaacgcgatcaccattacgcgattattaacgaaattaactccattctcgttaacgaaactcgtaccccgctaatcatctctaaacctaccgaaaaaaacaaacaataatacccgaaattcgccaaaatcgtctcgcgactcgaacgcgacgttaactacgaaataaacgaaaaaaaacgcaccgtctctatacttaaacacgaaattaccgtcgttaaaaaaaaactcgatatcgaaaacctttacgaatcaacgaacactccgcttatcgaatacctcaacaacgccatcaaaaccaaaaaacttttccaccgcgacaaaaactacgtcgtcgtcgataataaaatccttatcgttaacgaacacaccgaccgaactcttactaaccgtcgttacaacgaaaacctccaccaaacccctaaaaccaaaaaacacgtcgaaatcaaaaacgaatatcaaactctcgccacgatcaccctacaaaattacttccgcatatacgacaaactcgccgacataacgaatacaactaaaaccgaaaaaaacgaattccaaaaaatttacgatctaaaaatcatcccgatcccgacgaaccgtccgataatccgcaaaaatcaaaaaaacctcatttaccgcaccgaaaataccaaattcgacgccattatcgccgatattattaaacgtcacgaaacgaaccaaccgatccttatcgacactacgtcgataaccaaatcgaaactactttccgaaaaactcaaacgtaccgatattccgcacaaaatactaaacgccaaacaccataaatctaaaaccgctattatcgccctaactaaccgtaaaaaaaccgtaacgatatcgacgaatataactaaccgtaataccgacattatcctcgacgacaaccccgaattcctcaccgaacttaacctacgaaaaaaaaacttaaaccccctcgaaaaccaaaacgcgtaccaaactacgtaaaacaacaccctaaccaaatacgaaaaacaatc

SEQ ID NO: 34469 - DNA, 919 bp, Artificial Sequence
  chemically treated genomic DNA (Homo sapiens) CpG-island No: 34469
ggtttcgaatatcgaggcgtcgggcgagttcgaggggttacggaaggtgtaggtgtgttcgttttacggtgtcggtatcggtaagtaattcgtcgatcggtttttggtgtatttgatcgtcgataacgataagggttttttgcgtttacgttagagttaggtcgacgtcgtgggtagttatcgttatcgttgttttatgatcgcgtagtcgatttagggtttttaatatttgggtgattttaatcgggttaagttcggcggtgggtttattaaggagtagtagattcgggcgtatggttacggtatcggtaatcgcgatttttttgcgtttattataggatagttgatacgtggtacgtttagttagatgattggtttcgagtagttttagggattcggagattcggttacgtatttcgttaattttgaggtttatatttatggggtcgaaggagatattttggttgatatcggcgttaaagagttggtcgttagggttttgtagtataagttggacggttcgacggtgtttacgaagttgagcgcgttcgtagttgataacgatgtcgttttttttgacgtgatttttggcgggtttgagggaatcggataggtagcgtatgagggtcgttttatcggatttattagtttttaggatcgttacgcgaatttcggcgcgaaaggagatattaacgtcggttagtattataggacggttcgggtgggtggcgtataggtgttcggtcgatagtaggattttggtatttatttgaaaattttttcggtcgtcgtttaattgattatttataggatagcgatgacgatgacgacgatgattttgtatcgtatcgaatcggtgcgtttgatgggtaaggtggttagcgcggtttcgaagtcgcgattaacgagtttatcgttg

SEQ ID NO: 34470 - DNA, 919 bp, Artificial Sequence
  chemically treated genomic DNA (Homo sapiens) CpG-island No: 34470
caacgataaactcgttaatcgcgacttcgaaaccgcgctaaccaccttacccatcaaacgcaccgattcgatacgatacaaaatcatcgtcgtcatcgtcatcgctatcctataaataatcaattaaacgacgaccgaaaaaattttcaaataaataccaaaatcctactatcgaccgaacacctatacgccacccacccgaaccgtcctataatactaaccgacgttaatatctcctttcgcgccgaaattcgcgtaacgatcctaaaaactaataaatccgataaaacgaccctcatacgctacctatccgattccctcaaacccgccaaaaatcacgtcaaaaaaaacgacatcgttatcaactacgaacgcgctcaacttcgtaaacaccgtcgaaccgtccaacttatactacaaaaccctaacgaccaactctttaacgccgatatcaaccaaaatatctccttcgaccccataaatataaacctcaaaattaacgaaatacgtaaccgaatctccgaatccctaaaactactcgaaaccaatcatctaactaaacgtaccacgtatcaactatcctataataaacgcaaaaaaatcgcgattaccgataccgtaaccatacgcccgaatctactactccttaataaacccaccgccgaacttaacccgattaaaatcacccaaatattaaaaaccctaaatcgactacgcgatcataaaacaacgataacgataactacccacgacgtcgacctaactctaacgtaaacgcaaaaaacccttatcgttatcgacgatcaaatacaccaaaaaccgatcgacgaattacttaccgataccgacaccgtaaaacgaacacacctacaccttccgtaacccctcgaactcgcccgacgcctcgatattcgaaacc

SEQ ID NO: 34471 - DNA, 919 bp, Artificial Sequence
  chemically treated genomic DNA (Homo sapiens) CpG-island No: 34471
taacgatggattcgttaatcgcggtttcgaggtcgcgttggttattttgtttattaaacgtatcggttcggtgcgatataagattatcgtcgttatcgttatcgttgttttgtgggtgattagttggacgacgatcggaaggatttttagatgagtgttaaggttttgttgtcgatcgagtatttgtacgttatttattcgggtcgttttatggtattgatcgacgttaatgttttttttcgcgtcggggttcgcgtagcgattttgggagttaatggattcggtaagacgatttttatgcgttgtttgttcggtttttttaaattcgttaagggttacgttaagaggggcgatatcgttgttagttacgggcgcgtttaatttcgtgagtatcgtcgagtcgtttagtttgtgttgtaagattttgacgattagttttttagcgtcgatgttagttaggatgtttttttcggttttatgaatatgggttttaaagttgacgaggtgcgtgatcgggttttcgagtttttagaattgttcggggttagttatttggttgagcgtgttacgtattaattgttttatggtgagcgtaagagggtcgcggttgtcggtgtcgtggttatgcgttcggatttgttgttttttgatgagtttatcgtcggatttgattcggttggagttatttagatgttggaggttttggatcggttgcgcgattatggaataacggtggcgatggttatttacgacgtcgatttggttttggcgtgggcgtaggaggtttttgtcgttgtcgacggttaggtgtattaaggatcgatcggcgagttatttgtcgatgtcgatatcgtgggacgggtatatttgtatttttcgtggtttttcgagttcgttcggcgtttcggtgttcgggatt

SEQ ID NO: 34472 - DNA, 919 bp, Artificial Sequence
  chemically treated genomic DNA (Homo sapiens) CpG-island No: 34472
aatcccgaacaccgaaacgccgaacgaactcgaaaaaccacgaaaaatacaaatatacccgtcccacgatatcgacatcgacaaataactcgccgatcgatccttaatacacctaaccgtcgacaacgacaaaaacctcctacgcccacgccaaaaccaaatcgacgtcgtaaataaccatcgccaccgttattccataatcgcgcaaccgatccaaaacctccaacatctaaataactccaaccgaatcaaatccgacgataaactcatcaaaaaacaacaaatccgaacgcataaccacgacaccgacaaccgcgaccctcttacgctcaccataaaacaattaatacgtaacacgctcaaccaaataactaaccccgaacaattctaaaaactcgaaaacccgatcacgcacctcgtcaactttaaaacccatattcataaaaccgaaaaaaacatcctaactaacatcgacgctaaaaaactaatcgtcaaaatcttacaacacaaactaaacgactcgacgatactcacgaaattaaacgcgcccgtaactaacaacgatatcgcccctcttaacgtaacccttaacgaatttaaaaaaaccgaacaaacaacgcataaaaatcgtcttaccgaatccattaactcccaaaatcgctacgcgaaccccgacgcgaaaaaaaacattaacgtcgatcaataccataaaacgacccgaataaataacgtacaaatactcgatcgacaacaaaaccttaacactcatctaaaaatccttccgatcgtcgtccaactaatcacccacaaaacaacgataacgataacgacgataatcttatatcgcaccgaaccgatacgtttaataaacaaaataaccaacgcgacctcgaaaccgcgattaacgaatccatcgtta

SEQ ID NO: 34473 - DNA, 671 bp, Artificial Sequence
  chemically treated genomic DNA (Homo sapiens) CpG-island No: 34473
ttttcgttttttcgtaggggtttcgtttttttttcggggtttttacgttttaatatcgtagttatgtttatatgttattatttttttttcgcgttcgtcggtttttttcgttttttaagatcgtatttttttcggtttttttttattatcgaaatttatcgaaggaaatagacgttagtgtttttttcggggttgttattacggtttcggtaggcgggtcggggatcggtcgaatttgagttgacggtggaggggttcgggttagttagatgggcggttggttagatgcgtaagcggtagtatgcgagtttagttcgttgttgttggttggttgtttagtcggtcgattcgtttgtttattcggtttgtttttttttgtttttcgtttgtagcggtcgttagtttttgttcggtgtttaaaataaaatggtcgttacgtttagtgtttgtttgatcggttaaaatggcgtttacgtaattacgttaggcgttagattcgcgtacgattagagggcgggaaagatttgagttacgtttgcgtagaggttagaggcggagttttagggcgaaggcggggttttttatgtagtgtttcgtttttaggggcgtggttaatggttttgttgttggggcgtgtcggggattttacgttttagtagtggttgcgttgt

SEQ ID NO: 34474 - DNA, 671 bp, Artificial Sequence
  chemically treated genomic DNA (Homo sapiens) CpG-island No: 34474
acaacgcaaccactactaaaacgtaaaatccccgacacgccccaacaacaaaaccattaaccacgcccctaaaaacgaaacactacataaaaaaccccgccttcgccctaaaactccgcctctaacctctacgcaaacgtaactcaaatctttcccgccctctaatcgtacgcgaatctaacgcctaacgtaattacgtaaacgccattttaaccgatcaaacaaacactaaacgtaacgaccattttattttaaacaccgaacaaaaactaacgaccgctacaaacgaaaaacaaaaaaaaacaaaccgaataaacaaacgaatcgaccgactaaacaaccaaccaacaacaacgaactaaactcgcatactaccgcttacgcatctaaccaaccgcccatctaactaacccgaacccctccaccgtcaactcaaattcgaccgatccccgacccgcctaccgaaaccgtaataacaaccccgaaaaaaacactaacgtctatttccttcgataaatttcgataataaaaaaaaaccgaaaaaaatacgatcttaaaaaacgaaaaaaaccgacgaacgcgaaaaaaaaataataacatataaacataactacgatattaaaacgtaaaaaccccgaaaaaaaaacgaaacccctacgaaaaaacgaaaa

SEQ ID NO: 34475 - DNA, 671 bp, Artificial Sequence
  chemically treated genomic DNA (Homo sapiens) CpG-island No: 34475
gtagcgtaattattattggaacgtgaagttttcggtacgttttaataataggattattggttacgtttttaggggcggggtattgtatggaaagtttcgttttcgttttaaggtttcgtttttgatttttgcgtaggcgtagtttaaatttttttcgttttttagtcgtgcgcggatttgacgtttgacgtaattgcgtagacgttattttagtcggttagataagtattggacgtggcggttattttgttttggatatcgagtaggagttggcggtcgttgtagacgaaaggtaggaaagggtaggtcgggtgagtagacggatcggtcgattagatagttaattagtaataacgaattgagttcgtatattatcgtttacgtatttaattaatcgtttatttagttaattcgagtttttttatcgttaatttaggttcggtcggttttcggttcgtttgtcggagtcgtggtggtagtttcgggaggagtattggcgtttgtttttttcggtgagtttcggtagtgagaaggagtcgggggaggtgcggttttgaggagcggaaggggtcggcggacgcggaaagggggtggtggtatgtggatatagttacggtgttggagcgtggaggtttcggggaggaggcggagtttttgcgaaggggcggggg

SEQ ID NO: 34476 - DNA, 671 bp, Artificial Sequence
  chemically treated genomic DNA (Homo sapiens) CpG-island No: 34476
cccccgccccttcgcaaaaactccgcctcctccccgaaacctccacgctccaacaccgtaactatatccacataccaccaccccctttccgcgtccgccgaccccttccgctcctcaaaaccgcacctcccccgactccttctcactaccgaaactcaccgaaaaaaacaaacgccaatactcctcccgaaactaccaccacgactccgacaaacgaaccgaaaaccgaccgaacctaaattaacgataaaaaaactcgaattaactaaataaacgattaattaaatacgtaaacgataatatacgaactcaattcgttattactaattaactatctaatcgaccgatccgtctactcacccgacctaccctttcctacctttcgtctacaacgaccgccaactcctactcgatatccaaaacaaaataaccgccacgtccaatacttatctaaccgactaaaataacgtctacgcaattacgtcaaacgtcaaatccgcgcacgactaaaaaacgaaaaaaatttaaactacgcctacgcaaaaatcaaaaacgaaaccttaaaacgaaaacgaaactttccatacaataccccgcccctaaaaacgtaaccaataatcctattattaaaacgtaccgaaaacttcacgttccaataataattacgctac

SEQ ID NO: 34477 - DNA, 862 bp, Artificial Sequence
  chemically treated genomic DNA (Homo sapiens) CpG-island No: 34477
gttaatggcgcgattttttaggtaatacggcggtcggcggcgggggagggtttggcgcgcgtttcggtcgcgtttttcgagtcggtagttatttttttttttcggttcggcgtttcgggtcgggtgatgagggtcgttttttcgtatattacggttacgttttttacgaagacgtagttcggaaggttttcgtcggtcggtagttttattatttgtagttttagtttgttgtttagtacgtttacgtagagttggtgttgtcgtttcgcgcgggcgacgtttattttttcgtttttggcgttttttagcgcgtgttggtcgagcgattcgggtagcgttcgtattacggcgtgggtggttcggtcgaaggcggcggggtggtcgagttcggttatggtttcgggaggtttaggggcggcggcggcggcggaggcggtcgggttttgtcgcgggtagcgcgcgttgagtttgcgagcgttcgtcggttttttttggtagtcgttgaatgtggtgtagaaggagtttagttcgcgttcggagttttgttcgcgcgattgagtatgtttagagtttcgggcgtcggttcgcgcgtatttcgcgcgtttatttcggcgttcgcgggtttcgcgttagtttaggcgggagttgtagcggcgagcgtcgggcgaggagtggggttaggagaggcggtcggggaagtagcgagggtaagaagtatgcggaggcgggggatttcggcgaaaagttatcgttattcggatttggcggtatttgtgttttgtcgtaggtgtatattttttatcgtttttagcgcggatttggagagtcggtttcggtttggatagagtagttggagggtttt

SEQ ID NO: 34478 - DNA, 862 bp, Artificial Sequence
  chemically treated genomic DNA (Homo sapiens) CpG-island No: 34478
aaaaccctccaactactctatccaaaccgaaaccgactctccaaatccgcgctaaaaacgataaaaaatatacacctacgacaaaacacaaataccgccaaatccgaataacgataacttttcgccgaaatcccccgcctccgcatacttcttaccctcgctacttccccgaccgcctctcctaaccccactcctcgcccgacgctcgccgctacaactcccgcctaaactaacgcgaaacccgcgaacgccgaaataaacgcgcgaaatacgcgcgaaccgacgcccgaaactctaaacatactcaatcgcgcgaacaaaactccgaacgcgaactaaactccttctacaccacattcaacgactaccaaaaaaaaccgacgaacgctcgcaaactcaacgcgcgctacccgcgacaaaacccgaccgcctccgccgccgccgccgcccctaaacctcccgaaaccataaccgaactcgaccaccccgccgccttcgaccgaaccacccacgccgtaatacgaacgctacccgaatcgctcgaccaacacgcgctaaaaaacgccaaaaacgaaaaaataaacgtcgcccgcgcgaaacgacaacaccaactctacgtaaacgtactaaacaacaaactaaaactacaaataataaaactaccgaccgacgaaaaccttccgaactacgtcttcgtaaaaaacgtaaccgtaatatacgaaaaaacgaccctcatcacccgacccgaaacgccgaaccgaaaaaaaaaaataactaccgactcgaaaaacgcgaccgaaacgcgcgccaaaccctcccccgccgccgaccgccgtattacctaaaaaatcgcgccattaac

SEQ ID NO: 34479 - DNA, 862 bp, Artificial Sequence
  chemically treated genomic DNA (Homo sapiens) CpG-island No: 34479
gaagttttttagttgttttgtttagatcgaggtcggttttttaagttcgcgttggggacgatgggaggtgtgtatttgcgatagaatataggtatcgttaggttcgggtagcggtggtttttcgtcgaggtttttcgttttcgtatattttttgttttcgttgttttttcggtcgttttttttggttttatttttcgttcggcgttcgtcgttataattttcgtttgggttggcgcgagattcgcgagcgtcggagtgggcgcgcgggatgcgcgcgggtcggcgttcggagttttgggtatgtttagtcgcgcgggtagggtttcgggcgcgagttgggttttttttgtattatatttagcggttgttaagaggagtcgacgggcgttcgtaggtttagcgcgcgttgttcgcggtaggattcggtcgttttcgtcgtcgtcgtcgtttttaagtttttcgaagttatggtcgggttcggttatttcgtcgttttcggtcgggttatttacgtcgtggtgcgggcgttattcgagtcgttcggttagtacgcgttgagaagcgttaagggcgaggaggtggacgtcgttcgcgcggaacggtagtattagttttacgtgggcgtgttgggtagtaagttggggttgtaggtggtggagttgtcggtcgacgagagtttttcggattgcgttttcgtggaggacgtggtcgtggtgtgcgaggagacggtttttattattcgattcggggcgtcgagtcggaggaaggaggtaattgtcgattcgaggggcgcggtcggggcgcgcgttaggttttttttcgtcgtcggtcgtcgtgttgtttggggagtcgcgttattggt

SEQ ID NO: 34480 - DNA, 862 bp, Artificial Sequence
  chemically treated genomic DNA (Homo sapiens) CpG-island No: 34480
accaataacgcgactccccaaacaacacgacgaccgacgacgaaaaaaaacctaacgcgcgccccgaccgcgcccctcgaatcgacaattacctccttcctccgactcgacgccccgaatcgaataataaaaaccgtctcctcgcacaccacgaccacgtcctccacgaaaacgcaatccgaaaaactctcgtcgaccgacaactccaccacctacaaccccaacttactacccaacacgcccacgtaaaactaatactaccgttccgcgcgaacgacgtccacctcctcgcccttaacgcttctcaacgcgtactaaccgaacgactcgaataacgcccgcaccacgacgtaaataacccgaccgaaaacgacgaaataaccgaacccgaccataacttcgaaaaacttaaaaacgacgacgacgacgaaaacgaccgaatcctaccgcgaacaacgcgcgctaaacctacgaacgcccgtcgactcctcttaacaaccgctaaatataatacaaaaaaaacccaactcgcgcccgaaaccctacccgcgcgactaaacatacccaaaactccgaacgccgacccgcgcgcatcccgcgcgcccactccgacgctcgcgaatctcgcgccaacccaaacgaaaattataacgacgaacgccgaacgaaaaataaaaccaaaaaaaacgaccgaaaaaacaacgaaaacaaaaaatatacgaaaacgaaaaacctcgacgaaaaaccaccgctacccgaacctaacgatacctatattctatcgcaaatacacacctcccatcgtccccaacgcgaacttaaaaaaccgacctcgatctaaacaaaacaactaaaaaacttc

SEQ ID NO: 34481 - DNA, 536 bp, Artificial Sequence
  chemically treated genomic DNA (Homo sapiens) CpG-island No: 34481
atagttttcgtagcggggttaaagtcgggcgaaggagggtaagcgttggtggattattttttacgatatatcgtttttgtttattttcgtgttcgttattcgtcgaagtagttttagagagcgattgagcgtttcgtttcggtgtatatagttcggtagagatgttagttttcgtggagttgtatttaataagtttattttttttttcgtcgttatttcggagacgtttatcgggttgagttgcgaataattaagagagaggttaagttaagtcgtggcgtttgtggtaatttcggatacgggtattagttagttagcggagtttttttattttcgttgttagcgaaggcgttcgttaggttttgggaagaggcgatcggaggcgatgttcgcgaatttgttaggggggtaagcggcgggtgaggttttcgagggcggtttcgtttgttgattgagcggtagagggaggcgatgttcgttgatttaataaggatagtaggtggagtaggtatagatggaaaattgttgtcggtgtt

SEQ ID NO: 34482 - DNA, 536 bp, Artificial Sequence
  chemically treated genomic DNA (Homo sapiens) CpG-island No: 34482
aacaccgacaacaattttccatctatacctactccacctactatccttattaaatcaacgaacatcgcctccctctaccgctcaatcaacaaacgaaaccgccctcgaaaacctcacccgccgcttacccccctaacaaattcgcgaacatcgcctccgatcgcctcttcccaaaacctaacgaacgccttcgctaacaacgaaaataaaaaaactccgctaactaactaatacccgtatccgaaattaccacaaacgccacgacttaacttaacctctctcttaattattcgcaactcaacccgataaacgtctccgaaataacgacgaaaaaaaaaataaacttattaaatacaactccacgaaaactaacatctctaccgaactatatacaccgaaacgaaacgctcaatcgctctctaaaactacttcgacgaataacgaacacgaaaataaacaaaaacgatatatcgtaaaaaataatccaccaacgcttaccctccttcgcccgactttaaccccgctacgaaaactat

SEQ ID NO: 34483 - DNA, 536 bp, Artificial Sequence
  chemically treated genomic DNA (Homo sapiens) CpG-island No: 34483
ggtatcggtagtagttttttatttgtgtttattttatttgttgtttttgttgggttagcgaatatcgtttttttttatcgtttaattagtaaacgggatcgttttcgaggattttattcgtcgtttatttttttaataaattcgcgggtatcgttttcggtcgtttttttttaaggtttaacgagcgttttcgttggtaacggaggtgaggaggtttcgttgattggttggtgttcgtgttcggggttgttataaacgttacgatttggtttggttttttttttagttattcgtagtttagttcgatgggcgttttcggggtggcgacgggaaagaaggtgggtttattgggtgtagttttacgggggttggtatttttgtcgggttgtgtatatcggagcgagacgtttagtcgttttttaaagttgtttcggcggatgacggatacggagataaataggaacggtgtgtcgtgagaggtggtttattagcgtttgttttttttcgttcggttttaatttcgttgcggagattgt

SEQ ID NO: 34484 - DNA, 536 bp, Artificial Sequence
  chemically treated genomic DNA (Homo sapiens) CpG-island No: 34484
acaatctccgcaacgaaattaaaaccgaacgaaaaaaaacaaacgctaataaaccacctctcacgacacaccgttcctatttatctccgtatccgtcatccgccgaaacaactttaaaaaacgactaaacgtctcgctccgatatacacaacccgacaaaaataccaacccccgtaaaactacacccaataaacccaccttctttcccgtcgccaccccgaaaacgcccatcgaactaaactacgaataactaaaaaaaaaaccaaaccaaatcgtaacgtttataacaaccccgaacacgaacaccaaccaatcaacgaaacctcctcacctccgttaccaacgaaaacgctcgttaaaccttaaaaaaaaacgaccgaaaacgatacccgcgaatttattaaaaaaataaacgacgaataaaatcctcgaaaacgatcccgtttactaattaaacgataaaaaaaaacgatattcgctaacccaacaaaaacaacaaataaaataaacacaaataaaaaactactaccgatacc

SEQ ID NO: 34485 - DNA, 590 bp, Artificial Sequence
  chemically treated genomic DNA (Homo sapiens) CpG-island No: 34485
gttcgttacgtttcgttttattcgttttagttgtgtttcggcgtttagtttggggtagtcgttttcgtgagtttcgcgaggggagtttgttttagttatttcgtcgttttaattttttttaggtttataggtttagttcggcgcgcgtcgttcgttttgcgatttttagggcgagcgcgttttcggggcggtcgtgtaagaggcgtgggaagcgcgcggggggttttgagcgtgtagtcgtcgtttgcggacggcgaaggggcgggtgaaacgagtttttagcgtcgagtttgtttcgttttaaggtggacgttatatgtaagttacgagcgcgtcgtcgtacggtgtacgtttacggttcgggtcgggcgttttgcgggtgttttcgttgcgtcgtaggttttagtggcgcgttcggggattggaaggttgagtcgttttttttttatgtgcgcgggagttttttcgttattgtgtttagatcgtcggcgaagcgtagggggaggttgggaagggtatcgggagatacgggtttgcgttttttattcgggtttcggtttatttgttcgtatatttgttcgaagttttaa

SEQ ID NO: 34486 - DNA, 590 bp, Artificial Sequence
  chemically treated genomic DNA (Homo sapiens) CpG-island No: 34486
ttaaaacttcgaacaaatatacgaacaaataaaccgaaacccgaataaaaaacgcaaacccgtatctcccgatacccttcccaacctccccctacgcttcgccgacgatctaaacacaataacgaaaaaactcccgcgcacataaaaaaaaaacgactcaaccttccaatccccgaacgcgccactaaaacctacgacgcaacgaaaacacccgcaaaacgcccgacccgaaccgtaaacgtacaccgtacgacgacgcgctcgtaacttacatataacgtccaccttaaaacgaaacaaactcgacgctaaaaactcgtttcacccgccccttcgccgtccgcaaacgacgactacacgctcaaaaccccccgcgcgcttcccacgcctcttacacgaccgccccgaaaacgcgctcgccctaaaaatcgcaaaacgaacgacgcgcgccgaactaaacctataaacctaaaaaaaattaaaacgacgaaataactaaaacaaactcccctcgcgaaactcacgaaaacgactaccccaaactaaacgccgaaacacaactaaaacgaataaaacgaaacgtaacgaac

SEQ ID NO: 34487 - DNA, 590 bp, Artificial Sequence
  chemically treated genomic DNA (Homo sapiens) CpG-island No: 34487
ttaaggtttcggataggtgtgcggataggtgggtcggggttcgggtagggggcgtaggttcgtgtttttcgatgttttttttagtttttttttgcgtttcgtcggcgatttgggtatagtggcggagggattttcgcgtatatgggaggagggcggtttagttttttagttttcgggcgcgttattgaggtttgcggcgtagcgggggtattcgtagaacgttcggttcggatcgtgggcgtatatcgtgcggcgacgcgttcgtggtttgtatgtggcgtttattttgaaacgaagtaggttcgacgttggaaattcgttttattcgttttttcgtcgttcgtaggcggcgattgtacgtttagaatttttcgcgcgttttttacgttttttgtacggtcgtttcggaagcgcgttcgttttggaggtcgtagaacgagcggcgcgcgtcgggttgggtttgtggatttggaggaaattgaagcggcgaggtggttgggataggtttttttcgcggggtttacggggacggttgttttaggttgggcgtcgagatatagttggggcgggtggggcggaacgtggcggat

SEQ ID NO: 34488 - DNA, 590 bp, Artificial Sequence
  chemically treated genomic DNA (Homo sapiens) CpG-island No: 34488
atccgccacgttccgccccacccgccccaactatatctcgacgcccaacctaaaacaaccgtccccgtaaaccccgcgaaaaaaacctatcccaaccacctcgccgcttcaatttcctccaaatccacaaacccaacccgacgcgcgccgctcgttctacgacctccaaaacgaacgcgcttccgaaacgaccgtacaaaaaacgtaaaaaacgcgcgaaaaattctaaacgtacaatcgccgcctacgaacgacgaaaaaacgaataaaacgaatttccaacgtcgaacctacttcgtttcaaaataaacgccacatacaaaccacgaacgcgtcgccgcacgatatacgcccacgatccgaaccgaacgttctacgaatacccccgctacgccgcaaacctcaataacgcgcccgaaaactaaaaaactaaaccgccctcctcccatatacgcgaaaatccctccgccactatacccaaatcgccgacgaaacgcaaaaaaaaactaaaaaaaacatcgaaaaacacgaacctacgccccctacccgaaccccgacccacctatccgcacacctatccgaaaccttaa

SEQ ID NO: 34489 - DNA, 766 bp, Artificial Sequence
  chemically treated genomic DNA (Homo sapiens) CpG-island No: 34489
tcgttttttcggcgcgttgggcgtaggaggtttataagaaggagagcgttaaggaggcgggcgcggtcgcggtgtcggcgtcggtgttcgtagttatcgagtcgtcgttcgtgttgtatttgttcgttatttagtcgtcgtcgttcgtgttgttcgggtttttttttatgtcgttcgatcgttttatcgagcgttgcgagatcgtattggaaggcgagattatttcgtgtttcgtggtgggaggcgagaagcgtttgtgtttgtcgtagatttttaattcggtgttgcgcgatttttcgttgtagtagattaacgcggtgtgcgacgagttttatatttattgttcgcgttgtacggtcgattagttggagatttttaaagttatgggtattttgtttttttcggcgttttcgtgcgggtttattattaagacggacgtcgagcgtttgtgtaacgcgttgttttacggcggcgtttattcgtcgttttgtaagaagggagttgtcgttagtttggcgttgggtttggagtttagcgagcgtagcgttcgcgtgtattacgagtgtttcggtaagtgtaaggggttgttggtgttcgagttttatagtagttcgagcgtcgtttgtatttagtgtttggattgtcgttttatgtattcgtcgtataagttcgtggtgtattcgtataaggttttggagaatcggatttgttattggggtttcgattcggttaattggcgggtttatattttgttgagttaggatta

SEQ ID NO: 34490 - DNA, 766 bp, Artificial Sequence
  chemically treated genomic DNA (Homo sapiens) CpG-island No: 34490
taatcctaactcaacaaaatataaacccgccaattaaccgaatcgaaaccccaataacaaatccgattctccaaaaccttatacgaatacaccacgaacttatacgacgaatacataaaacgacaatccaaacactaaatacaaacgacgctcgaactactataaaactcgaacaccaacaaccccttacacttaccgaaacactcgtaatacacgcgaacgctacgctcgctaaactccaaacccaacgccaaactaacgacaactcccttcttacaaaacgacgaataaacgccgccgtaaaacaacgcgttacacaaacgctcgacgtccgtcttaataataaacccgcacgaaaacgccgaaaaaaacaaaatacccataactttaaaaatctccaactaatcgaccgtacaacgcgaacaataaatataaaactcgtcgcacaccgcgttaatctactacaacgaaaaatcgcgcaacaccgaattaaaaatctacgacaaacacaaacgcttctcgcctcccaccacgaaacacgaaataatctcgccttccaatacgatctcgcaacgctcgataaaacgatcgaacgacataaaaaaaaacccgaacaacacgaacgacgacgactaaataacgaacaaatacaacacgaacgacgactcgataactacgaacaccgacgccgacaccgcgaccgcgcccgcctccttaacgctctccttcttataaacctcctacgcccaacgcgccgaaaaaacga

SEQ ID NO: 34491 - DNA, 766 bp, Artificial Sequence
  chemically treated genomic DNA (Homo sapiens) CpG-island No: 34491
taattttggtttagtaggatgtaggttcgttagttggtcgagtcgaagttttagtggtaggttcggttttttagggttttgtgcgagtgtattacgaatttgtgcggcgggtatatgaggcggtagtttaggtattggatgtaggcggcgttcgggttgttgtagagttcgggtattagtagttttttatatttgtcgaagtattcgtggtatacgcggacgttgcgttcgttgagttttaggtttagcgttaggttggcggtagttttttttttgtagggcggcgggtaggcgtcgtcgtagagtagcgcgttgtataggcgttcggcgttcgttttggtgatgagttcgtacgagggcgtcgagaagggtaggatgtttatgattttgaggatttttagttggtcggtcgtgtagcgcgagtagtagatgtggagttcgtcgtatatcgcgttgatttgttgtagcgagaagtcgcgtagtatcgagttgagaatttgcggtagatataggcgtttttcgttttttattacgaagtacgagatggtttcgttttttagtacggtttcgtagcgttcggtggagcggtcggacggtatgaagaagggttcgggtagtacgggcggcggcggttggatggcgggtaggtgtagtacgggcggcggttcggtggttgcgggtatcggcgtcggtatcgcggtcgcgttcgtttttttggcgtttttttttttgtaggttttttgcgtttagcgcgtcgagaaagcgg

SEQ ID NO: 34492 - DNA, 766 bp, Artificial Sequence
  chemically treated genomic DNA (Homo sapiens) CpG-island No: 34492
ccgctttctcgacgcgctaaacgcaaaaaacctacaaaaaaaaaaacgccaaaaaaacgaacgcgaccgcgataccgacgccgatacccgcaaccaccgaaccgccgcccgtactacacctacccgccatccaaccgccgccgcccgtactacccgaacccttcttcataccgtccgaccgctccaccgaacgctacgaaaccgtactaaaaaacgaaaccatctcgtacttcgtaataaaaaacgaaaaacgcctatatctaccgcaaattctcaactcgatactacgcgacttctcgctacaacaaatcaacgcgatatacgacgaactccacatctactactcgcgctacacgaccgaccaactaaaaatcctcaaaatcataaacatcctacccttctcgacgccctcgtacgaactcatcaccaaaacgaacgccgaacgcctatacaacgcgctactctacgacgacgcctacccgccgccctacaaaaaaaaaactaccgccaacctaacgctaaacctaaaactcaacgaacgcaacgtccgcgtataccacgaatacttcgacaaatataaaaaactactaatacccgaactctacaacaacccgaacgccgcctacatccaatacctaaactaccgcctcatatacccgccgcacaaattcgtaatacactcgcacaaaaccctaaaaaaccgaacctaccactaaaacttcgactcgaccaactaacgaacctacatcctactaaaccaaaatta

SEQ ID NO: 34493 - DNA, 607 bp, Artificial Sequence
  chemically treated genomic DNA (Homo sapiens) CpG-island No: 34493
aggcgcgaggttttttttcgtaaacgttttgaatatttagttagatttttatcgatatttgtttgataggaacgtagggttcgttttagtcgtcgagatttgcgaggtttgggttttgtatatgcgtatggagtatatttgattattgggttttcgtgcgtacgcgcgtggattttgttatttgaggtgcgtatgcgtatttgtgtttagcgggatcgtttgtttggtaattcggagggagagattggaaatcgcggagttttttttgggaggttgcggttagtcggggttgatttgttatgttgggtttcggaggtcgttaagagtcgagagagatatgaggtgtttttgaagttcggtcgtttgggttatgaagaagatttttagtaagaagggcgagtcgtttttgggttttttcgcgcggcggtagaggagtagcgcgggaggcgggggcgagtcgggggagggcgtttattcgtagttcggttattacgttcgagatcgagatttcggtaagatttataaagttgttagcgcgggtaatgtggcgaaagtgtagtagatttttttgtttaggaagaatggtttgaacgatagagataagatg

SEQ ID NO: 34494 - DNA, 607 bp, Artificial Sequence
  chemically treated genomic DNA (Homo sapiens) CpG-island No: 34494
catcttatctctatcgttcaaaccattcttcctaaacaaaaaaatctactacactttcgccacattacccgcgctaacaactttataaatcttaccgaaatctcgatctcgaacgtaataaccgaactacgaataaacgccctcccccgactcgcccccgcctcccgcgctactcctctaccgccgcgcgaaaaaacccaaaaacgactcgcccttcttactaaaaatcttcttcataacccaaacgaccgaacttcaaaaacacctcatatctctctcgactcttaacgacctccgaaacccaacataacaaatcaaccccgactaaccgcaacctcccaaaaaaaactccgcgatttccaatctctccctccgaattaccaaacaaacgatcccgctaaacacaaatacgcatacgcacctcaaataacaaaatccacgcgcgtacgcacgaaaacccaataatcaaatatactccatacgcatatacaaaacccaaacctcgcaaatctcgacgactaaaacgaaccctacgttcctatcaaacaaatatcgataaaaatctaactaaatattcaaaacgtttacgaaaaaaaacctcgcgcct

SEQ ID NO: 34495 - DNA, 607 bp, Artificial Sequence
  chemically treated genomic DNA (Homo sapiens) CpG-island No: 34495
tattttgtttttatcgtttaagttattttttttgagtaaaaggatttgttgtattttcgttatattattcgcgttggtagttttgtggattttgtcgagatttcggtttcggacgtggtagtcgggttgcgagtaggcgttttttttcggttcgttttcgtttttcgcgttgtttttttgtcgtcgcgcgaaggagtttaagggcgattcgttttttttattaaaaattttttttatggtttaggcgatcgggttttagagatattttatgtttttttcggtttttaacggttttcggagtttaatataataagttagtttcggttggtcgtagttttttaaaggaaatttcgcggtttttaattttttttttcgggttattaagtaagcgatttcgttagatataagtgcgtatgcgtattttagatggtaaggtttacgcgcgtgcgtacgaaggtttagtggttaagtgtgttttatgcgtatgtgtaaggtttagatttcgtaaatttcggcgattgggacgagttttgcgtttttgttaaataaatgtcggtgggagtttggttgagtgtttaggacgtttgcgaaaagaagtttcgcgttt

SEQ ID NO: 34496 - DNA, 607 bp, Artificial Sequence
  chemically treated genomic DNA (Homo sapiens) CpG-island No: 34496
aaacgcgaaacttcttttcgcaaacgtcctaaacactcaaccaaactcccaccgacatttatttaacaaaaacgcaaaactcgtcccaatcgccgaaatttacgaaatctaaaccttacacatacgcataaaacacacttaaccactaaaccttcgtacgcacgcgcgtaaaccttaccatctaaaatacgcatacgcacttatatctaacgaaatcgcttacttaataacccgaaaaaaaaaattaaaaaccgcgaaatttcctttaaaaaactacgaccaaccgaaactaacttattatattaaactccgaaaaccgttaaaaaccgaaaaaaacataaaatatctctaaaacccgatcgcctaaaccataaaaaaaatttttaataaaaaaaacgaatcgcccttaaactccttcgcgcgacgacaaaaaaacaacgcgaaaaacgaaaacgaaccgaaaaaaaacgcctactcgcaacccgactaccacgtccgaaaccgaaatctcgacaaaatccacaaaactaccaacgcgaataatataacgaaaatacaacaaatccttttactcaaaaaaaataacttaaacgataaaaacaaaata

SEQ ID NO: 34497 - DNA, 599 bp, Artificial Sequence
  chemically treated genomic DNA (Homo sapiens) CpG-island No: 34497
gtcgttcgcggttttttttttttttttaggaacggtttaagcgttttgggtattttatcgggttttgtatcgagttttgtattataaatacgattttcgtgtaggatttaagtgtgaatttttgtaggttttcggattttgaagtattcggggttagatatttcgagttcgcggcggtggaaggtacgtaaaagggcgaatcgagacgattttaggacgttgaggtagcgtaggttttattcggtttcgttttgtttcgttttgtttcggtcggttttttagtattagttttttggcgtcggtttttagtttttttcgtattttttttttcgcgtttcgtcgttagattttcgtgatagttgagatttttttcgttcgaatagtttttttcgtcggagaggttaatgggttagggtaacggttgcgacggttggattttgaaggagttaaaaggcgttcggagcggagagtttaagaggcgtaagttaggcgtgttaaagtcggtcggaattgtttcggagggtacggtaataggtggtggggttgagtcgaggtgggtcgtggttagggggagggggtgttaggtcggaaggggttgt

SEQ ID NO: 34498 - DNA, 599 bp, Artificial Sequence
  chemically treated genomic DNA (Homo sapiens) CpG-island No: 34498
acaaccccttccgacctaacaccccctccccctaaccacgacccacctcgactcaaccccaccacctattaccgtaccctccgaaacaattccgaccgactttaacacgcctaacttacgcctcttaaactctccgctccgaacgccttttaactccttcaaaatccaaccgtcgcaaccgttaccctaacccattaacctctccgacgaaaaaaactattcgaacgaaaaaaatctcaactatcacgaaaatctaacgacgaaacgcgaaaaaaaaaatacgaaaaaaactaaaaaccgacgccaaaaaactaatactaaaaaaccgaccgaaacaaaacgaaacaaaacgaaaccgaataaaacctacgctacctcaacgtcctaaaatcgtctcgattcgcccttttacgtaccttccaccgccgcgaactcgaaatatctaaccccgaatacttcaaaatccgaaaacctacaaaaattcacacttaaatcctacacgaaaatcgtatttataatacaaaactcgatacaaaacccgataaaatacccaaaacgcttaaaccgttcctaaaaaaaaaaaaaaaaccgcgaacgac

SEQ ID NO: 34499 - DNA, 599 bp, Artificial Sequence
  chemically treated genomic DNA (Homo sapiens) CpG-island No: 34499
gtagtttttttcggtttagtattttttttttttggttacggtttatttcggtttagttttattatttgttatcgtgtttttcggagtagtttcgatcggttttaatacgtttggtttacgttttttaaatttttcgtttcgagcgttttttggtttttttaaaatttaatcgtcgtaatcgttgttttagtttattggttttttcggcgaagggggttgttcgggcggggaaagttttagttattacgagagtttagcggcggagcgcgaggggaagggtacgagaggggttgggagtcggcgttagaggattagtattggaaagtcggtcgggatagggcggggtagggcggggtcgggtggggtttgcgttgttttagcgttttggagtcgtttcggttcgtttttttgcgtgttttttatcgtcgcgagttcggaatgtttggtttcgggtgttttagggttcgagaatttgtagaagtttatatttaaattttatacgagagtcgtatttatgatgtagaattcggtgtagaattcgatggagtgtttaaggcgtttgagtcgtttttagaaggggaaggagagtcgcgggcggt

SEQ ID NO: 34500 - DNA, 599 bp, Artificial Sequence
  chemically treated genomic DNA (Homo sapiens) CpG-island No: 34500
accgcccgcgactctccttccccttctaaaaacgactcaaacgccttaaacactccatcgaattctacaccgaattctacatcataaatacgactctcgtataaaatttaaatataaacttctacaaattctcgaaccctaaaacacccgaaaccaaacattccgaactcgcgacgataaaaaacacgcaaaaaaacgaaccgaaacgactccaaaacgctaaaacaacgcaaaccccacccgaccccgccctaccccgccctatcccgaccgactttccaatactaatcctctaacgccgactcccaacccctctcgtacccttcccctcgcgctccgccgctaaactctcgtaataactaaaactttccccgcccgaacaacccccttcgccgaaaaaaccaataaactaaaacaacgattacgacgattaaattttaaaaaaaccaaaaaacgctcgaaacgaaaaatttaaaaaacgtaaaccaaacgtattaaaaccgatcgaaactactccgaaaaacacgataacaaataataaaactaaaccgaaataaaccgtaaccaaaaaaaaaaaatactaaaccgaaaaaaactac

SEQ ID NO: 34501 - DNA, 1214 bp, Artificial Sequence
  chemically treated genomic DNA (Homo sapiens) CpG-island No: 34501
  unsure (262)
ttttttcgcgttttttcggttttcgcgtcgtttttttcgttttattttgtaggttttttttttgtatttcgggcgtttcgttttgcgatatggcgttagagggtaattgcggcgatcggagttcgcgtcgggttgcgggatgtgttttagttgcgggcggtgggaaagtcgaggtcggagcgtcgcggtttagttgcgttttcggattgagcggagtttcgtagttcggtcggaggaatttatagggtagggcggggtcggncggatttgcggtcgcgtcgtttattggtcgcgatttggggtttgcgcgtgcgtaggggcgtggggtgcgtgtggtacgtgcggcgcgtgcgcgggcgggttttgcggtgggcgaggggtataggttttcggtgcgcggtacgcgggcggggagaggggcggggcgaggggcgcgtaggcgcgagggcggtagcgatcgtttgaggtgagtcggttcgggttggacgtcgcgggtcgcgtgacgagtgggttgcgcggtcgtcgtcgcggcgggcggtgggtcgggtttttttttgaaggggcggtgggatcggcggattttttgggtattggttattacggagacgtcgttacgtttcggggcggggttcgtttttttattttgttagtggggaaattgaggcgcggggttggcggcgttcgtgcggggggcgtgaggacgtgtagggaagcggtcgttgcggtttcgagacggttcgtggggtcgggatttgcgttcggggcgggagttgcgagcggtgggtcggagttgagcgtttcgggacgggatcgcgttttcgggtttttgttcgtttcgtcggggcgtttttgcgtgaatagcggggttcgttgtgttcggggcgttcgttcgtaggaagaagcggaggttcgagtagagtcgaaagagtttgttcgagggaggcgcggattttaggggttcgggagaggcgcgtcgttcgtttttgcggtaaggggttttcggggtgtaaacgcggtgtggggcgggcgttttcggggtgggacgtttcgtttacggggcggagtggcgtttggtcggttcgggtgggtgttcggttttcgtgggagttagtttggcgtgggggtttcgtagtttcgggattgggaggtattttttagaggaaagtcgtttttttatttttcgtttttgattaaaagtttttttttttgaaagt

SEQ ID NO: 34502 - DNA, 1214 bp, Artificial Sequence
  chemically treated genomic DNA (Homo sapiens) CpG-island No: 34502
  unsure (953)
actttcaaaaaaaaaaacttttaatcaaaaacgaaaaataaaaaaacgactttcctctaaaaaatacctcccaatcccgaaactacgaaacccccacgccaaactaactcccacgaaaaccgaacacccacccgaaccgaccaaacgccactccgccccgtaaacgaaacgtcccaccccgaaaacgcccgccccacaccgcgtttacaccccgaaaaccccttaccgcaaaaacgaacgacgcgcctctcccgaacccctaaaatccgcgcctccctcgaacaaactctttcgactctactcgaacctccgcttcttcctacgaacgaacgccccgaacacaacgaaccccgctattcacgcaaaaacgccccgacgaaacgaacaaaaacccgaaaacgcgatcccgtcccgaaacgctcaactccgacccaccgctcgcaactcccgccccgaacgcaaatcccgaccccacgaaccgtctcgaaaccgcaacgaccgcttccctacacgtcctcacgccccccgcacgaacgccgccaaccccgcgcctcaatttccccactaacaaaataaaaaaacgaaccccgccccgaaacgtaacgacgtctccgtaataaccaatacccaaaaaatccgccgatcccaccgccccttcaaaaaaaaacccgacccaccgcccgccgcgacgacgaccgcgcaacccactcgtcacgcgacccgcgacgtccaacccgaaccgactcacctcaaacgatcgctaccgccctcgcgcctacgcgcccctcgccccgcccctctccccgcccgcgtaccgcgcaccgaaaacctatacccctcgcccaccgcaaaacccgcccgcgcacgcgccgcacgtaccacacgcaccccacgcccctacgcacgcgcaaaccccaaatcgcgaccaataaacgacgcgaccgcaaatccgnccgaccccgccctaccctataaattcctccgaccgaactacgaaactccgctcaatccgaaaacgcaactaaaccgcgacgctccgacctcgactttcccaccgcccgcaactaaaacacatcccgcaacccgacgcgaactccgatcgccgcaattaccctctaacgccatatcgcaaaacgaaacgcccgaaatacaaaaaaaaaacctacaaaataaaacgaaaaaaacgacgcgaaaaccgaaaaaacgcgaaaaaa

SEQ ID NO: 34503 - DNA, 1214 bp, Artificial Sequence
  chemically treated genomic DNA (Homo sapiens) CpG-island No: 34503
  unsure (953)
gtttttaagaagaaagatttttgattaaaagcgggaaatgagaaagcgatttttttttgaaaagtgttttttagtttcgaggttgcgaggtttttacgttaggttggtttttacggaagtcgggtatttattcggatcgattaagcgttatttcgtttcgtggacggggcgttttatttcggggacgttcgttttatatcgcgtttgtatttcggaggttttttgtcgtagaggcggacggcgcgtttttttcgggtttttggggttcgcgtttttttcgggtagattttttcgattttgttcgagttttcgtttttttttgcgggcggacgtttcggatataacgggtttcgttgtttacgtaggggcgtttcggcggggcgggtaaagattcggggacgcggtttcgtttcgagacgtttagtttcggtttatcgttcgtagttttcgtttcgggcgtaggtttcgattttacgggtcgtttcggagtcgtagcggtcgtttttttgtacgtttttacgtttttcgtacggacgtcgttagtttcgcgttttagtttttttattagtaggatggaaagacgggtttcgtttcgaagcgtagcggcgttttcgtggtagttagtgtttagagagttcgtcggttttatcgtttttttaaaggagaattcggtttatcgttcgtcgcggcggcgatcgcgtagtttattcgttacgcggttcgcggcgtttagttcgggtcggtttattttaggcggtcgttgtcgttttcgcgtttgcgcgtttttcgtttcgttttttttttcgttcgcgtgtcgcgtatcggaggtttatgtttttcgtttatcgtaggattcgttcgcgtacgcgtcgtacgtgttatacgtattttacgtttttgcgtacgcgtaggttttaagtcgcggttaatgggcgacgcggtcgtagattcgntcggtttcgttttgttttgtgagttttttcggtcgggttgcggggtttcgtttagttcgggagcgtagttgggtcgcggcgtttcgatttcggtttttttatcgttcgtagttgaagtatatttcgtagttcggcgcggatttcgatcgtcgtagttgttttttggcgttatgtcgtagaacggagcgttcgggatgtaggaggagagtttgtagggtgaggcggaggaggcggcgcgggagtcgagggggcgcggggggg

SEQ ID NO: 34504 - DNA, 1214 bp, Artificial Sequence
  chemically treated genomic DNA (Homo sapiens) CpG-island No: 34504
  unsure (262)
cccccccgcgccccctcgactcccgcgccgcctcctccgcctcaccctacaaactctcctcctacatcccgaacgctccgttctacgacataacgccaaaaaacaactacgacgatcgaaatccgcgccgaactacgaaatatacttcaactacgaacgataaaaaaaccgaaatcgaaacgccgcgacccaactacgctcccgaactaaacgaaaccccgcaacccgaccgaaaaaactcacaaaacaaaacgaaaccgancgaatctacgaccgcgtcgcccattaaccgcgacttaaaacctacgcgtacgcaaaaacgtaaaatacgtataacacgtacgacgcgtacgcgaacgaatcctacgataaacgaaaaacataaacctccgatacgcgacacgcgaacgaaaaaaaaaacgaaacgaaaaacgcgcaaacgcgaaaacgacaacgaccgcctaaaataaaccgacccgaactaaacgccgcgaaccgcgtaacgaataaactacgcgatcgccgccgcgacgaacgataaaccgaattctcctttaaaaaaacgataaaaccgacgaactctctaaacactaactaccacgaaaacgccgctacgcttcgaaacgaaacccgtctttccatcctactaataaaaaaactaaaacgcgaaactaacgacgtccgtacgaaaaacgtaaaaacgtacaaaaaaacgaccgctacgactccgaaacgacccgtaaaatcgaaacctacgcccgaaacgaaaactacgaacgataaaccgaaactaaacgtctcgaaacgaaaccgcgtccccgaatctttacccgccccgccgaaacgcccctacgtaaacaacgaaacccgttatatccgaaacgtccgcccgcaaaaaaaaacgaaaactcgaacaaaatcgaaaaaatctacccgaaaaaaacgcgaaccccaaaaacccgaaaaaaacgcgccgtccgcctctacgacaaaaaacctccgaaatacaaacgcgatataaaacgaacgtccccgaaataaaacgccccgtccacgaaacgaaataacgcttaatcgatccgaataaatacccgacttccgtaaaaaccaacctaacgtaaaaacctcgcaacctcgaaactaaaaaacacttttcaaaaaaaaatcgctttctcatttcccgcttttaatcaaaaatctttcttcttaaaaac

SEQ ID NO: 34505 - DNA, 620 bp, Artificial Sequence
  chemically treated genomic DNA (Homo sapiens) CpG-island No: 34505
gtcgtacgcgtgtagttttttcgtgttgcgtatggcgttgggatcggtttgagcggcgggtgagtttttttaagtcggcggcgttcggtgttcggttatttacgcgcgtttcgcggttttcgggttatttttagttacgtcgagttttgttttaggagtttgtatagcggtttcgcggagatcgggattgcgtgggggaggatcgcggcgggggtcgtcgtcgagtaaggagcgcggtcgcggggatcgttcgggagtgggggcggcggggcgggtcgggttcggggtttttgttcgcggtgatagtgacgcgcgttttcgttcgtcgtttttgttatggtcgattcggttcgtcggacgtcgtttagagtcgttcgcggggagtttcggtgagtagcggtcggggtggggtcgcgatcgggggtcgggtttttgcgttgcgtttggtacggtgcgttcgggacgcgggcgttttgacggtcgtggggcgggcgggggggcgacgtttcgagggagggggtttcgcggtaagaaacgtttttgtttggggcggggttttttttgtttttttcggcggttttttcgtgggcgggttttttttacggtattttttgttttgt

SEQ ID NO: 34506 - DNA, 620 bp, Artificial Sequence
  chemically treated genomic DNA (Homo sapiens) CpG-island No: 34506
acaaaacaaaaaataccgtaaaaaaaacccgcccacgaaaaaaccgccgaaaaaaacaaaaaaaaccccgccccaaacaaaaacgtttcttaccgcgaaaccccctccctcgaaacgtcgcccccccgcccgccccacgaccgtcaaaacgcccgcgtcccgaacgcaccgtaccaaacgcaacgcaaaaacccgacccccgatcgcgaccccaccccgaccgctactcaccgaaactccccgcgaacgactctaaacgacgtccgacgaaccgaatcgaccataacaaaaacgacgaacgaaaacgcgcgtcactatcaccgcgaacaaaaaccccgaacccgacccgccccgccgcccccactcccgaacgatccccgcgaccgcgctccttactcgacgacgacccccgccgcgatcctcccccacgcaatcccgatctccgcgaaaccgctatacaaactcctaaaacaaaactcgacgtaactaaaaataacccgaaaaccgcgaaacgcgcgtaaataaccgaacaccgaacgccgccgacttaaaaaaactcacccgccgctcaaaccgatcccaacgccatacgcaacacgaaaaaactacacgcgtacgac

SEQ ID NO: 34507 - DNA, 620 bp, Artificial Sequence
  chemically treated genomic DNA (Homo sapiens) CpG-island No: 34507
gtagggtagggggtgtcgtggagaggattcgtttacggggggatcgtcgggagaggtaaggaggatttcgttttagataggggcgttttttgtcgcgggattttttttttcgggacgtcgttttttcgttcgttttacggtcgttagggcgttcgcgtttcggacgtatcgtgttagacgtagcgtagaggttcggttttcggtcgcggttttatttcggtcgttgtttatcgaggtttttcgcgagcgattttgggcggcgttcgacggatcggatcgattatggtagaggcggcgggcgggggcgcgcgttattgttatcgcgggtaggagtttcgaattcggttcgtttcgtcgtttttattttcgggcggttttcgcggtcgcgttttttgttcggcgacggttttcgtcgcgatttttttttacgtagtttcggttttcgcggagtcgttgtgtaagtttttaaaatagggttcggcgtggttgaaaatagttcgggggtcgcggggcgcgcgtaggtagtcgggtatcgggcgtcgtcggtttagagggatttattcgtcgtttaggtcgattttagcgttatgcgtagtacgggggagttgtacgcgtgcggt

SEQ ID NO: 34508 - DNA, 620 bp, Artificial Sequence
  chemically treated genomic DNA (Homo sapiens) CpG-island No: 34508
accgcacgcgtacaactcccccgtactacgcataacgctaaaatcgacctaaacgacgaataaatccctctaaaccgacgacgcccgatacccgactacctacgcgcgccccgcgacccccgaactattttcaaccacgccgaaccctattttaaaaacttacacaacgactccgcgaaaaccgaaactacgtaaaaaaaaatcgcgacgaaaaccgtcgccgaacaaaaaacgcgaccgcgaaaaccgcccgaaaataaaaacgacgaaacgaaccgaattcgaaactcctacccgcgataacaataacgcgcgcccccgcccgccgcctctaccataatcgatccgatccgtcgaacgccgcccaaaatcgctcgcgaaaaacctcgataaacaacgaccgaaataaaaccgcgaccgaaaaccgaacctctacgctacgtctaacacgatacgtccgaaacgcgaacgccctaacgaccgtaaaacgaacgaaaaaacgacgtcccgaaaaaaaaaatcccgcgacaaaaaacgcccctatctaaaacgaaatcctccttacctctcccgacgatccccccgtaaacgaatcctctccacgacaccccctaccctac

SEQ ID NO: 34509 - DNA, 788 bp, Artificial Sequence
  chemically treated genomic DNA (Homo sapiens) CpG-island No: 34509
tttcggggagaagagtttttagtttttttcgtggatatttaaagacgtcgagtttcggtttttaatcgggagcggttttcgtggtcgggtcgtaggtatttatcgtcgttttcgtcgttgtgtcgtcgtcgcgatatgttgtttttcggtgcgtcgcggaatcgagaggttaggcggtaagcgttgtaggaattgtttggtcgttggtcgacgtaaggatagttgtaaggcgcgcggatgggtcggtacgtaggcgtattagttcgttacggtttcggaagcgtaggagaggtcgtcgggtggggttaggcgttgcgatagtcggcgtgaggaagtttagtgggttacgaacgtttggtatatatgtaatcgttttttcgggttgttttcgtttgtcggttatttttttttttcgtttttcgttttatgttttttcggggttacgtagaaagtgtcgtcgttttggttatttagagttttcgggtcgcggtcgtcgtacgtttgaaggcgggtcgtgtcggcggtcgttttagttttcgttttcgtttaggtcggtttttcggggttttttaatggtttttcggtggttttttaatggttttttcggtcggtttttgcgtcgacgttaggagattttcggagtttggtgacgttacgagcgagtttttttatttaaatacgcggcgggggaataggttcgagggcggtgagtagtgataattgttaggcggagatagtgtagggaagagagattttagaaaggattaggattggcgggtatgtgttta

SEQ ID NO: 34510 - DNA, 788 bp, Artificial Sequence
  chemically treated genomic DNA (Homo sapiens) CpG-island No: 34510
taaacacatacccgccaatcctaatcctttctaaaatctctcttccctacactatctccgcctaacaattatcactactcaccgccctcgaacctattcccccgccgcgtatttaaataaaaaaactcgctcgtaacgtcaccaaactccgaaaatctcctaacgtcgacgcaaaaaccgaccgaaaaaaccattaaaaaaccaccgaaaaaccattaaaaaaccccgaaaaaccgacctaaacgaaaacgaaaactaaaacgaccgccgacacgacccgccttcaaacgtacgacgaccgcgacccgaaaactctaaataaccaaaacgacgacactttctacgtaaccccgaaaaaacataaaacgaaaaacgaaaaaaaaaaataaccgacaaacgaaaacaacccgaaaaaacgattacatatataccaaacgttcgtaacccactaaacttcctcacgccgactatcgcaacgcctaaccccacccgacgacctctcctacgcttccgaaaccgtaacgaactaatacgcctacgtaccgacccatccgcgcgccttacaactatccttacgtcgaccaacgaccaaacaattcctacaacgcttaccgcctaacctctcgattccgcgacgcaccgaaaaacaacatatcgcgacgacgacacaacgacgaaaacgacgataaatacctacgacccgaccacgaaaaccgctcccgattaaaaaccgaaactcgacgtctttaaatatccacgaaaaaaactaaaaactcttctccccgaaa

SEQ ID NO: 34511 - DNA, 788 bp, Artificial Sequence
  chemically treated genomic DNA (Homo sapiens) CpG-island No: 34511
tgagtatatattcgttagttttgattttttttaaggttttttttttttgtattgttttcgtttagtaattgttattgtttatcgttttcgagtttattttttcgtcgcgtatttgggtagaaaagttcgttcgtgacgttattaagtttcggaagttttttggcgtcggcgtaagggtcggtcgggaaaattattgagaggttatcgggaaattattgagaagtttcggaggatcggtttgagcggaggcggagattagagcggtcgtcggtacgattcgtttttaggcgtacgacgatcgcggttcgggggttttgagtggttaaagcggcggtattttttgcgtggtttcggaaggatatagagcggaaggcgggagaaagaagtagtcggtaggcggaggtagttcgagggggcggttgtatgtgtgttagacgttcgtagtttattgagtttttttacgtcggttgtcgtagcgtttagttttattcggcggttttttttgcgttttcggggtcgtggcgagttagtgcgtttgcgtgtcggtttattcgcgcgttttgtagttgtttttgcgtcggttagcggttagatagtttttgtagcgtttatcgtttggtttttcggtttcgcggcgtatcggagggtagtatgtcgcggcggcggtatagcgacgagaacgacggtgagtgtttgcggttcggttacggaggtcgttttcggttgggagtcgaggttcggcgtttttgggtgtttacggaagagattggaagttttttttttcggga

SEQ ID NO: 34512 - DNA, 788 bp, Artificial Sequence
  chemically treated genomic DNA (Homo sapiens) CpG-island No: 34512
tcccgaaaaaaaaaacttccaatctcttccgtaaacacccaaaaacgccgaacctcgactcccaaccgaaaacgacctccgtaaccgaaccgcaaacactcaccgtcgttctcgtcgctataccgccgccgcgacatactaccctccgatacgccgcgaaaccgaaaaaccaaacgataaacgctacaaaaactatctaaccgctaaccgacgcaaaaacaactacaaaacgcgcgaataaaccgacacgcaaacgcactaactcgccacgaccccgaaaacgcaaaaaaaaccgccgaataaaactaaacgctacgacaaccgacgtaaaaaaactcaataaactacgaacgtctaacacacatacaaccgccccctcgaactacctccgcctaccgactacttctttctcccgccttccgctctatatccttccgaaaccacgcaaaaaataccgccgctttaaccactcaaaacccccgaaccgcgatcgtcgtacgcctaaaaacgaatcgtaccgacgaccgctctaatctccgcctccgctcaaaccgatcctccgaaacttctcaataatttcccgataacctctcaataattttcccgaccgacccttacgccgacgccaaaaaacttccgaaacttaataacgtcacgaacgaacttttctacccaaatacgcgacgaaaaaataaactcgaaaacgataaacaataacaattactaaacgaaaacaatacaaaaaaaaaaaaccttaaaaaaaatcaaaactaacgaatatatactca

SEQ ID NO: 34513 - DNA, 628 bp, Artificial Sequence
  chemically treated genomic DNA (Homo sapiens) CpG-island No: 34513
ttttagtttgggtttcgtatagcgcggcggagcgcgggaggggcggggcgggtttgttgacgtcgtcggatttgaattgcgtaggcgcggcgcgagatcgcgggagcgagcgcgcggtaatagttcgcggtagttcgcgcgggagcggggcgtttgggtggatgggcgtttgggcgtttgggttgtcggacggtgggaacggaagtcgttgtgggacgttgaggaagttaggatggcgatttcgagtaagaagacgttaattttaagtttttagttttttaagagagttttttcgagagatttttcgtcggaggtttcgagtaagaggaagaattcggtttcgtagttgtcgttgttgtagtcgttcgggtttttcgtggaaggttttatcgttcgtatttcgatggagaattttttgtaagttgttcggaggtcgcgtcgcgggtgtggaggtgtgttggttagtaggtttcggggtttcggtagcgcgcgggcgtgggcgtgtgggtgtgtatttggtttgtgggtttggttttgaattcgtgtcggggtttttttgaggatttttttacgtaggttgtggagattgacgtgtatgatgtaggagatgtgtgttttgggtgatgtg

SEQ ID NO: 34514 - DNA, 628 bp, Artificial Sequence
  chemically treated genomic DNA (Homo sapiens) CpG-island No: 34514
cacatcacccaaaacacacatctcctacatcatacacgtcaatctccacaacctacgtaaaaaaatcctcaaaaaaaccccgacacgaattcaaaaccaaacccacaaaccaaatacacacccacacgcccacgcccgcgcgctaccgaaaccccgaaacctactaaccaacacacctccacacccgcgacgcgacctccgaacaacttacaaaaaattctccatcgaaatacgaacgataaaaccttccacgaaaaacccgaacgactacaacaacgacaactacgaaaccgaattcttcctcttactcgaaacctccgacgaaaaatctctcgaaaaaactctcttaaaaaactaaaaacttaaaattaacgtcttcttactcgaaatcgccatcctaacttcctcaacgtcccacaacgacttccgttcccaccgtccgacaacccaaacgcccaaacgcccatccacccaaacgccccgctcccgcgcgaactaccgcgaactattaccgcgcgctcgctcccgcgatctcgcgccgcgcctacgcaattcaaatccgacgacgtcaacaaacccgccccgcccctcccgcgctccgccgcgctatacgaaacccaaactaaaa

SEQ ID NO: 34515 - DNA, 628 bp, Artificial Sequence
  chemically treated genomic DNA (Homo sapiens) CpG-island No: 34515
tatattatttaaggtatatattttttatattatatacgttaatttttatagtttacgtaggaaaatttttaagggaatttcggtacgaatttaaggttagatttataagttaggtatatatttatacgtttacgttcgcgcgttgtcggagtttcggggtttgttggttagtatatttttatattcgcggcgcggttttcgggtaatttataggaagttttttatcgagatgcggacgatagagttttttacgaaaggttcggacgattgtaatagcggtagttgcggggtcgaatttttttttttgttcgggattttcgacgaagggtttttcgggagagtttttttggaaggttgggggtttggagttgacgtttttttgttcggagtcgttattttggtttttttagcgttttatagcgattttcgtttttatcgttcggtagtttaggcgtttaagcgtttatttatttaggcgtttcgttttcgcgcgaattgtcgcgaattgttatcgcgcgttcgttttcgcgatttcgcgtcgcgtttgcgtagtttaggttcggcgacgttagtaggttcgtttcgtttttttcgcgtttcgtcgcgttgtgcgaggtttagattgagg

SEQ ID NO: 34516 - DNA, 628 bp, Artificial Sequence
  chemically treated genomic DNA (Homo sapiens) CpG-island No: 34516
cctcaatctaaacctcgcacaacgcgacgaaacgcgaaaaaaacgaaacgaacctactaacgtcgccgaacctaaactacgcaaacgcgacgcgaaatcgcgaaaacgaacgcgcgataacaattcgcgacaattcgcgcgaaaacgaaacgcctaaataaataaacgcttaaacgcctaaactaccgaacgataaaaacgaaaatcgctataaaacgctaaaaaaaccaaaataacgactccgaacaaaaaaacgtcaactccaaacccccaaccttccaaaaaaactctcccgaaaaacccttcgtcgaaaatcccgaacaaaaaaaaaaattcgaccccgcaactaccgctattacaatcgtccgaacctttcgtaaaaaactctatcgtccgcatctcgataaaaaacttcctataaattacccgaaaaccgcgccgcgaatataaaaatatactaaccaacaaaccccgaaactccgacaacgcgcgaacgtaaacgtataaatatatacctaacttataaatctaaccttaaattcgtaccgaaattcccttaaaaattttcctacgtaaactataaaaattaacgtatataatataaaaaatatataccttaaataatata

SEQ ID NO: 34517 - DNA, 778 bp, Artificial Sequence
  chemically treated genomic DNA (Homo sapiens) CpG-island No: 34517
gtagtcgtagtcgttcggcgttcggagcgattttatgtttcggtatcgtagcgcggttcgaaatggaaattagatattgggtagttacgaagtttatgtaggcggtcgcggatatggtgcgggcgacggtagtttaggcggcgcggataaatttggcggtggttgcggaggttcggttcgttttgttttggtttcggacgacgagcgcggcgcggcgcggtacggcgcggcggttaagggggcgggggcgcggggcgttttcgattcgtaggagcgtcgaggcgattttagttttttatttttacgtaatcggtagcgttttcgtacgtagtatttacggtttcgggtttcgtcgcgtcgtcgtttttagtcgtcgtttttgtttcgcgtcggtcgcgatttttcgacgggcgcgtcggtttttttgagtcggtttttttggaaagatgttatacgtggcggtcgtaagtttattcgattgaaaacgttttcgaggcgttgggagaggaaattgtaagagaggtgtacgttttcggtcgtttcgtcgtcgagttaaagttttaggatatttattcgattatttcgacgcgggtggcgagggtttcgtcgagcgttaggtttaagagatattttttttcgagtttattgacggtttttgaatttttgtttcggtcggttcgtatcgtttcggtatttttttgtttagtaataatttcgtagaattttattacgttataaattaaattttttttaattggttagtggggagggtgattta

SEQ ID NO: 34518 - DNA, 778 bp, Artificial Sequence
  chemically treated genomic DNA (Homo sapiens) CpG-island No: 34518
taaatcaccctccccactaaccaattaaaaaaaatttaatttataacgtaataaaattctacgaaattattactaaacaaaaaaataccgaaacgatacgaaccgaccgaaacaaaaattcaaaaaccgtcaataaactcgaaaaaaaatatctcttaaacctaacgctcgacgaaaccctcgccacccgcgtcgaaataatcgaataaatatcctaaaactttaactcgacgacgaaacgaccgaaaacgtacacctctcttacaatttcctctcccaacgcctcgaaaacgttttcaatcgaataaacttacgaccgccacgtataacatctttccaaaaaaaccgactcaaaaaaaccgacgcgcccgtcgaaaaatcgcgaccgacgcgaaacaaaaacgacgactaaaaacgacgacgcgacgaaacccgaaaccgtaaatactacgtacgaaaacgctaccgattacgtaaaaataaaaaactaaaatcgcctcgacgctcctacgaatcgaaaacgccccgcgcccccgcccccttaaccgccgcgccgtaccgcgccgcgccgcgctcgtcgtccgaaaccaaaacaaaacgaaccgaacctccgcaaccaccgccaaatttatccgcgccgcctaaactaccgtcgcccgcaccatatccgcgaccgcctacataaacttcgtaactacccaatatctaatttccatttcgaaccgcgctacgataccgaaacataaaatcgctccgaacgccgaacgactacgactac

SEQ ID NO: 34519 - DNA, 778 bp, Artificial Sequence
  chemically treated genomic DNA (Homo sapiens) CpG-island No: 34519
tgaattattttttttattggttaattggagggggtttggtttgtgacgtgatgggattttgcgaaattgttattgagtaagagaatgtcggaacggtgcggatcggtcggagtaggggtttagaagtcgttagtggattcgggaaaaagtgttttttagatttggcgttcggcgggattttcgttattcgcgtcggggtgatcgggtgaatgttttggggttttggttcgacggcgaggcggtcgagggcgtgtattttttttgtagtttttttttttagcgtttcgggggcgtttttagtcgaataaatttgcgatcgttacgtgtggtatttttttaagggagtcggtttagaggggtcggcgcgttcgtcgggggatcgcggtcggcgcggggtaggggcggcggttagaggcggcggcgcggcggagttcggggtcgtggatgttgcgtgcggaggcgttgtcggttacgtaaagatgaggggttgaggtcgtttcggcgtttttgcgagtcggaagcgtttcgcgttttcgtttttttggtcgtcgcgtcgtgtcgcgtcgcgtcgcgttcgtcgttcgaggttagggtagggcgagtcgaattttcgtagttatcgttaagtttgttcgcgtcgtttgggttgtcgtcgttcgtattatgttcgcggtcgtttatatggatttcgtggttgtttagtgtttggtttttatttcgaatcgcgttgcggtgtcggagtatggggtcgtttcggacgtcgagcggttgcgattat

SEQ ID NO: 34520 - DNA, 778 bp, Artificial Sequence
  chemically treated genomic DNA (Homo sapiens) CpG-island No: 34520
ataatcgcaaccgctcgacgtccgaaacgaccccatactccgacaccgcaacgcgattcgaaataaaaaccaaacactaaacaaccacgaaatccatataaacgaccgcgaacataatacgaacgacgacaacccaaacgacgcgaacaaacttaacgataactacgaaaattcgactcgccctaccctaacctcgaacgacgaacgcgacgcgacgcgacacgacgcgacgaccaaaaaaacgaaaacgcgaaacgcttccgactcgcaaaaacgccgaaacgacctcaacccctcatctttacgtaaccgacaacgcctccgcacgcaacatccacgaccccgaactccgccgcgccgccgcctctaaccgccgcccctaccccgcgccgaccgcgatcccccgacgaacgcgccgacccctctaaaccgactcccttaaaaaaataccacacgtaacgatcgcaaatttattcgactaaaaacgcccccgaaacgctaaaaaaaaaaactacaaaaaaaatacacgccctcgaccgcctcgccgtcgaaccaaaaccccaaaacattcacccgatcaccccgacgcgaataacgaaaatcccgccgaacgccaaatctaaaaaacactttttcccgaatccactaacgacttctaaacccctactccgaccgatccgcaccgttccgacattctcttactcaataacaatttcgcaaaatcccatcacgtcacaaaccaaaccccctccaattaaccaataaaaaaaataattca

SEQ ID NO: 34521 - DNA, 581 bp, Artificial Sequence
  chemically treated genomic DNA (Homo sapiens) CpG-island No: 34521
ggttcgcgggagaagacggtgttaggagataggaggtcgggtttgcgggagaggacggtgttaggagataggaggtcgggttagcgcgagaggacggtgttaggagataggaggtcgggttagcgcgagaggacggtgttaggagataggaggtcgggtttgcgggagaggacggtgttaggagataggaggtcgggttcgcgggagaggacggtgttaggagataggaggtcgggttagcgcgagaggacggtgttaggagataggaggtcgggtttgcgggagaggacggtgttaggagataggaggtcgggtttgcgggagaggacggtgttaggagataggaggtcgggtttgcgggagaggacggtgttaggagataggaggtcgggtttgcgcgagaggacggtgttaggagataggaggtcgggtttgcgggagaggacggtgttaggagatagtaggtcgggtttgcgggagaggacggtgttaggagacgggagttcgggttcgcgggagaggacggtgttaggagacgggagttcgggttcgcgggagaggacggtgttaggagataggag

SEQ ID NO: 34522 - DNA, 581 bp, Artificial Sequence
  chemically treated genomic DNA (Homo sapiens) CpG-island No: 34522
ctcctatctcctaacaccgtcctctcccgcgaacccgaactcccgtctcctaacaccgtcctctcccgcgaacccgaactcccgtctcctaacaccgtcctctcccgcaaacccgacctactatctcctaacaccgtcctctcccgcaaacccgacctcctatctcctaacaccgtcctctcgcgcaaacccgacctcctatctcctaacaccgtcctctcccgcaaacccgacctcctatctcctaacaccgtcctctcccgcaaacccgacctcctatctcctaacaccgtcctctcccgcaaacccgacctcctatctcctaacaccgtcctctcgcgctaacccgacctcctatctcctaacaccgtcctctcccgcgaacccgacctcctatctcctaacaccgtcctctcccgcaaacccgacctcctatctcctaacaccgtcctctcgcgctaacccgacctcctatctcctaacaccgtcctctcgcgctaacccgacctcctatctcctaacaccgtcctctcccgcaaacccgacctcctatctcctaacaccgtcttctcccgcgaacc

SEQ ID NO: 34523 - DNA, 581 bp, Artificial Sequence
  chemically treated genomic DNA (Homo sapiens) CpG-island No: 34523
tttttgttttttagtatcgttttttttcgcgaattcgagttttcgttttttagtatcgttttttttcgcgaattcgagttttcgttttttagtatcgttttttttcgtaaattcgatttgttgttttttagtatcgttttttttcgtaaattcgattttttgttttttagtatcgttttttcgcgtaaattcgattttttgttttttagtatcgttttttttcgtaaattcgattttttgttttttagtatcgttttttttcgtaaattcgattttttgttttttagtatcgttttttttcgtaaattcgattttttgttttttagtatcgttttttcgcgttaattcgattttttgttttttagtatcgttttttttcgcgaattcgattttttgttttttagtatcgttttttttcgtaaattcgattttttgttttttagtatcgttttttcgcgttaattcgattttttgttttttagtatcgttttttcgcgttaattcgattttttgttttttagtatcgttttttttcgtaaattcgattttttgttttttagtatcgttttttttcgcgaatt

SEQ ID NO: 34524 - DNA, 581 bp, Artificial Sequence
  chemically treated genomic DNA (Homo sapiens) CpG-island No: 34524
aattcgcgaaaaaaaacgatactaaaaaacaaaaaatcgaatttacgaaaaaaaacgatactaaaaaacaaaaaatcgaattaacgcgaaaaaacgatactaaaaaacaaaaaatcgaattaacgcgaaaaaacgatactaaaaaacaaaaaatcgaatttacgaaaaaaaacgatactaaaaaacaaaaaatcgaattcgcgaaaaaaaacgatactaaaaaacaaaaaatcgaattaacgcgaaaaaacgatactaaaaaacaaaaaatcgaatttacgaaaaaaaacgatactaaaaaacaaaaaatcgaatttacgaaaaaaaacgatactaaaaaacaaaaaatcgaatttacgaaaaaaaacgatactaaaaaacaaaaaatcgaatttacgcgaaaaaacgatactaaaaaacaaaaaatcgaatttacgaaaaaaaacgatactaaaaaacaacaaatcgaatttacgaaaaaaaacgatactaaaaaacgaaaactcgaattcgcgaaaaaaaacgatactaaaaaacgaaaactcgaattcgcgaaaaaaaacgatactaaaaaacaaaaa

SEQ ID NO: 34525 - DNA, 824 bp, Artificial Sequence
  chemically treated genomic DNA (Homo sapiens) CpG-island No: 34525
tttttgaattttttttttagcgtgaaaatgatattttcgaggggttgggggattgggggagggtagaagggagtcggggagcgggcgcggggggcgcggggagggtagggcgcggcgcgggaaagtttgggggggcgggtgtgtcgcggtattggggttggcggacgggagggcgggcgcgtttttggatcggtcggttttgtgtgttacgcggaggtcggtagcgcggaggtcgaggtcgaggtttcgagttcgcgggtcgtacggcgaggtcggttcgggggcgggtagggcggcggggggcggcggcggtttcgcgaggggcggttcggcggtagcggttgtcgcggcgcggtcggtgcgggtcgggggtgggggcgagggtcggcgtttttttcgcgcgtttttagcgttttcgttttttcggtttgagcggggcgggcggaggagggagcggcggcggcggcggcggcggcggcggcggtattgtgcgcgtattagtagttcggttcgggaggagtaggacgcgtcggggtcgttttttttcgtacggatttatgaattagtcgggcggcgcggcggtttcgtaggtacgacggggggtcgggggtatgtatcgcgcgggggatttcggggggtcggggttcggggcgttgcgttattttattgtaagatttgtaaaatgtaaagtgtttgggtacgtttgcgggttttttgtgggcgtaatcgggagggtcggggttcggagagtattttttcgggcgttgcggggtgcgaggagggtgggggtgacgagggggttttttggggtttttatttagcgt

SEQ ID NO: 34526 - DNA, 824 bp, Artificial Sequence
  chemically treated genomic DNA (Homo sapiens) CpG-island No: 34526
acgctaaataaaaaccccaaaaaaccccctcgtcacccccaccctcctcgcaccccgcaacgcccgaaaaaatactctccgaaccccgaccctcccgattacgcccacaaaaaacccgcaaacgtacccaaacactttacattttacaaatcttacaataaaataacgcaacgccccgaaccccgaccccccgaaatcccccgcgcgatacatacccccgaccccccgtcgtacctacgaaaccgccgcgccgcccgactaattcataaatccgtacgaaaaaaaacgaccccgacgcgtcctactcctcccgaaccgaactactaatacgcgcacaataccgccgccgccgccgccgccgccgccgccgctccctcctccgcccgccccgctcaaaccgaaaaaacgaaaacgctaaaaacgcgcgaaaaaaacgccgaccctcgcccccacccccgacccgcaccgaccgcgccgcgacaaccgctaccgccgaaccgcccctcgcgaaaccgccgccgccccccgccgccctacccgcccccgaaccgacctcgccgtacgacccgcgaactcgaaacctcgacctcgacctccgcgctaccgacctccgcgtaacacacaaaaccgaccgatccaaaaacgcgcccgccctcccgtccgccaaccccaataccgcgacacacccgcccccccaaactttcccgcgccgcgccctaccctccccgcgccccccgcgcccgctccccgactcccttctaccctcccccaatcccccaacccctcgaaaatatcattttcacgctaaaaaaaaaattcaaaaa

SEQ ID NO: 34527 - DNA, 824 bp, Artificial Sequence
  chemically treated genomic DNA (Homo sapiens) CpG-island No: 34527
gcgttgggtgggggttttaaaagattttttcgttatttttatttttttcgtatttcgtagcgttcgggggggtgtttttcggatttcgattttttcgattgcgtttataaaaagttcgtaaacgtgtttaggtattttgtattttgtaaattttgtaatgaagtggcgtagcgtttcgggtttcggtttttcggggtttttcgcgcggtgtatgttttcggtttttcgtcgtatttgcggagtcgtcgcgtcgttcggttggtttatgggttcgtgcgggaggaggcggtttcggcgcgttttgtttttttcgggtcgggttgttggtgcgcgtataatgtcgtcgtcgtcgtcgtcgtcgtcgtcgtcgttttttttttcgttcgtttcgtttaggtcgggggggcgggggcgttgggggcgcgcggggggggcgtcggttttcgtttttattttcggttcgtatcggtcgcgtcgcggtagtcgttgtcgtcgagtcgtttttcgcggggtcgtcgtcgtttttcgtcgttttgttcgttttcgggtcggtttcgtcgtgcggttcgcgagttcggggtttcggtttcggttttcgcgttgtcggttttcgcgtggtatataaagtcggtcggtttaggggcgcgttcgttttttcgttcgttagttttagtgtcgcggtatattcgtttttttaaattttttcgcgtcgcgttttgtttttttcgcgtttttcgcgttcgtttttcggtttttttttgtttttttttagttttttagtttttcggaaatgttatttttacgttggaaaaaaagtttaggga

SEQ ID NO: 34528 - DNA, 824 bp, Artificial Sequence
  chemically treated genomic DNA (Homo sapiens) CpG-island No: 34528
tccctaaactttttttccaacgtaaaaataacatttccgaaaaactaaaaaactaaaaaaaaacaaaaaaaaaccgaaaaacgaacgcgaaaaacgcgaaaaaaacaaaacgcgacgcgaaaaaatttaaaaaaacgaatataccgcgacactaaaactaacgaacgaaaaaacgaacgcgcccctaaaccgaccgactttatataccacgcgaaaaccgacaacgcgaaaaccgaaaccgaaaccccgaactcgcgaaccgcacgacgaaaccgacccgaaaacgaacaaaacgacgaaaaacgacgacgaccccgcgaaaaacgactcgacgacaacgactaccgcgacgcgaccgatacgaaccgaaaataaaaacgaaaaccgacgccccccccgcgcgcccccaacgcccccgcccccccgacctaaacgaaacgaacgaaaaaaaaaacgacgacgacgacgacgacgacgacgacgacattatacgcgcaccaacaacccgacccgaaaaaaacaaaacgcgccgaaaccgcctcctcccgcacgaacccataaaccaaccgaacgacgcgacgactccgcaaatacgacgaaaaaccgaaaacatacaccgcgcgaaaaaccccgaaaaaccgaaacccgaaacgctacgccacttcattacaaaatttacaaaatacaaaatacctaaacacgtttacgaactttttataaacgcaatcgaaaaaatcgaaatccgaaaaacacccccccgaacgctacgaaatacgaaaaaaataaaaataacgaaaaaatcttttaaaacccccacccaacgc

SEQ ID NO: 34529 - DNA, 532 bp, Artificial Sequence
  chemically treated genomic DNA (Homo sapiens) CpG-island No: 34529
tttacggcggtatgatacgagttaaattatttgtttatagtatgtaaatattaggttgcgaatcggcggaaatttgtgacgggttgtacggttttaggttttaaatcgggttaatggtgaagatatcggcgaatagggcgagaatatcgaaggtgaataagtttatggagatagttttggtatcgaatacgggtagaatacggacgtcgatgacgttgtttttcgtgcggtcgggattcgggtattgcgtgtgtttttggaattatataagtgtaacgtgagttgcgattagggtaaggataatgttaggaacgagtaggacgtgtgcgatgtagaagcggtttagtattagattagacgggaagtttttatcgaagatgaattagtgtgtttacgtatcgatgatcgggatggatagaataatcgcggatatgattcgtaggtcgatatcggagagtagatcgttcgggagggagtaatttatgaagtttttaattatgtagaggaggagtagggttatatcgatgagtta

SEQ ID NO: 34530 - DNA, 532 bp, Artificial Sequence
  chemically treated genomic DNA (Homo sapiens) CpG-island No: 34530
taactcatcgatataaccctactcctcctctacataattaaaaacttcataaattactccctcccgaacgatctactctccgatatcgacctacgaatcatatccgcgattattctatccatcccgatcatcgatacgtaaacacactaattcatcttcgataaaaacttcccgtctaatctaatactaaaccgcttctacatcgcacacgtcctactcgttcctaacattatccttaccctaatcgcaactcacgttacacttatataattccaaaaacacacgcaatacccgaatcccgaccgcacgaaaaacaacgtcatcgacgtccgtattctacccgtattcgataccaaaactatctccataaacttattcaccttcgatattctcgccctattcgccgatatcttcaccattaacccgatttaaaacctaaaaccgtacaacccgtcacaaatttccgccgattcgcaacctaatatttacatactataaacaaataatttaactcgtatcataccgccgtaaa

SEQ ID NO: 34531 - DNA, 532 bp, Artificial Sequence
  chemically treated genomic DNA (Homo sapiens) CpG-island No: 34531
tggtttatcggtgtgattttgttttttttttgtatggttgagggttttatgggttattttttttcggacgatttgtttttcggtgtcggtttgcgaattatgttcgcgattattttgtttatttcgattatcggtacgtggatatattggtttattttcggtggagatttttcgtttgatttgatgttggatcgtttttatatcgtatacgttttgttcgtttttggtattatttttgttttgatcgtagtttacgttgtatttgtatggttttagaagtatacgtagtattcgggtttcggtcgtacggagaataacgttatcggcgttcgtattttgttcgtattcggtattaaggttatttttatgggtttgtttattttcggtgttttcgttttgttcgtcggtatttttattattaattcgatttggaatttggggtcgtataattcgttataggttttcgtcggttcgtagtttgatatttatatgttgtggatagatggtttggttcgtattatgtcgtcgtggg

SEQ ID NO: 34532 - DNA, 532 bp, Artificial Sequence
  chemically treated genomic DNA (Homo sapiens) CpG-island No: 34532
cccacgacgacataatacgaaccaaaccatctatccacaacatataaatatcaaactacgaaccgacgaaaacctataacgaattatacgaccccaaattccaaatcgaattaataataaaaataccgacgaacaaaacgaaaacaccgaaaataaacaaacccataaaaataaccttaataccgaatacgaacaaaatacgaacgccgataacgttattctccgtacgaccgaaacccgaatactacgtatacttctaaaaccatacaaatacaacgtaaactacgatcaaaacaaaaataataccaaaaacgaacaaaacgtatacgatataaaaacgatccaacatcaaatcaaacgaaaaatctccaccgaaaataaaccaatatatccacgtaccgataatcgaaataaacaaaataatcgcgaacataattcgcaaaccgacaccgaaaaacaaatcgtccgaaaaaaaataacccataaaaccctcaaccatacaaaaaaaaaacaaaatcacaccgataaacca

SEQ ID NO: 34533 - DNA, 518 bp, Artificial Sequence
  chemically treated genomic DNA (Homo sapiens) CpG-island No: 34533
cgtgtatattcgtacgcgcgtatttcgttcggatttcgtgttcgttcgtcggttttcgttcggttttcgttacgtcgcgtttcgtttagtttttattcggatttttagatttcgttcggttttcgttcgttttatcggatttcgggatttcgcgttcggttcgtcggttttatttggatttatggatttcgttcggatttcgggacgtcgcgtttcgtttattttgttcgcgggttttcgcgtcggtcggtggatttcgttcgttttttatttatttcgcggggattcgggacgtcgcgttcggttcgttggtttttattcggattcgcggatttcgttcggttttcgggacgtcgcgtttcgttcgttttttcgggaagtttcgcgttttgtatcgtcggcgttgttcgttcgtattcgtttttttttttcgcgtttcgtgtcggttttcgaaggtcgagggaggcgacggattcgaagcggtcgagtcgcgttcgggagttgcgggcgacgttcgt

SEQ ID NO: 34534 - DNA, 518 bp, Artificial Sequence
  chemically treated genomic DNA (Homo sapiens) CpG-island No: 34534
acgaacgtcgcccgcaactcccgaacgcgactcgaccgcttcgaatccgtcgcctccctcgaccttcgaaaaccgacacgaaacgcgaaaaaaaaaaacgaatacgaacgaacaacgccgacgatacaaaacgcgaaacttcccgaaaaaacgaacgaaacgcgacgtcccgaaaaccgaacgaaatccgcgaatccgaataaaaaccaacgaaccgaacgcgacgtcccgaatccccgcgaaataaataaaaaacgaacgaaatccaccgaccgacgcgaaaacccgcgaacaaaataaacgaaacgcgacgtcccgaaatccgaacgaaatccataaatccaaataaaaccgacgaaccgaacgcgaaatcccgaaatccgataaaacgaacgaaaaccgaacgaaatctaaaaatccgaataaaaactaaacgaaacgcgacgtaacgaaaaccgaacgaaaaccgacgaacgaacacgaaatccgaacgaaatacgcgcgtacgaatatacacg

SEQ ID NO: 34535 - DNA, 518 bp, Artificial Sequence
  chemically treated genomic DNA (Homo sapiens) CpG-island No: 34535
acgggcgtcgttcgtagttttcgggcgcgattcggtcgtttcggattcgtcgtttttttcggttttcggaggtcggtacgggacgcgggaggagggagcgggtgcggacgagtagcgtcggcggtgtagggcgcggggtttttcggagggacgagcggagcgcggcgtttcggggatcgggcggggttcgcgagttcgggtgaggattagcgggtcgagcgcggcgtttcgggttttcgcggggtgagtgggggacgggcggggtttatcgatcggcgcgaggattcgcgagtagggtgagcggggcgcggcgtttcggggttcgggcggggtttatgagtttaagtgggatcggcgagtcgggcgcggagtttcggggttcggtggggcgggcggggatcgggcggggtttgggggttcgggtgaggattgagcggagcgcggcgtgacggggatcgggcggggatcggcgagcgggtacggggttcgggcggggtgcgcgcgtgcgagtgtgtacg

SEQ ID NO: 34536 - DNA, 518 bp, Artificial Sequence
  chemically treated genomic DNA (Homo sapiens) CpG-island No: 34536
cgtacacactcgcacgcgcgcaccccgcccgaaccccgtacccgctcgccgatccccgcccgatccccgtcacgccgcgctccgctcaatcctcacccgaacccccaaaccccgcccgatccccgcccgccccaccgaaccccgaaactccgcgcccgactcgccgatcccacttaaactcataaaccccgcccgaaccccgaaacgccgcgccccgctcaccctactcgcgaatcctcgcgccgatcgataaaccccgcccgtcccccactcaccccgcgaaaacccgaaacgccgcgctcgacccgctaatcctcacccgaactcgcgaaccccgcccgatccccgaaacgccgcgctccgctcgtccctccgaaaaaccccgcgccctacaccgccgacgctactcgtccgcacccgctccctcctcccgcgtcccgtaccgacctccgaaaaccgaaaaaaacgacgaatccgaaacgaccgaatcgcgcccgaaaactacgaacgacgcccgt

SEQ ID NO: 34537 - DNA, 706 bp, Artificial Sequence
  chemically treated genomic DNA (Homo sapiens) CpG-island No: 34537
gacgttggcggcgcgggagatggcgtttcgggtttttttggagatgttgatatcgttcgggagttgcgaggagatcgggggtgagtaaagttgtcgttttagtatttgttttttttttgttcgttcgttcgtttttttcgagttgtttatcgtttttttgatgattttggtgattacggtattgggtaggtttaggttttcgggttttttcgttattgtcgtcgttggggtttaaattttttttcgttttcgttttagggagttattgcgttcggatttttcgcgtcgttacggtttgattttgcgaggttttcgtttcgttttacgtggtttatagtgttttatagtgttttgagcgttatagttttttttttttttttatagattcgttttcgttttaaatatcggcgtattcggattttgaagtcgtagtggttttggttcgttaaggtttttatttaattttatagtatttcgtacgtttttttttaggtttatttttttgtttttcgttatcgtcgcgtcgggaatttttttattaatttatttggtttaatggagttttcgttcgttttttatggtgttttgcgtcgttgttgggtgacggcgcggtcgggcgtagcgcgtgggagacgaaagcgtgttgattcggtagggcggatttttttaggattttaggtaggtttgggggttcgtcgggttcgtt

SEQ ID NO: 34538 - DNA, 706 bp, Artificial Sequence
  chemically treated genomic DNA (Homo sapiens) CpG-island No: 34538
aacgaacccgacgaacccccaaacctacctaaaatcctaaaaaaatccgccctaccgaatcaacacgctttcgtctcccacgcgctacgcccgaccgcgccgtcacccaacaacgacgcaaaacaccataaaaaacgaacgaaaactccattaaaccaaataaattaataaaaaaattcccgacgcgacgataacgaaaaacaaaaaaataaacctaaaaaaaaacgtacgaaatactataaaattaaataaaaaccttaacgaaccaaaaccactacgacttcaaaatccgaatacgccgatatttaaaacgaaaacgaatctataaaaaaaaaaaaaaaactataacgctcaaaacactataaaacactataaaccacgtaaaacgaaacgaaaacctcgcaaaatcaaaccgtaacgacgcgaaaaatccgaacgcaataactccctaaaacgaaaacgaaaaaaaatttaaaccccaacgacgacaataacgaaaaaacccgaaaacctaaacctacccaataccgtaatcaccaaaatcatcaaaaaaacgataaacaactcgaaaaaaacgaacgaacgaacaaaaaaaaaacaaatactaaaacgacaactttactcacccccgatctcctcgcaactcccgaacgatatcaacatctccaaaaaaacccgaaacgccatctcccgcgccgccaacgtc

SEQ ID NO: 34539 - DNA, 706 bp, Artificial Sequence
  chemically treated genomic DNA (Homo sapiens) CpG-island No: 34539
aacggattcggcgggtttttaagtttgtttagggttttaaagggattcgttttgtcgagttagtacgttttcgttttttacgcgttgcgttcggtcgcgtcgttatttagtagcggcgtagggtattatgggaaacggacggaagttttattgagttaaataagttggtgagaaggttttcgacgcggcgatggcgagaagtagagaaatggatttgggaaggggcgtgcggggtgttgtagggttggatggaagttttggcgggttaaaattattgcggttttaaaattcggatgcgtcggtatttgaggcggaggcgggtttgtggggggaggagggaggttatggcgtttagagtattgtgggatattgtaggttacgtggggcggaacggaaatttcgtagggttagatcgtagcgacgcgggaagttcggacgtagtagttttttgaagcggaggcgaaggggagtttaagttttagcggcggtaatggcggagaggttcgaggatttaaatttgtttaatgtcgtgattattaggattattaaggaggcggtgagtagttcggggggggcggacgaacgggtaggagggaagtaggtgttggaacggtagttttgtttattttcggttttttcgtagttttcggacggtgttaatatttttaaggaggttcggagcgttatttttcgcgtcgttagcgtt

SEQ ID NO: 34540 - DNA, 706 bp, Artificial Sequence
  chemically treated genomic DNA (Homo sapiens) CpG-island No: 34540
aacgctaacgacgcgaaaaataacgctccgaacctccttaaaaatattaacaccgtccgaaaactacgaaaaaaccgaaaataaacaaaactaccgttccaacacctacttccctcctacccgttcgtccgccccccccgaactactcaccgcctccttaataatcctaataatcacgacattaaacaaatttaaatcctcgaacctctccgccattaccgccgctaaaacttaaactccccttcgcctccgcttcaaaaaactactacgtccgaacttcccgcgtcgctacgatctaaccctacgaaatttccgttccgccccacgtaacctacaatatcccacaatactctaaacgccataacctccctcctccccccacaaacccgcctccgcctcaaataccgacgcatccgaattttaaaaccgcaataattttaacccgccaaaacttccatccaaccctacaacaccccgcacgccccttcccaaatccatttctctacttctcgccatcgccgcgtcgaaaaccttctcaccaacttatttaactcaataaaacttccgtccgtttcccataataccctacgccgctactaaataacgacgcgaccgaacgcaacgcgtaaaaaacgaaaacgtactaactcgacaaaacgaatccctttaaaaccctaaacaaacttaaaaacccgccgaatccgtt

SEQ ID NO: 34541 - DNA, 522 bp, Artificial Sequence
  chemically treated genomic DNA (Homo sapiens) CpG-island No: 34541
ttttacgtttcggttttagtcgtttacgtgcgttttttcgcgtttttttttcgtaggtttagcggttttcggcgttgcggttatttatttttaatgtagtcgtgtagggtgattatgcgcgttcgttcggggttgttgaacggggtgtagtggatgtcgtcggatagggcggagggaaggcgggacgggggcgttttcgagggcggtattgggtgttgcggcgtgtgttttttatgacgcgttcggtagttttgaaattatatttggaacgatagtttcggtagttttagtttcgaggaaaagagtcggacgcgtcgtcgggagattttaggcgggattgtttcgtcgttttttggagaaggatggttacgtgtacgtattatttttcgcgtcgagtttagttacgagtttcggggcgtgttcgcggtttttaggtttcgtttattttcgttttatttggatgatttttcggttgaggttcgttatgttcgttagtttttgtagtcgttgagcgtgagggtt

SEQ ID NO: 34542 - DNA, 522 bp, Artificial Sequence
  chemically treated genomic DNA (Homo sapiens) CpG-island No: 34542
aaccctcacgctcaacgactacaaaaactaacgaacataacgaacctcaaccgaaaaatcatccaaataaaacgaaaataaacgaaacctaaaaaccgcgaacacgccccgaaactcgtaactaaactcgacgcgaaaaataatacgtacacgtaaccatccttctccaaaaaacgacgaaacaatcccgcctaaaatctcccgacgacgcgtccgactcttttcctcgaaactaaaactaccgaaactatcgttccaaatataatttcaaaactaccgaacgcgtcataaaaaacacacgccgcaacacccaataccgccctcgaaaacgcccccgtcccgccttccctccgccctatccgacgacatccactacaccccgttcaacaaccccgaacgaacgcgcataatcaccctacacgactacattaaaaataaataaccgcaacgccgaaaaccgctaaacctacgaaaaaaaaacgcgaaaaaacgcacgtaaacgactaaaaccgaaacgtaaaa

SEQ ID NO: 34543 - DNA, 522 bp, Artificial Sequence
  chemically treated genomic DNA (Homo sapiens) CpG-island No: 34543
aatttttacgtttagcggttgtaggagttggcggatatgacgggttttagtcggagagttatttaggtgggacgggggtgggcggggtttggggatcgcgggtacgtttcggagttcgtagttgggttcggcgcggagggtggtgcgtgtacgtggttatttttttttaggaggcgacgaggtagtttcgtttggggtttttcggcggcgcgttcgattttttttttcgaggttgaggttgtcgaggttgtcgttttaggtgtggttttaaaattgtcgggcgcgttataaaaagtatacgtcgtaatatttagtgtcgttttcgggggcgttttcgtttcgtttttttttcgttttgttcgacgatatttattatatttcgtttagtagtttcgagcgggcgcgtatggttattttgtacggttatattgagagtaagtaatcgtagcgtcgggagtcgttgggtttgcggggagggggcgcggaggagcgtacgtgggcggttgaggtcgaggcgtgggg

SEQ ID NO: 34544 - DNA, 522 bp, Artificial Sequence
  chemically treated genomic DNA (Homo sapiens) CpG-island No: 34544
ccccacgcctcgacctcaaccgcccacgtacgctcctccgcgccccctccccgcaaacccaacgactcccgacgctacgattacttactctcaatataaccgtacaaaataaccatacgcgcccgctcgaaactactaaacgaaatataataaatatcgtcgaacaaaacgaaaaaaaaacgaaacgaaaacgcccccgaaaacgacactaaatattacgacgtatactttttataacgcgcccgacaattttaaaaccacacctaaaacgacaacctcgacaacctcaacctcgaaaaaaaaaatcgaacgcgccgccgaaaaaccccaaacgaaactacctcgtcgcctcctaaaaaaaaataaccacgtacacgcaccaccctccgcgccgaacccaactacgaactccgaaacgtacccgcgatccccaaaccccgcccacccccgtcccacctaaataactctccgactaaaacccgtcatatccgccaactcctacaaccgctaaacgtaaaaatt

SEQ ID NO: 34545 - DNA, 573 bp, Artificial Sequence
  chemically treated genomic DNA (Homo sapiens) CpG-island No: 34545
agtcggcgattcgggattcgaatttgcgttttaaagtcgaggggcggagtcgggagtgaacgtcggggttagcggagtacgggatcgcgtttttttcgttcgttcgggtcgtttcgcgggcgttttttttttttttatgttcgcgcggggtcgggaattttttgtcgggtcgcggttcgcgaataatgcgcgttttttgttcgttcggtcgggtcgcggttcgtttatttttcgttttgcggtcgtcgggaaatgatagtagttcgggatcgtcgcgcgggtatacggggtcgcgtttcgggagacggacggggtcgtttatcgagggtcgtcgggcgagggtgcgaggtgatttagcgacgggtaagcggtagcgggtaggcggtcgttatgtatttaggcgcgcgtataagttttttgtcggtcgtattttttgtaatatgcgtgtttgtgttatgtatttaagtttttattgtacgttgtacgtgttttatatagtcgtattgtttgcgtcgatatttacgtgttgtttttatacgtggtggttgagtgggtgggtatttgttagggatt

SEQ ID NO: 34546 - DNA, 573 bp, Artificial Sequence
  chemically treated genomic DNA (Homo sapiens) CpG-island No: 34546
aatccctaacaaatacccacccactcaaccaccacgtataaaaacaacacgtaaatatcgacgcaaacaatacgactatataaaacacgtacaacgtacaataaaaacttaaatacataacacaaacacgcatattacaaaaaatacgaccgacaaaaaacttatacgcgcgcctaaatacataacgaccgcctacccgctaccgcttacccgtcgctaaatcacctcgcaccctcgcccgacgaccctcgataaacgaccccgtccgtctcccgaaacgcgaccccgtatacccgcgcgacgatcccgaactactatcatttcccgacgaccgcaaaacgaaaaataaacgaaccgcgacccgaccgaacgaacaaaaaacgcgcattattcgcgaaccgcgacccgacaaaaaattcccgaccccgcgcgaacataaaaaaaaaaaaaacgcccgcgaaacgacccgaacgaacgaaaaaaacgcgatcccgtactccgctaaccccgacgttcactcccgactccgcccctcgactttaaaacgcaaattcgaatcccgaatcgccgact

SEQ ID NO: 34547 - DNA, 573 bp, Artificial Sequence
  chemically treated genomic DNA (Homo sapiens) CpG-island No: 34547
ggtttttggtagatgtttatttatttagttattacgtgtggaagtaatacgtggatgtcggcgtaggtaatgcggttgtgtggggtacgtgtagcgtgtagtggagatttaggtgtatggtatagatacgtatgttataaggggtgcgatcggtagaaggtttgtgcgcgcgtttgaatatatgacggtcgtttgttcgttgtcgtttgttcgtcgttaggttatttcgtattttcgttcggcggttttcggtgggcggtttcgttcgtttttcggggcgcgatttcgtgtattcgcgcggcggtttcgggttgttgttatttttcggcggtcgtagggcggggagtgagcgggtcgcggttcggtcgggcgggtaggaagcgcgtattgttcgcgggtcgcggttcggtagggagttttcggtttcgcgcggatataaaaggagaaagagcgttcgcggagcggttcgggcggacgggggaagcgcggtttcgtgtttcgttgatttcggcgtttattttcggtttcgtttttcggttttgaggcgtagattcgaatttcgggtcgtcgatt

SEQ ID NO: 34548 - DNA, 573 bp, Artificial Sequence
  chemically treated genomic DNA (Homo sapiens) CpG-island No: 34548
aatcgacgacccgaaattcgaatctacgcctcaaaaccgaaaaacgaaaccgaaaataaacgccgaaatcaacgaaacacgaaaccgcgcttcccccgtccgcccgaaccgctccgcgaacgctctttctccttttatatccgcgcgaaaccgaaaactccctaccgaaccgcgacccgcgaacaatacgcgcttcctacccgcccgaccgaaccgcgacccgctcactccccgccctacgaccgccgaaaaataacaacaacccgaaaccgccgcgcgaatacacgaaatcgcgccccgaaaaacgaacgaaaccgcccaccgaaaaccgccgaacgaaaatacgaaataacctaacgacgaacaaacgacaacgaacaaacgaccgtcatatattcaaacgcgcgcacaaaccttctaccgatcgcaccccttataacatacgtatctataccatacacctaaatctccactacacgctacacgtaccccacacaaccgcattacctacgccgacatccacgtattacttccacacgtaataactaaataaataaacatctaccaaaaacc

SEQ ID NO: 34549 - DNA, 621 bp, Artificial Sequence
  chemically treated genomic DNA (Homo sapiens) CpG-island No: 34549
  unsure (224, 288..289, 302, 325, 362, 375, 400, 459, 533)
gaattgttaggcgacgaaaaaaattatttattttaggtgtttttgcgttagaggcgggttttttttttgtttttttttgttcgtttttaaattttttttcggattttaattttcgtcgtgttttgcgttgagatttttgcggtaaagaatcgggttgtgtttaaagtgttttttggaagttgtagtttttgtattggtgaggtaaggaggaagcggagtgattncgcggttattagttgtgtgtagttgttcgggattaggagtttaagtgaagaggtacgttttgtnntcgtggaattagncgtagttatgagtttttgtcggngttagtttttagagtacggagtagcggattttttcgntttttcgtttcgntaggtggcggggtttattaggtttncggggtatttttcgttttaagtaggttttatttgtcggtaagggcgttcgaaacgcggnaggcgttatgtcgttggttgtttacgttagtagcgatgagagcgagtcggatgaggttgagttcgagtcggagnaagaggaggcggtggtttttatatttgggttcgttttagggggtttgttcgtttttttttttgcgtttaagggttcggttttgttgtt

SEQ ID NO: 34550 - DNA, 621 bp, Artificial Sequence
  chemically treated genomic DNA (Homo sapiens) CpG-island No: 34550
  unsure (89, 163, 222, 247, 260, 297, 320, 333..334, 398)
aacaacaaaaccgaacccttaaacgcaaaaaaaaaaacgaacaaaccccctaaaacgaacccaaatataaaaaccaccgcctcctcttnctccgactcgaactcaacctcatccgactcgctctcatcgctactaacgtaaacaaccaacgacataacgcctnccgcgtttcgaacgcccttaccgacaaataaaacctacttaaaacgaaaaataccccgnaaacctaataaaccccgccacctancgaaacgaaaaancgaaaaaatccgctactccgtactctaaaaactaacnccgacaaaaactcataactacgnctaattccacgannacaaaacgtacctcttcacttaaactcctaatcccgaacaactacacacaactaataaccgcgnaatcactccgcttcctccttacctcaccaatacaaaaactacaacttccaaaaaacactttaaacacaacccgattctttaccgcaaaaatctcaacgcaaaacacgacgaaaattaaaatccgaaaaaaaatttaaaaacgaacaaaaaaaaacaaaaaaaaaacccgcctctaacgcaaaaacacctaaaataaataatttttttcgtcgcctaacaattc

SEQ ID NO: 34551 - DNA, 621 bp, Artificial Sequence
  chemically treated genomic DNA (Homo sapiens) CpG-island No: 34551
  unsure (89, 163, 222, 247, 260, 297, 320, 333..334, 398)
ggtagtaaggtcggatttttgggcgtagggagagaagcgaataagttttttaaagcgggtttagatgtaggagttatcgtttttttttntttcggttcgggtttagttttattcggttcgtttttatcgttgttggcgtaagtaattagcgatatggcgtttntcgcgtttcgggcgtttttgtcggtagatgaggtttatttgagacgggggatgtttcgnaggtttagtaggtttcgttatttgncggggcggggaancgaaaaagttcgttgtttcgtattttaggggttagtntcggtagaaatttatggttacgnttgattttacgannataaggcgtatttttttatttaagtttttagtttcgggtaattatatatagttaatggtcgcgnagttatttcgttttttttttgttttattaatataggaattataatttttagagaatattttggatatagttcggttttttgtcgtagggattttagcgtaaggtacggcgggagttggagttcgaggaaggatttaggggcgagtaaagggagataggagagaaattcgtttttgacgtagggatatttggggtgagtagtttttttcgtcgtttaataattt

SEQ ID NO: 34552 - DNA, 621 bp, Artificial Sequence
  chemically treated genomic DNA (Homo sapiens) CpG-island No: 34552
  unsure (224, 288..289, 302, 325, 362, 375, 400, 459, 533)
aaattattaaacgacgaaaaaaactactcaccccaaatatccctacgtcaaaaacgaatttctctcctatctccctttactcgcccctaaatccttcctcgaactccaactcccgccgtaccttacgctaaaatccctacgacaaaaaaccgaactatatccaaaatattctctaaaaattataattcctatattaataaaacaaaaaaaaaacgaaataactncgcgaccattaactatatataattacccgaaactaaaaacttaaataaaaaaatacgccttatnntcgtaaaatcaancgtaaccataaatttctaccganactaacccctaaaatacgaaacaacgaactttttcgnttccccgccccgncaaataacgaaacctactaaacctncgaaacatcccccgtctcaaataaacctcatctaccgacaaaaacgcccgaaacgcganaaacgccatatcgctaattacttacgccaacaacgataaaaacgaaccgaataaaactaaacccgaaccgaaanaaaaaaaaacgataactcctacatctaaacccgctttaaaaaacttattcgcttctctccctacgcccaaaaatccgaccttactacc

SEQ ID NO: 34553 - DNA, 1111 bp, Artificial Sequence
  chemically treated genomic DNA (Homo sapiens) CpG-island No: 34553
gcgtcgacgtgtgaaattgattttaaagaaaataggcggtggtttttttttcggttttacgtggtttagtagcgtttatttttcgttttttttttcgcgtttagtaattaatttaggtcgtttttgtagaattcgggtttttgtttatcggtttatagcgtttatttgaggtttcgtttttttagtaaaggtcgttttttcggaacgcgttttttgcggtttttttagagtttttttcgcgcgtttttttagtttcgttcgttttttttcggggtttttttttttcgtttgtttttaggttcgttttttttcgcgggttgaggtaggttcgggtagtacggtcgtttcggggcgggggttattttttattatcgcgtggtgtttatagtttacggcgttttcgggtgacggttttttcggttgtagggcgttttgaagagcggtttgttcggagttgagcgtacggggttgtttcgttttgggcgtttttggtttttattagtttcgtttttttatgggtaaaacggcggttttgtttgtttataagtaatcgtcggggttacggaggggttaggagttgcggcggggggttgtgtttttaggatcggttttaggaggattcgcgcgaggtttggagtttttaggggtcgcgggggatagaggggttttaagcggaggcggggaaggcggtagaagtttaggatcgttaagagttggcgaggaagttcggggttcgttgtcgggggagtcgggtaggggtcgcgtttcggattaggacggaggtttggggaaggcggatttggtcgtcggagacgcggtgcgggtggagacgagggatttggattttcgcgggcggttgtacggatttttacgcgcggtttacgtgggttttaggggggtgttcggtattcggggtcgcgtcgtttttttttcgtcggtatcgattcgtagttttacgtttacgcggcggcgttcgtagtttttttcggttcggttttcgcgcgtgttttcgagcgcgttttcgggattagttttcggaagtagagaggttaggtcgggaaggatgggcgacgggggtggttgattcgggagtacggtagggaggatattt

SEQ ID NO: 34554 - DNA, 1111 bp, Artificial Sequence
  chemically treated genomic DNA (Homo sapiens) CpG-island No: 34554
aaatatcctccctaccgtactcccgaatcaaccacccccgtcgcccatccttcccgacctaacctctctacttccgaaaactaatcccgaaaacgcgctcgaaaacacgcgcgaaaaccgaaccgaaaaaaactacgaacgccgccgcgtaaacgtaaaactacgaatcgataccgacgaaaaaaaaacgacgcgaccccgaataccgaacacccccctaaaacccacgtaaaccgcgcgtaaaaatccgtacaaccgcccgcgaaaatccaaatccctcgtctccacccgcaccgcgtctccgacgaccaaatccgccttccccaaacctccgtcctaatccgaaacgcgacccctacccgactcccccgacaacgaaccccgaacttcctcgccaactcttaacgatcctaaacttctaccgccttccccgcctccgcttaaaacccctctatcccccgcgacccctaaaaactccaaacctcgcgcgaatcctcctaaaaccgatcctaaaaacacaaccccccgccgcaactcctaacccctccgtaaccccgacgattacttataaacaaacaaaaccgccgttttacccataaaaaaacgaaactaataaaaaccaaaaacgcccaaaacgaaacaaccccgtacgctcaactccgaacaaaccgctcttcaaaacgccctacaaccgaaaaaaccgtcacccgaaaacgccgtaaactataaacaccacgcgataataaaaaataacccccgccccgaaacgaccgtactacccgaacctacctcaacccgcgaaaaaaaacgaacctaaaaacaaacgaaaaaaaaaaaccccgaaaaaaaacgaacgaaactaaaaaaacgcgcgaaaaaaactctaaaaaaaccgcaaaaaacgcgttccgaaaaaacgacctttactaaaaaaacgaaacctcaaataaacgctataaaccgataaacaaaaacccgaattctacaaaaacgacctaaattaattactaaacgcgaaaaaaaaaacgaaaaataaacgctactaaaccacgtaaaaccgaaaaaaaaaccaccgcctattttctttaaaatcaatttcacacgtcgacgc

SEQ ID NO: 34555 - DNA, 1111 bp, Artificial Sequence
  chemically treated genomic DNA (Homo sapiens) CpG-island No: 34555
gggtgttttttttgtcgtgttttcgggttagttattttcgtcgtttatttttttcggtttggtttttttgttttcgggggttgatttcgagggcgcgttcgggggtacgcgcggaagtcgggtcgaagggggttgcgggcgtcgtcgcgtaaacgtgaggttgcgggtcgatgtcggcgaggagaaggcggcgcggtttcgggtgtcgggtatttttttggggtttacgtgaatcgcgcgtggaaattcgtgtagtcgttcgcggaaatttaaatttttcgtttttattcgtatcgcgttttcggcggttagattcgttttttttaggttttcgttttggttcgaggcgcggtttttgttcggttttttcgatagcgagtttcgggttttttcgttagtttttggcggttttgggtttttgtcgtttttttcgttttcgtttggggtttttttgtttttcgcgatttttgagagttttagatttcgcgcggatttttttggggtcggttttgagagtatagtttttcgtcgtagtttttggttttttcgtaatttcgacggttatttgtggataaataggatcgtcgttttgtttatgggaagacggggttggtgagggttagagacgtttagggcgaggtaatttcgtgcgtttagtttcgagtaggtcgttttttaggacgttttatagtcgaggggatcgttattcgggagcgtcgtgagttgtgggtattacgcggtggtggagagtgattttcgtttcggggcggtcgtgttgttcgaatttgttttagttcgcgaggggagacgggtttgggggtaggcgggagagggaggtttcgggaggaggcgagcggggttgagaggacgcgcgggaggggttttggagaggtcgtaggaggcgcgtttcggagggacgatttttgttgggaggacgaggttttaggtggacgttgtgggtcggtgggtaggagttcgagttttgtaggagcggtttaaattggttattgagcgcggaagaagggacggaaggtgagcgttattgggttacgtggggtcgagagaaaggttatcgtttgttttttttaaaattagttttatacgtcgacgt

SEQ ID NO: 34556 - DNA, 1111 bp, Artificial Sequence
  chemically treated genomic DNA (Homo sapiens) CpG-island No: 34556
acgtcgacgtataaaactaattttaaaaaaaacaaacgataacctttctctcgaccccacgtaacccaataacgctcaccttccgtcccttcttccgcgctcaataaccaatttaaaccgctcctacaaaactcgaactcctacccaccgacccacaacgtccacctaaaacctcgtcctcccaacaaaaatcgtccctccgaaacgcgcctcctacgacctctccaaaacccctcccgcgcgtcctctcaaccccgctcgcctcctcccgaaacctccctctcccgcctacccccaaacccgtctcccctcgcgaactaaaacaaattcgaacaacacgaccgccccgaaacgaaaatcactctccaccaccgcgtaatacccacaactcacgacgctcccgaataacgatcccctcgactataaaacgtcctaaaaaacgacctactcgaaactaaacgcacgaaattacctcgccctaaacgtctctaaccctcaccaaccccgtcttcccataaacaaaacgacgatcctatttatccacaaataaccgtcgaaattacgaaaaaaccaaaaactacgacgaaaaactatactctcaaaaccgaccccaaaaaaatccgcgcgaaatctaaaactctcaaaaatcgcgaaaaacaaaaaaaccccaaacgaaaacgaaaaaaacgacaaaaacccaaaaccgccaaaaactaacgaaaaaacccgaaactcgctatcgaaaaaaccgaacaaaaaccgcgcctcgaaccaaaacgaaaacctaaaaaaaacgaatctaaccgccgaaaacgcgatacgaataaaaacgaaaaatttaaatttccgcgaacgactacacgaatttccacgcgcgattcacgtaaaccccaaaaaaatacccgacacccgaaaccgcgccgccttctcctcgccgacatcgacccgcaacctcacgtttacgcgacgacgcccgcaacccccttcgacccgacttccgcgcgtacccccgaacgcgccctcgaaatcaacccccgaaaacaaaaaaaccaaaccgaaaaaaataaacgacgaaaataactaacccgaaaacacgacaaaaaaaacaccc

SEQ ID NO: 34557 - DNA, 612 bp, Artificial Sequence
  chemically treated genomic DNA (Homo sapiens) CpG-island No: 34557
gcgagtagcgtcgttttttttttttaggacgggcgggaatttgcgatgttttcgtcgcgtgggtcgtggggcggttttcgaggtattgggcggggtacgcggtgggcgttttacggaattcgtattttttagttttcgtaatttaggaggaagtttacggcgttttgtatcggcgtcggcgcgttaacgcgtttttggaggagttgcggtcgggttttttggagagggagtgtaaggaggagtagtgttttttcgaggaggttcgggagatttttaaggacgcggagaggacggtgagtttagtttcggggcgtttcgcgtcgcggatattgtaggcggcggtgaattaggtcgcgtggggttatttgcgtttttttggttgcggttgtgggcggcgaatacgtagcggcgttcgcgcggcgttttttgcgggggtcgtttttcgttcggggtgatttcgtttttttgggcgatgttttttatttttaggtacgcgtttttttcgtgcggtcgtatcgcgtatgtcggtttttatattagaaaatacgatttgtaaagtatatttagggtgttttttttaattttttaagggagtttttttagttttcgaag

SEQ ID NO: 34558 - DNA, 612 bp, Artificial Sequence
  chemically treated genomic DNA (Homo sapiens) CpG-island No: 34558
cttcgaaaactaaaaaaactcccttaaaaaattaaaaaaaacaccctaaatatactttacaaatcgtattttctaatataaaaaccgacatacgcgatacgaccgcacgaaaaaaacgcgtacctaaaaataaaaaacatcgcccaaaaaaacgaaatcaccccgaacgaaaaacgacccccgcaaaaaacgccgcgcgaacgccgctacgtattcgccgcccacaaccgcaaccaaaaaaacgcaaataaccccacgcgacctaattcaccgccgcctacaatatccgcgacgcgaaacgccccgaaactaaactcaccgtcctctccgcgtccttaaaaatctcccgaacctcctcgaaaaaacactactcctccttacactccctctccaaaaaacccgaccgcaactcctccaaaaacgcgttaacgcgccgacgccgatacaaaacgccgtaaacttcctcctaaattacgaaaactaaaaaatacgaattccgtaaaacgcccaccgcgtaccccgcccaatacctcgaaaaccgccccacgacccacgcgacgaaaacatcgcaaattcccgcccgtcctaaaaaaaaaaaacgacgctactcgc

SEQ ID NO: 34559 - DNA, 612 bp, Artificial Sequence
  chemically treated genomic DNA (Homo sapiens) CpG-island No: 34559
tttcggggattggggggatttttttgggaagttaagggggatattttaagtgtgttttgtaaatcgtattttttgatgtgaaaatcggtatgcgcggtgcggtcgtacggggagagcgcgtgtttgggggtggggggtatcgtttaggaaagcggagttatttcgggcggaaagcgattttcgtagaaagcgtcgcgcgggcgtcgttgcgtgttcgtcgtttatagtcgtagttaaagagacgtaggtggttttacgcggtttggtttatcgtcgtttgtagtgttcgcggcgcggggcgtttcgaggttgggtttatcgtttttttcgcgtttttgaagatttttcgggttttttcgaaggagtattgtttttttttgtattttttttttagggagttcggtcgtagtttttttaggaacgcgttggcgcgtcggcgtcggtgtaggacgtcgtgggtttttttttgggttacgaagattgggaaatgcgagtttcgtgaagcgtttatcgcgtgtttcgtttagtgtttcggagatcgttttacggtttacgcggcgggggtatcgtaggttttcgttcgttttggaggaggggagcggcgttgttcgt

SEQ ID NO: 34560 - DNA, 612 bp, Artificial Sequence
  chemically treated genomic DNA (Homo sapiens) CpG-island No: 34560
acgaacaacgccgctcccctcctccaaaacgaacgaaaacctacgatacccccgccgcgtaaaccgtaaaacgatctccgaaacactaaacgaaacacgcgataaacgcttcacgaaactcgcatttcccaatcttcgtaacccaaaaaaaaacccacgacgtcctacaccgacgccgacgcgccaacgcgttcctaaaaaaactacgaccgaactccctaaaaaaaaaatacaaaaaaaaacaatactccttcgaaaaaacccgaaaaatcttcaaaaacgcgaaaaaaacgataaacccaacctcgaaacgccccgcgccgcgaacactacaaacgacgataaaccaaaccgcgtaaaaccacctacgtctctttaactacgactataaacgacgaacacgcaacgacgcccgcgcgacgctttctacgaaaatcgctttccgcccgaaataactccgctttcctaaacgataccccccacccccaaacacgcgctctccccgtacgaccgcaccgcgcataccgattttcacatcaaaaaatacgatttacaaaacacacttaaaatatcccccttaacttcccaaaaaaatccccccaatccccgaaa

SEQ ID NO: 34561 - DNA, 510 bp, Artificial Sequence
  chemically treated genomic DNA (Homo sapiens) CpG-island No: 34561
gagcgcgattttaatttcgtcgggagggaaggagatcgggtttttttttttgatcggtttttagatatggagtttttcgaggtttttatagagtatttggatcgggtgatgttggttcgcggcggcggtcgcgaggttattattatttatttttgagaattaggatttgttattcgggttcgagcgcgttcggttcgcggtttcggagttttcgtcgcgtttttcgtcgttgttatcgtttatatatagattttgtgttcgtgttttggttttttatttcgttgtttgaagttcggaggttacgtttgttggggttgattcggagagggcgtttcgtcgcgtagagattagagttttttagtgttagtttggtttttgggttttcgttgttttttttttaagttcggtttcgtttcgtcggaggagacgttgtaataaaggttgggagaaggcgcggaaaggagaggagttggggttttggggatttttaggtagtttatgcggtttatt

SEQ ID NO: 34562 - DNA, 510 bp, Artificial Sequence
  chemically treated genomic DNA (Homo sapiens) CpG-island No: 34562
aataaaccgcataaactacctaaaaatccccaaaaccccaactcctctcctttccgcgccttctcccaacctttattacaacgtctcctccgacgaaacgaaaccgaacttaaaaaaaaaacaacgaaaacccaaaaaccaaactaacactaaaaaactctaatctctacgcgacgaaacgccctctccgaatcaaccccaacaaacgtaacctccgaacttcaaacaacgaaataaaaaaccaaaacacgaacacaaaatctatatataaacgataacaacgacgaaaaacgcgacgaaaactccgaaaccgcgaaccgaacgcgctcgaacccgaataacaaatcctaattctcaaaaataaataataataacctcgcgaccgccgccgcgaaccaacatcacccgatccaaatactctataaaaacctcgaaaaactccatatctaaaaaccgatcaaaaaaaaaaacccgatctccttccctcccgacgaaattaaaatcgcgctc

SEQ ID NO: 34563 - DNA, 510 bp, Artificial Sequence
  chemically treated genomic DNA (Homo sapiens) CpG-island No: 34563
aatgggtcgtatggattatttgggggtttttaaggttttagtttttttttttttcgcgtttttttttaatttttattgtagcgtttttttcggcgagacgaggtcgggtttagaaaaagggtagcgaagatttaggggttaaattggtattgaggagttttggtttttgcgcggcggggcgtttttttcgaattagttttaataggcgtggttttcgggttttaggtagcggggtaaggggttaggatacgggtatagggtttgtatgtaaacggtgatagcggcggggggcgcggcgagggtttcggagtcgcgggtcgggcgcgttcgggttcgggtggtaggttttggtttttaggagtagatggtgatgatttcgcggtcgtcgtcgcggattagtattattcggtttaggtgttttgtgaggatttcgagaaattttatgtttgagagtcggttaaggagaaagattcggtttttttttttttcgacgaaattggggtcgcgttt

SEQ ID NO: 34564 - DNA, 510 bp, Artificial Sequence
  chemically treated genomic DNA (Homo sapiens) CpG-island No: 34564
aaacgcgaccccaatttcgtcgaaaaaaaaaaaaaccgaatctttctccttaaccgactctcaaacataaaatttctcgaaatcctcacaaaacacctaaaccgaataatactaatccgcgacgacgaccgcgaaatcatcaccatctactcctaaaaaccaaaacctaccacccgaacccgaacgcgcccgacccgcgactccgaaaccctcgccgcgccccccgccgctatcaccgtttacatacaaaccctatacccgtatcctaaccccttaccccgctacctaaaacccgaaaaccacgcctattaaaactaattcgaaaaaaacgccccgccgcgcaaaaaccaaaactcctcaataccaatttaacccctaaatcttcgctaccctttttctaaacccgacctcgtctcgccgaaaaaaacgctacaataaaaattaaaaaaaaacgcgaaaaaaaaaaaaactaaaaccttaaaaacccccaaataatccatacgacccatt

SEQ ID NO: 34565 - DNA, 828 bp, Artificial Sequence
  chemically treated genomic DNA (Homo sapiens) CpG-island No: 34565
  unsure (181)
attagaagttagagttcgagttcgggattggaggtacgtggggcgggattattttcgtaatgtattaattagaatttttcggtttagtagggaggagttaaagggcgaataaagtacgtaggcgcgacggcgtacgaaggcgagaggcgagtttagcggcggcgcgcgcgcgcgtattttnttttttttttattttagcgagggtgggttgtttggcgcgcgcgcgcgcgtcggtttatttttcgggtttcgtttttcgtttcgtcgcgcgttttcgttttcgggttgaggcgatttagagtcggagttcgatataaaggcggtggcggcggtagtagcggaggggttttagagttcgtttcgttggggtttttcgggtttattttttttatttcggttatcggcgcggtcgtttattcgcgggtttaagatggcggcggtaatagagatagggtaagcggtagtttcgagtagaaagcgtcggaggggtcgtcgttttttagtttcggatttttagattttggcgcggttcgttgcgggattatggttttttgggatttttatttgttcggagcggattggaggggacgcggttatacgttttgttcgatcgttcgttttgtcgttttcgtttcgttttttttagcgtcgttgtcgttattttgtgtttcgggtcgggatttcgcgttgcgtatgcgttggtatcgtttttgagggatttcgtcgcggtcgcgtcgttattttgagtgtggtagggtcggttggtttttcgtatttagtttgttttcggttttttttttttttttttattcgtttttgttgtttttt

SEQ ID NO: 34566 - DNA, 828 bp, Artificial Sequence
  chemically treated genomic DNA (Homo sapiens) CpG-island No: 34566
  unsure (648)
aaaaaacaacaaaaacgaataaaaaaaaaaaaaaaaaaccgaaaacaaactaaatacgaaaaaccaaccgaccctaccacactcaaaataacgacgcgaccgcgacgaaatccctcaaaaacgataccaacgcatacgcaacgcgaaatcccgacccgaaacacaaaataacgacaacgacgctaaaaaaaacgaaacgaaaacgacaaaacgaacgatcgaacaaaacgtataaccgcgtcccctccaatccgctccgaacaaataaaaatcccaaaaaaccataatcccgcaacgaaccgcgccaaaatctaaaaatccgaaactaaaaaacgacgacccctccgacgctttctactcgaaactaccgcttaccctatctctattaccgccgccatcttaaacccgcgaataaacgaccgcgccgataaccgaaataaaaaaaataaacccgaaaaaccccaacgaaacgaactctaaaacccctccgctactaccgccgccaccgcctttatatcgaactccgactctaaatcgcctcaacccgaaaacgaaaacgcgcgacgaaacgaaaaacgaaacccgaaaaataaaccgacgcgcgcgcgcgcgccaaacaacccaccctcgctaaaataaaaaaaaaanaaaatacgcgcgcgcgcgccgccgctaaactcgcctctcgccttcgtacgccgtcgcgcctacgtactttattcgccctttaactcctccctactaaaccgaaaaattctaattaatacattacgaaaataatcccgccccacgtacctccaatcccgaactcgaactctaacttctaat

SEQ ID NO: 34567 - DNA, 828 bp, Artificial Sequence
  chemically treated genomic DNA (Homo sapiens) CpG-island No: 34567
  unsure (648)
aaggaatagtagggacggatgggaagaaggggagggggtcgaaagtaagttgggtgcgaggagttagtcgattttgttatatttaagatggcggcgcggtcgcggcgaggttttttagaggcggtattagcgtatgcgtagcgcggagtttcggttcgggatataagatggcggtagcggcgttggggagggcgaggcggaggcggtaaaacgggcggtcgagtagaacgtgtagtcgcgttttttttagttcgtttcgggtaggtaagagttttaggaagttatggtttcgtagcgagtcgcgttagggtttggggattcgaagttggggggcggcggttttttcggcgttttttgttcgggattgtcgtttgttttgtttttgttgtcgtcgttattttagattcgcgggtgggcggtcgcgtcggtggtcgaagtgagggaggtgggttcggagagttttagcggagcgggttttagggttttttcgttgttgtcgtcgttatcgtttttgtgtcgggtttcgattttgagtcgttttagttcgggggcgggagcgcgcggcggggcggggggcggagttcgagagatgggtcggcgcgcgcgcgcgcgttaaatagtttattttcgttggggtaggggaagggnaaggtgcgcgcgcgcgcgtcgtcgttgagttcgtttttcgttttcgtgcgtcgtcgcgtttgcgtattttgttcgttttttgatttttttttattgggtcggagaattttgattggtatattgcggagatggtttcgttttacgtgtttttaatttcggattcggattttggtttttggt

SEQ ID NO: 34568 - DNA, 828 bp, Artificial Sequence
  chemically treated genomic DNA (Homo sapiens) CpG-island No: 34568
  unsure (181)
accaaaaaccaaaatccgaatccgaaattaaaaacacgtaaaacgaaaccatctccgcaatataccaatcaaaattctccgacccaataaaaaaaaatcaaaaaacgaacaaaatacgcaaacgcgacgacgcacgaaaacgaaaaacgaactcaacgacgacgcgcgcgcgcgcaccttncccttcccctaccccaacgaaaataaactatttaacgcgcgcgcgcgcgccgacccatctctcgaactccgccccccgccccgccgcgcgctcccgcccccgaactaaaacgactcaaaatcgaaacccgacacaaaaacgataacgacgacaacaacgaaaaaaccctaaaacccgctccgctaaaactctccgaacccacctccctcacttcgaccaccgacgcgaccgcccacccgcgaatctaaaataacgacgacaacaaaaacaaaacaaacgacaatcccgaacaaaaaacgccgaaaaaaccgccgccccccaacttcgaatccccaaaccctaacgcgactcgctacgaaaccataacttcctaaaactcttacctacccgaaacgaactaaaaaaaacgcgactacacgttctactcgaccgcccgttttaccgcctccgcctcgccctccccaacgccgctaccgccatcttatatcccgaaccgaaactccgcgctacgcatacgctaataccgcctctaaaaaacctcgccgcgaccgcgccgccatcttaaatataacaaaatcgactaactcctcgcacccaacttactttcgaccccctccccttcttcccatccgtccctactattcctt

SEQ ID NO: 34569 - DNA, 774 bp, Artificial Sequence
  chemically treated genomic DNA (Homo sapiens) CpG-island No: 34569
aggaggggcgcggttaagttatcgggagttacgttttttattgggagttacgttttaagagagcggggcgcgtattcgtcgcgtttaattttgcggtttagggaagggattagaatgacgttataattattttttacgtaatatttcgtcgagataaagtagtttttaaattatagtgggtttagtgttaaatatcgggcgacgtataaagttttagagtttgttgagattcgattatggttttgaggtttcggagcgatttttcggaatattgaaaatgtgtttttttcggggttagcgggggaagtagtttcggtttataataggtcgatgggttttttcgtagcggaggaaagaggatggcgatttcgtcgatgtcggagttagagaggaacgtggttacgaaagtttcgggtgagtttcgggtagagttaggcggttttatcgtattttgtcgtggagtgaggttatattgcggggatattcggaggcgaggttttaggtcggcggggttgttcgaatagggtttcggggttttaggttttttagtcgttttcgtatttgtttgagcggaaattcggcgttattataagatggcgtcgggtttggagtataggtagcgtcggggatagttttaaatcgttaggtttcgagaatcgtcgttgttagtcgttttcgtaggggaatcgggggggagcgaattattgatttagggggttagcgggttgtattatcgttttgtaattcggggggacgcgggggtcgaagggttga

SEQ ID NO: 34570 - DNA, 774 bp, Artificial Sequence
  chemically treated genomic DNA (Homo sapiens) CpG-island No: 34570
tcaacccttcgacccccgcgtccccccgaattacaaaacgataatacaacccgctaaccccctaaatcaataattcgctcccccccgattcccctacgaaaacgactaacaacgacgattctcgaaacctaacgatttaaaactatccccgacgctacctatactccaaacccgacgccatcttataataacgccgaatttccgctcaaacaaatacgaaaacgactaaaaaacctaaaaccccgaaaccctattcgaacaaccccgccgacctaaaacctcgcctccgaatatccccgcaatataacctcactccacgacaaaatacgataaaaccgcctaactctacccgaaactcacccgaaactttcgtaaccacgttcctctctaactccgacatcgacgaaatcgccatcctctttcctccgctacgaaaaaacccatcgacctattataaaccgaaactacttcccccgctaaccccgaaaaaaacacattttcaatattccgaaaaatcgctccgaaacctcaaaaccataatcgaatctcaacaaactctaaaactttatacgtcgcccgatatttaacactaaacccactataatttaaaaactactttatctcgacgaaatattacgtaaaaaataattataacgtcattctaatcccttccctaaaccgcaaaattaaacgcgacgaatacgcgccccgctctcttaaaacgtaactcccaataaaaaacgtaactcccgataacttaaccgcgcccctcct

SEQ ID NO: 34571 - DNA, 774 bp, Artificial Sequence
  chemically treated genomic DNA (Homo sapiens) CpG-island No: 34571
ttagtttttcggttttcgcgttttttcgggttgtagggcggtggtatagttcgttggttttttgggttagtggttcgttttttttcggtttttttgcggaggcggttgatagcgacggttttcggggtttggcgatttggggttgttttcggcgttgtttgtgttttaggttcgacgttattttgtggtggcgtcgggttttcgtttaggtaagtgcgagagcgattaaagggtttgggatttcggggttttgttcggatagtttcgtcggtttgggatttcgttttcgggtattttcgtagtgtgattttattttacggtagggtacggtggggtcgtttaattttattcgaagtttattcgaggttttcgtagttacgtttttttttgatttcggtatcgacgaggtcgttattttttttttttcgttgcggaggaatttatcggtttattgtaggtcggaattatttttttcgttggtttcgggaaagatatatttttagtgtttcggaaggtcgtttcgaggttttaaaattataatcgggttttaatagattttgggattttatacgtcgttcggtgtttggtattgagtttattatggtttggggattattttatttcggcggagtgttacgtaggaagtggttgtgacgttattttggttttttttttaggtcgtagggttgggcgcggcgaatgcgcgtttcgtttttttggggcgtggtttttagtggggggcgtggttttcggtggtttggtcgcgtttttttt

SEQ ID NO: 34572 - DNA, 774 bp, Artificial Sequence
  chemically treated genomic DNA (Homo sapiens) CpG-island No: 34572
aaaaaaaacgcgaccaaaccaccgaaaaccacgccccccactaaaaaccacgccccaaaaaaacgaaacgcgcattcgccgcgcccaaccctacgacctaaaaaaaaaaccaaaataacgtcacaaccacttcctacgtaacactccgccgaaataaaataatccccaaaccataataaactcaataccaaacaccgaacgacgtataaaatcccaaaatctattaaaacccgattataattttaaaacctcgaaacgaccttccgaaacactaaaaatatatctttcccgaaaccaacgaaaaaaataattccgacctacaataaaccgataaattcctccgcaacgaaaaaaaaaaaataacgacctcgtcgataccgaaatcaaaaaaaaacgtaactacgaaaacctcgaataaacttcgaataaaattaaacgaccccaccgtaccctaccgtaaaataaaatcacactacgaaaatacccgaaaacgaaatcccaaaccgacgaaactatccgaacaaaaccccgaaatcccaaaccctttaatcgctctcgcacttacctaaacgaaaacccgacgccaccacaaaataacgtcgaacctaaaacacaaacaacgccgaaaacaaccccaaatcgccaaaccccgaaaaccgtcgctatcaaccgcctccgcaaaaaaaccgaaaaaaaacgaaccactaacccaaaaaaccaacgaactataccaccgccctacaacccgaaaaaacgcgaaaaccgaaaaactaa

SEQ ID NO: 34573 - DNA, 1216 bp, Artificial Sequence
  chemically treated genomic DNA (Homo sapiens) CpG-island No: 34573
ttcggggttcgtttgtcgtcgttcgcgttttttttgttggcgtcggcggtttcgtttttttcgtttttgttcgttagtagttcggtttcgtcgttgggtttaggtatttcgggtattagtagcgatagtcggtagcggttttcgtttttcgattatatgaatttcgattttagtttttttaagttttttaagtcgggcgtttcgagcggttatttcgtgggttttttggacggttttttgtttttcgaggtttttttttcgtattcgtcgttgttttcgcgttcgttcgcgttttcgtcgtcgtttttgtagtcgtcgttatcgtcgtcggtttcgggggagttgtatcgtttgtttttcgtttcggtcgttgttatcgtttagggttcgggcgtcgttttatcgttgttttcggatatcggggataatggtgattatatcgagatggtttttggtgtggtcgttatttcgtcgtaatttatcgcggttttttcgaagttagaagttgttcgcgtggttagttcgacgtcgggcgtgaagaggttgagttttatggagtaggtgtcgggagtcgaggtttttttgtaggttagttagttttcggatttttatcgcggcgttaaggttattcgcgtagattcgtaggggggtcgtcgtcgttatagtttcgagatttttttttttattacgacggttattttcgtgttttcgtttttcgtttataattttaagcgttataattcggttttcgtggaaaatgttttttttaggaaaagtagcgagggcggcgtgggtgtcggttttggagggggcgacgagtcgtttatttttttacgatagttgtagtcggcgttttttttggtatcgtagggtcggtcgtggatttcgggttagttcgggggtttggtcggttgttttgggagcggtggatcgtttatgcgtagagagatttttgtcggtttttagaatggttttaattatatcgttatcgacgtgagggaggagttcgggttgttattttagtcgtagtcgtcgtcgtcgtcgtttttttagtcgggagataagagtttttggggtcggattcgaagtttcgggggttttattagcgttgtgggcgtcggtagtatcggcggcgggtgcggggggtcgggtttcggtgttttgttttttgttaatatttacgttagtattgattttttgttttattatttgaagg

SEQ ID NO: 34574 - DNA, 1216 bp, Artificial Sequence
  chemically treated genomic DNA (Homo sapiens) CpG-island No: 34574
ccttcaaataataaaacaaaaaatcaatactaacgtaaatattaacaaaaaacaaaacaccgaaacccgaccccccgcacccgccgccgatactaccgacgcccacaacgctaataaaacccccgaaacttcgaatccgaccccaaaaactcttatctcccgactaaaaaaacgacgacgacgacgactacgactaaaataacaacccgaactcctccctcacgtcgataacgatataattaaaaccattctaaaaaccgacaaaaatctctctacgcataaacgatccaccgctcccaaaacaaccgaccaaacccccgaactaacccgaaatccacgaccgaccctacgataccaaaaaaaacgccgactacaactatcgtaaaaaaataaacgactcgtcgccccctccaaaaccgacacccacgccgccctcgctacttttcctaaaaaaaacattttccacgaaaaccgaattataacgcttaaaattataaacgaaaaacgaaaacacgaaaataaccgtcgtaataaaaaaaaaaatctcgaaactataacgacgacgacccccctacgaatctacgcgaataaccttaacgccgcgataaaaatccgaaaactaactaacctacaaaaaaacctcgactcccgacacctactccataaaactcaacctcttcacgcccgacgtcgaactaaccacgcgaacaacttctaacttcgaaaaaaccgcgataaattacgacgaaataacgaccacaccaaaaaccatctcgatataatcaccattatccccgatatccgaaaacaacgataaaacgacgcccgaaccctaaacgataacaacgaccgaaacgaaaaacaaacgatacaactcccccgaaaccgacgacgataacgacgactacaaaaacgacgacgaaaacgcgaacgaacgcgaaaacaacgacgaatacgaaaaaaaaacctcgaaaaacaaaaaaccgtccaaaaaacccacgaaataaccgctcgaaacgcccgacttaaaaaacttaaaaaaactaaaatcgaaattcatataatcgaaaaacgaaaaccgctaccgactatcgctactaatacccgaaatacctaaacccaacgacgaaaccgaactactaacgaacaaaaacgaaaaaaacgaaaccgccgacgccaacaaaaaaaacgcgaacgacgacaaacgaaccccgaa

SEQ ID NO: 34575 - DNA, 1216 bp, Artificial Sequence
  chemically treated genomic DNA (Homo sapiens) CpG-island No: 34575
tttttaagtggtgggataagaagttaatgttggcgtaggtgttggtagggggtagggtatcgggattcggtttttcgtattcgtcgtcggtgttgtcgacgtttatagcgttgatgagattttcgaggtttcgggttcggttttaggagtttttgtttttcggttgaggaagcggcggcggcggcggttgcggttggggtggtagttcgggttttttttttacgtcgatggcgatgtagttgagattattttggaagtcggtagaggtttttttgcgtatgggcgatttatcgtttttaggataatcgattaagttttcgggttgattcggggtttacggtcggttttgcggtgttaaagggggcgtcggttgtaattgtcgtggggaggtgggcggttcgtcgttttttttagggtcgatatttacgtcgttttcgttgttttttttgagagagatattttttacggaggtcgagttgtggcgtttggggttgtgggcgaaggacggggatacgggggtgatcgtcgtggtggaggagaaggtttcggaattgtggcggcggcggtttttttgcgggtttgcgcggatgattttggcgtcgcggtgggggttcgggggttggttggtttgtaggaaggtttcgattttcgatatttgttttatgaggtttagtttttttacgttcgacgtcgggttggttacgcgggtagtttttggtttcgggggggtcgcgataggttgcggcggggtggcggttatattaaaagttatttcggtgtagttattattgttttcggtgttcgaggataacgatgaggcggcgttcgggttttgggcggtggtaacggtcgaggcggggggtaggcggtatagttttttcggggtcggcggcggtggcggcggttgtagagacgacgacggggacgcggacggacgcgggggtaacggcggatacggggaggaggtttcgggggataggaggtcgtttaaggagtttacggggtggtcgttcggggcgttcggtttaggagatttgggggagttgaagtcgaggtttatgtagtcggagagcggagatcgttgtcggttgtcgttgttggtgttcggggtgtttgagtttagcgacgaggtcgggttgttggcggataagagcgaggaggacgaggtcgtcgacgttagtaggggaggcgcgggcggcgataggcgggtttcggg

SEQ ID NO: 34576 - DNA, 1216 bp, Artificial Sequence
  chemically treated genomic DNA (Homo sapiens) CpG-island No: 34576
cccgaaacccgcctatcgccgcccgcgcctcccctactaacgtcgacgacctcgtcctcctcgctcttatccgccaacaacccgacctcgtcgctaaactcaaacaccccgaacaccaacaacgacaaccgacaacgatctccgctctccgactacataaacctcgacttcaactcccccaaatctcctaaaccgaacgccccgaacgaccaccccgtaaactccttaaacgacctcctatcccccgaaacctcctccccgtatccgccgttacccccgcgtccgtccgcgtccccgtcgtcgtctctacaaccgccgccaccgccgccgaccccgaaaaaactataccgcctaccccccgcctcgaccgttaccaccgcccaaaacccgaacgccgcctcatcgttatcctcgaacaccgaaaacaataataactacaccgaaataacttttaatataaccgccaccccgccgcaacctatcgcgacccccccgaaaccaaaaactacccgcgtaaccaacccgacgtcgaacgtaaaaaaactaaacctcataaaacaaatatcgaaaatcgaaaccttcctacaaaccaaccaacccccgaacccccaccgcgacgccaaaatcatccgcgcaaacccgcaaaaaaaccgccgccgccacaattccgaaaccttctcctccaccacgacgatcacccccgtatccccgtccttcgcccacaaccccaaacgccacaactcgacctccgtaaaaaatatctctctcaaaaaaaacaacgaaaacgacgtaaatatcgaccctaaaaaaaacgacgaaccgcccacctccccacgacaattacaaccgacgccccctttaacaccgcaaaaccgaccgtaaaccccgaatcaacccgaaaacttaatcgattatcctaaaaacgataaatcgcccatacgcaaaaaaacctctaccgacttccaaaataatctcaactacatcgccatcgacgtaaaaaaaaaacccgaactaccaccccaaccgcaaccgccgccgccgccgcttcctcaaccgaaaaacaaaaactcctaaaaccgaacccgaaacctcgaaaatctcatcaacgctataaacgtcgacaacaccgacgacgaatacgaaaaaccgaatcccgataccctaccccctaccaacacctacgccaacattaacttcttatcccaccacttaaaaa

SEQ ID NO: 34577 - DNA, 728 bp, Artificial Sequence
  chemically treated genomic DNA (Homo sapiens) CpG-island No: 34577
tttttttcgtttcggatttaattaattgggtttgagttttcgtcggggagggggcgtcgggcggggtcgcggttgggcggggcgggggatcgggatcggcggcgggggttgcggttttgtagtggaagtatgggcggcgagtcgggtcgtgttttcggggcgcggggtttttattttgggcgagggcggtcgttttcgcgttcggggtgggcgcgttttattttcgtttttcgtttttcgttttcgtttttcggtcgtattttcgttttttcgtagtcgcgaaacgcggggaggttttagggttcgcggtcgcgggttcgcgagtatcgcgttttagatcgagagcggcgcgcgttttttcgtggaggatagaggggcgcggagggggcgtttgtgttttattcgttcgcgggcgttttacggggcgttttttgcgttatttatttgttagtttgtcgggaagttgaaatcgcgtttgggaggtaataggagaaagagatcggggacggtaggcggagaaagtgcggtttttatagcgtcggggagagggcggattcgcgagttagcggtttttgagtcgggagatcgcgcgggcgtttttttagttttcgtaggagcgtcgtttttttttcgtaggggcgttttttttttttatcgttgtaggagtattttttttttttttcggaagcgtttttttattatatcgttttaagagttttttttttttt

SEQ ID NO: 34578 - DNA, 728 bp, Artificial Sequence
  chemically treated genomic DNA (Homo sapiens) CpG-island No: 34578
aaaaaaaaaaaaactcttaaaacgatataataaaaaaacgcttccgaaaaaaaaaaaaaatactcctacaacgataaaaaaaaaaaacgcccctacgaaaaaaaaacgacgctcctacgaaaactaaaaaaacgcccgcgcgatctcccgactcaaaaaccgctaactcgcgaatccgccctctccccgacgctataaaaaccgcactttctccgcctaccgtccccgatctctttctcctattacctcccaaacgcgatttcaacttcccgacaaactaacaaataaataacgcaaaaaacgccccgtaaaacgcccgcgaacgaataaaacacaaacgccccctccgcgcccctctatcctccacgaaaaaacgcgcgccgctctcgatctaaaacgcgatactcgcgaacccgcgaccgcgaaccctaaaacctccccgcgtttcgcgactacgaaaaaacgaaaatacgaccgaaaaacgaaaacgaaaaacgaaaaacgaaaataaaacgcgcccaccccgaacgcgaaaacgaccgccctcgcccaaaataaaaaccccgcgccccgaaaacacgacccgactcgccgcccatacttccactacaaaaccgcaacccccgccgccgatcccgatcccccgccccgcccaaccgcgaccccgcccgacgccccctccccgacgaaaactcaaacccaattaattaaatccgaaacgaaaaaaa

SEQ ID NO: 34579 - DNA, 728 bp, Artificial Sequence
  chemically treated genomic DNA (Homo sapiens) CpG-island No: 34579
aaggaagggggggtttttgaagcggtgtggtgagaggacgttttcgaggaaggaagggggtgtttttgtagcggtggggggagaggacgtttttgcggaaggaaggcggcgtttttgcgggggttggagagacgttcgcgcggtttttcggtttagggatcgttggttcgcgggttcgtttttttttcggcgttatggaaatcgtatttttttcgtttgtcgttttcgattttttttttttattattttttaaacgcgattttaatttttcgataagttgataagtgaatggcgtagaggacgtttcgtaaagcgttcgcgagcgggtgggatataggcgtttttttcgcgtttttttgttttttacggaagggcgcgcgtcgttttcgatttggagcgcggtgttcgcgaattcgcggtcgcgggttttggaattttttcgcgtttcgcggttgcggggggacggagatgcggtcgggagacggggacgggaaacgggggacggggatggggcgcgtttatttcgagcgcgggagcggtcgttttcgtttaaaatggggatttcgcgtttcgagagtacggttcggttcgtcgtttatgtttttattgtaaggtcgtagttttcgtcgtcgatttcgatttttcgtttcgtttagtcgcggtttcgttcggcgtttttttttcggcggaagtttaagtttaattaattgagttcgaggcgggaggga

SEQ ID NO: 34580 - DNA, 728 bp, Artificial Sequence
  chemically treated genomic DNA (Homo sapiens) CpG-island No: 34580
tccctcccgcctcgaactcaattaattaaacttaaacttccgccgaaaaaaaaacgccgaacgaaaccgcgactaaacgaaacgaaaaatcgaaatcgacgacgaaaactacgaccttacaataaaaacataaacgacgaaccgaaccgtactctcgaaacgcgaaatccccattttaaacgaaaacgaccgctcccgcgctcgaaataaacgcgccccatccccgtcccccgtttcccgtccccgtctcccgaccgcatctccgtccccccgcaaccgcgaaacgcgaaaaaattccaaaacccgcgaccgcgaattcgcgaacaccgcgctccaaatcgaaaacgacgcgcgcccttccgtaaaaaacaaaaaaacgcgaaaaaaacgcctatatcccacccgctcgcgaacgctttacgaaacgtcctctacgccattcacttatcaacttatcgaaaaattaaaatcgcgtttaaaaaataataaaaaaaaaaaatcgaaaacgacaaacgaaaaaaatacgatttccataacgccgaaaaaaaaacgaacccgcgaaccaacgatccctaaaccgaaaaaccgcgcgaacgtctctccaacccccgcaaaaacgccgccttccttccgcaaaaacgtcctctccccccaccgctacaaaaacacccccttccttcctcgaaaacgtcctctcaccacaccgcttcaaaaacccccccttcctt

SEQ ID NO: 34581 - DNA, 600 bp, Artificial Sequence
  chemically treated genomic DNA (Homo sapiens) CpG-island No: 34581
attttcgtttgagttatttaagttttcgacgcggggtagttaagaggttatcggttttttcggcggtagcgagtggagcgttttttgggttgtaggcgtcgtcgttattacgcgggcgttcgttttttttttgacgttcgcgggggtaattcgggaggattcgtcgatatcgcggttgtagcgtagttaaagaagggtaggcgcggcgttcgcggggttcggggacgtcgggtttgggagggggttgtagcggttggagttagaggttcgcgagttatacgggttcgaggatgggtcgataggggttcgggtttggggagcgtaagtttttgaggtacgggaggggcggacgtagagatcgagcgtttaatgtggttagcggatcgtttgtttttcggatttaggaattattcgaagttcgcgcggatttatagattatttttagtttcgtttcgcgaggtttcgtttttttatgtaatttaaaagtaattaattttttttacgcgaaggtttttatcggtcgacgggttgtgggtgtattgtttagtgacggtttcgtttagttttttttagtatttataatttaaagtaagaataacg

SEQ ID NO: 34582 - DNA, 600 bp, Artificial Sequence
  chemically treated genomic DNA (Homo sapiens) CpG-island No: 34582
cgttattcttactttaaattataaatactaaaaaaaactaaacgaaaccgtcactaaacaatacacccacaacccgtcgaccgataaaaaccttcgcgtaaaaaaaattaattacttttaaattacataaaaaaacgaaacctcgcgaaacgaaactaaaaataatctataaatccgcgcgaacttcgaataattcctaaatccgaaaaacaaacgatccgctaaccacattaaacgctcgatctctacgtccgcccctcccgtacctcaaaaacttacgctccccaaacccgaacccctatcgacccatcctcgaacccgtataactcgcgaacctctaactccaaccgctacaaccccctcccaaacccgacgtccccgaaccccgcgaacgccgcgcctacccttctttaactacgctacaaccgcgatatcgacgaatcctcccgaattacccccgcgaacgtcaaaaaaaaaacgaacgcccgcgtaataacgacgacgcctacaacccaaaaaacgctccactcgctaccgccgaaaaaaccgataacctcttaactaccccgcgtcgaaaacttaaataactcaaacgaaaat

SEQ ID NO: 34583 - DNA, 600 bp, Artificial Sequence
  chemically treated genomic DNA (Homo sapiens) CpG-island No: 34583
cgttgtttttgttttgaattatgggtgttgggagaaattaaacgaagtcgttattgagtaatatatttatagttcgtcgatcgataggaattttcgcgtggggggagttggttatttttaggttgtatgaagaggcggggtttcgcggggcggagttgggggtggtttgtgggttcgcgcgggtttcgggtagtttttgggttcggggagtagacgattcgttagttatattaggcgttcggtttttgcgttcgtttttttcgtgttttagagatttgcgttttttaggttcgagtttttgtcggtttattttcgagttcgtgtggttcgcgaatttttaattttagtcgttgtagtttttttttaggttcggcgttttcgagtttcgcgggcgtcgcgtttgtttttttttggttacgttgtagtcgcggtgtcggcgagttttttcgggttgttttcgcgggcgttagagggagggcgggcgttcgcgtggtgacggcgacgtttgtagtttaaggagcgttttattcgttgtcgtcggaggggtcggtgattttttggttatttcgcgtcggaggtttagatggtttaggcgaagat

SEQ ID NO: 34584 - DNA, 600 bp, Artificial Sequence
  chemically treated genomic DNA (Homo sapiens) CpG-island No: 34584
atcttcgcctaaaccatctaaacctccgacgcgaaataaccaaaaaatcaccgacccctccgacgacaacgaataaaacgctccttaaactacaaacgtcgccgtcaccacgcgaacgcccgccctccctctaacgcccgcgaaaacaacccgaaaaaactcgccgacaccgcgactacaacgtaaccaaaaaaaaacaaacgcgacgcccgcgaaactcgaaaacgccgaacctaaaaaaaaactacaacgactaaaattaaaaattcgcgaaccacacgaactcgaaaataaaccgacaaaaactcgaacctaaaaaacgcaaatctctaaaacacgaaaaaaacgaacgcaaaaaccgaacgcctaatataactaacgaatcgtctactccccgaacccaaaaactacccgaaacccgcgcgaacccacaaaccacccccaactccgccccgcgaaaccccgcctcttcatacaacctaaaaataaccaactccccccacgcgaaaattcctatcgatcgacgaactataaatatattactcaataacgacttcgtttaatttctcccaacacccataattcaaaacaaaaacaacg

SEQ ID NO: 34585 - DNA, 957 bp, Artificial Sequence
  chemically treated genomic DNA (Homo sapiens) CpG-island No: 34585
agttttcgggaggaaaaatcgtgttttttttaggatgttcggaataagagttaggttttcggagttaggtagttatttatgttcgtgagtcggcgggagggagatcgtcgggaggcgaagtggggcggggttatttttttttttgttttgttgttgtcggggagtttttggttggcgtttaagcggtaggaggtcgtcgttttgtagggcgtcgtagagtttgcggtgtagagtcgggatcgtttttggggtagagggttcgagtttttttaaggcgagggtgttggttttcgtgcgtatttaagggtttttaggagcgggcgtaaagggcggcgggttcgcgggttagggtttcgtagttagtaggttgtcgagcgtggttagcgtttagtgtagggcggtttcggcgtgcgttagttgttaggtgagttaggcgcgttgcgaggcgttgggttgcgtgtcgtcggcgggtttcgggaggaaggcgtttttcggggttcgaagttcgtttagggttacgtttagttcgtttaggtggttgacgattcgcgagagcgggtacgggagggagatttaggtttttggggagtggcgtcggcggcgttttggggaggtgggtcgtttttttcggacgttaacgcggcgttgcgggtcgttcgttttttttggcgatttaggtcggtgttttggtttttttaggcgtttcgggttgggaatagaatttgcgcgggagatagagcgggaggtgttagagggattgcgcgtagcgttaggggatttatttttaaggtttcgaagtcgttttcgatttcgtttttttttgttttttattttttattttttcgcggttcgttttcgcgttttattttttcggtttttttttgtattttggggatttcggtgtttcgttcggggtgttttttttttcgttcgtttaaatttgaagtatattttatt

SEQ ID NO: 34586 - DNA, 957 bp, Artificial Sequence
  chemically treated genomic DNA (Homo sapiens) CpG-island No: 34586
aataaaatatacttcaaatttaaacgaacgaaaaaaaaaacaccccgaacgaaacaccgaaatccccaaaatacaaaaaaaaaccgaaaaaataaaacgcgaaaacgaaccgcgaaaaaataaaaaataaaaaacaaaaaaaaacgaaatcgaaaacgacttcgaaaccttaaaaataaatcccctaacgctacgcgcaatccctctaacacctcccgctctatctcccgcgcaaattctattcccaacccgaaacgcctaaaaaaaccaaaacaccgacctaaatcgccaaaaaaaacgaacgacccgcaacgccgcgttaacgtccgaaaaaaacgacccacctccccaaaacgccgccgacgccactccccaaaaacctaaatctccctcccgtacccgctctcgcgaatcgtcaaccacctaaacgaactaaacgtaaccctaaacgaacttcgaaccccgaaaaacgccttcctcccgaaacccgccgacgacacgcaacccaacgcctcgcaacgcgcctaactcacctaacaactaacgcacgccgaaaccgccctacactaaacgctaaccacgctcgacaacctactaactacgaaaccctaacccgcgaacccgccgccctttacgcccgctcctaaaaacccttaaatacgcacgaaaaccaacaccctcgccttaaaaaaactcgaaccctctaccccaaaaacgatcccgactctacaccgcaaactctacgacgccctacaaaacgacgacctcctaccgcttaaacgccaaccaaaaactccccgacaacaacaaaacaaaaaaaaaaataaccccgccccacttcgcctcccgacgatctccctcccgccgactcacgaacataaataactacctaactccgaaaacctaactcttattccgaacatcctaaaaaaaacacgatttttcctcccgaaaact

SEQ ID NO: 34587 - DNA, 957 bp, Artificial Sequence
  chemically treated genomic DNA (Homo sapiens) CpG-island No: 34587
gatgagatgtgttttaagtttgaacgggcggaggggagggtatttcggacggggtatcggagtttttaggatgtagggaggggtcgagaggatggggcgcggaggcgagtcgcggaggggtgggggatggagggtagggggaggcggggtcgggagcggtttcgggattttggaaatgggttttttagcgttgcgcgtagtttttttgatatttttcgttttgtttttcgcgtaggttttgtttttagttcgaggcgtttggaggagttaaagtatcggtttagatcgttagggaggacgagcggttcgtaacgtcgcgttgacgttcgggaggagcgatttatttttttaaagcgtcgtcgacgttattttttagaagtttgggtttttttttcgtgttcgttttcgcgagtcgttaattatttgggcgggttggacgtggttttgggcgagtttcgggtttcggggggcgtttttttttcggggttcgtcggcggtacgtagtttagcgtttcgtagcgcgtttggtttatttggtagttggcgtacgtcggggtcgttttgtattgggcgttggttacgttcgatagtttgttggttgcggggttttggttcgcgggttcgtcgttttttgcgttcgtttttgggggtttttaggtgcgtacgggagttagtattttcgttttggaaaagttcgaattttttgttttagaggcgatttcgattttgtatcgtaaattttacggcgttttgtaggacggcggttttttgtcgtttggacgttagttaggagtttttcggtagtagtagagtagaaagaaggatggtttcgttttatttcgtttttcggcggtttttttttcgtcggtttacggatatagatggttgtttagtttcggaagtttagtttttgtttcgggtattttaaggaagatacggttttttttttcgggggtt

SEQ ID NO: 34588 - DNA, 957 bp, Artificial Sequence
  chemically treated genomic DNA (Homo sapiens) CpG-island No: 34588
aacccccgaaaaaaaaaaccgtatcttccttaaaatacccgaaacaaaaactaaacttccgaaactaaacaaccatctatatccgtaaaccgacgaaaaaaaaaccgccgaaaaacgaaataaaacgaaaccatccttctttctactctactactaccgaaaaactcctaactaacgtccaaacgacaaaaaaccgccgtcctacaaaacgccgtaaaatttacgatacaaaatcgaaatcgcctctaaaacaaaaaattcgaacttttccaaaacgaaaatactaactcccgtacgcacctaaaaacccccaaaaacgaacgcaaaaaacgacgaacccgcgaaccaaaaccccgcaaccaacaaactatcgaacgtaaccaacgcccaatacaaaacgaccccgacgtacgccaactaccaaataaaccaaacgcgctacgaaacgctaaactacgtaccgccgacgaaccccgaaaaaaaaacgccccccgaaacccgaaactcgcccaaaaccacgtccaacccgcccaaataattaacgactcgcgaaaacgaacacgaaaaaaaaacccaaacttctaaaaaataacgtcgacgacgctttaaaaaaataaatcgctcctcccgaacgtcaacgcgacgttacgaaccgctcgtcctccctaacgatctaaaccgatactttaactcctccaaacgcctcgaactaaaaacaaaacctacgcgaaaaacaaaacgaaaaatatcaaaaaaactacgcgcaacgctaaaaaacccatttccaaaatcccgaaaccgctcccgaccccgcctccccctaccctccatcccccacccctccgcgactcgcctccgcgccccatcctctcgacccctccctacatcctaaaaactccgataccccgtccgaaataccctcccctccgcccgttcaaacttaaaacacatctcatc

SEQ ID NO: 34589 - DNA, 696 bp, Artificial Sequence
  chemically treated genomic DNA (Homo sapiens) CpG-island No: 34589
cgtaggttcgtcgtgtttcgtcgtttcgcgttttggacgttcgagattagcgggaaataaatgtggttttcgagggggcgttcgttggtcgttaaaatttcgcgggttcggaggcgtcgttgttgggttagaatcgtagagtttttttcgcggggtatcgaggtttagtcgtcgtttttttgtttatttttttttttgtgagtcggtttttttttgcgtttggttagtatgtttcggatcgttcggattttcgtagcgttggtttaaggggcggtttttttcggcggagtaggtgacgaattatttcggaggatacggaattgatattgcggttttagagatacgggataaggggttagaacgcggggagtttaggtttagatcggagtcgggatttcgggaaaattttttattttttttgttcgtagttttagaattttagaaatttaatttcgcgtagttttcggtttggagagttcgttttggtttgtaagtatagatatatgtgtttatattcgaatatacgtagatatcgttagagagcgagatagcgagcgggcgttttcgtagtagcggtttgcggggcggaatcggagttggcgtcgttttaaggggaaatcgaattgtagtgatcggaaatgtttttaggatagaataagttattttttttgtttacgttgttaggatttttttagt

SEQ ID NO: 34590 - DNA, 696 bp, Artificial Sequence
  chemically treated genomic DNA (Homo sapiens) CpG-island No: 34590
actaaaaaaatcctaacaacgtaaacaaaaaaaataacttattctatcctaaaaacatttccgatcactacaattcgatttccccttaaaacgacgccaactccgattccgccccgcaaaccgctactacgaaaacgcccgctcgctatctcgctctctaacgatatctacgtatattcgaatataaacacatatatctatacttacaaaccaaaacgaactctccaaaccgaaaactacgcgaaattaaatttctaaaattctaaaactacgaacaaaaaaaataaaaaattttcccgaaatcccgactccgatctaaacctaaactccccgcgttctaaccccttatcccgtatctctaaaaccgcaatatcaattccgtatcctccgaaataattcgtcacctactccgccgaaaaaaaccgccccttaaaccaacgctacgaaaatccgaacgatccgaaacatactaaccaaacgcaaaaaaaaaccgactcacaaaaaaaaaaataaacaaaaaaacgacgactaaacctcgataccccgcgaaaaaaactctacgattctaacccaacaacgacgcctccgaacccgcgaaattttaacgaccaacgaacgccccctcgaaaaccacatttatttcccgctaatctcgaacgtccaaaacgcgaaacgacgaaacacgacgaacctacg

SEQ ID NO: 34591 - DNA, 696 bp, Artificial Sequence
  chemically treated genomic DNA (Homo sapiens) CpG-island No: 34591
gttggagaagttttggtaacgtggatagaaggaatggtttattttgttttggggatattttcggttattatagttcggtttttttttgaggcggcgttagtttcggtttcgtttcgtaggtcgttgttacggaggcgttcgttcgttgtttcgttttttggcggtgtttgcgtgtgttcgggtgtgggtatatgtatttgtgtttgtaaattagggcgggttttttaaatcgaaagttgcgcggagttgggtttttgggattttagggttgcgggtaagggagatgggggattttttcgggatttcgatttcgatttgagtttagatttttcgcgttttggttttttgtttcgtatttttagggtcgtagtgttaatttcgtgtttttcgaagtggttcgttatttgtttcgtcgaggggagtcgttttttgggttaacgttgcgggagttcggacggttcgaagtatgttggttaggcgtaaggggagatcgatttataggggagagggtgggtaaggggacggcggttgggtttcggtatttcgcgaggggggttttgcgattttgatttagtagcggcgttttcgggttcgcgaggttttgacgattagcgggcgttttttcgggaattatatttgtttttcgttggtttcgagcgtttagagcgcgaagcggcggagtacggcgaatttacg

SEQ ID NO: 34592 - DNA, 696 bp, Artificial Sequence
  chemically treated genomic DNA (Homo sapiens) CpG-island No: 34592
cgtaaattcgccgtactccgccgcttcgcgctctaaacgctcgaaaccaacgaaaaacaaatataattcccgaaaaaacgcccgctaatcgtcaaaacctcgcgaacccgaaaacgccgctactaaatcaaaatcgcaaaacccccctcgcgaaataccgaaacccaaccgccgtccccttacccaccctctcccctataaatcgatctccccttacgcctaaccaacatacttcgaaccgtccgaactcccgcaacgttaacccaaaaaacgactcccctcgacgaaacaaataacgaaccacttcgaaaaacacgaaattaacactacgaccctaaaaatacgaaacaaaaaaccaaaacgcgaaaaatctaaactcaaatcgaaatcgaaatcccgaaaaaatcccccatctcccttacccgcaaccctaaaatcccaaaaacccaactccgcgcaactttcgatttaaaaaacccgccctaatttacaaacacaaatacatatacccacacccgaacacacgcaaacaccgccaaaaaacgaaacaacgaacgaacgcctccgtaacaacgacctacgaaacgaaaccgaaactaacgccgcctcaaaaaaaaaccgaactataataaccgaaaatatccccaaaacaaaataaaccattccttctatccacgttaccaaaacttctccaac

SEQ ID NO: 34593 - DNA, 540 bp, Artificial Sequence
  chemically treated genomic DNA (Homo sapiens) CpG-island No: 34593
tacgtagtttagcgtttcgtagcgcgtttggtttatttggtagttggcgtacgtcggggtcgttttgtattgggcgttggttacgttcgatagtttgttggttgcggggttttggttcgcgggttcgtcgttttttgcgttcgtttttggggggttttaggtgcgtacgggagttagtattttcgttttggaaaagttcgaattttttgttttagaggcgatttcgattttgtatcgtaaattttacggcgttttgtaggacggcggttttttgtcgtttggacgttagttaggagtttttcggtagtagtagagtagaaagaaggatggtttcgttttatttcgtttttcggcggtttttttttcgttggtttacggagatagatggttgtttagtttcggaagtttagtttttgtttcggatattttaaggacgatatcgttttttttttcgggggtttattatatttgggattttgatgattcgggattttttttttattgaatttttgcgcgttttttgggaagggatgaggtgtg

SEQ ID NO: 34594 - DNA, 540 bp, Artificial Sequence
  chemically treated genomic DNA (Homo sapiens) CpG-island No: 34594
cacacctcatcccttcccaaaaaacgcgcaaaaattcaataaaaaaaaaatcccgaatcatcaaaatcccaaatataataaacccccgaaaaaaaaaacgatatcgtccttaaaatatccgaaacaaaaactaaacttccgaaactaaacaaccatctatctccgtaaaccaacgaaaaaaaaaccgccgaaaaacgaaataaaacgaaaccatccttctttctactctactactaccgaaaaactcctaactaacgtccaaacgacaaaaaaccgccgtcctacaaaacgccgtaaaatttacgatacaaaatcgaaatcgcctctaaaacaaaaaattcgaacttttccaaaacgaaaatactaactcccgtacgcacctaaaaccccccaaaaacgaacgcaaaaaacgacgaacccgcgaaccaaaaccccgcaaccaacaaactatcgaacgtaaccaacgcccaatacaaaacgaccccgacgtacgccaactaccaaataaaccaaacgcgctacgaaacgctaaactacgta

SEQ ID NO: 34595 - DNA, 540 bp, Artificial Sequence
  chemically treated genomic DNA (Homo sapiens) CpG-island No: 34595
tatattttatttttttttagaaaacgcgtaaaaatttaatgggagagaggtttcgagttattaaagttttagatgtggtgagttttcggaaggaaaaacggtgtcgtttttaggatgttcggaataagagttaggttttcggagttaggtagttatttattttcgtgagttagcgggagggagatcgtcgggaggcgaagtggggcggggttatttttttttttgttttgttgttgtcggggagtttttggttggcgtttaagcggtaggaggtcgtcgttttgtagggcgtcgtagagtttgcggtgtagagtcgggatcgtttttggggtagagggttcgagtttttttaaggcgagggtgttggttttcgtgcgtatttaaggttttttaggagcgggcgtaaagggcggcgggttcgcgggttagggtttcgtagttagtaggttgtcgagcgtggttagcgtttagtgtagggcggtttcggcgtgcgttagttgttaggtgagttaggcgcgttgcgaggcgttgggttgcgtg

SEQ ID NO: 34596 - DNA, 540 bp, Artificial Sequence
  chemically treated genomic DNA (Homo sapiens) CpG-island No: 34596
cacgcaacccaacgcctcgcaacgcgcctaactcacctaacaactaacgcacgccgaaaccgccctacactaaacgctaaccacgctcgacaacctactaactacgaaaccctaacccgcgaacccgccgccctttacgcccgctcctaaaaaaccttaaatacgcacgaaaaccaacaccctcgccttaaaaaaactcgaaccctctaccccaaaaacgatcccgactctacaccgcaaactctacgacgccctacaaaacgacgacctcctaccgcttaaacgccaaccaaaaactccccgacaacaacaaaacaaaaaaaaaaataaccccgccccacttcgcctcccgacgatctccctcccgctaactcacgaaaataaataactacctaactccgaaaacctaactcttattccgaacatcctaaaaacgacaccgtttttccttccgaaaactcaccacatctaaaactttaataactcgaaacctctctcccattaaatttttacgcgttttctaaaaaaaaataaaatata

SEQ ID NO: 34597 - DNA, 573 bp, Artificial Sequence
  chemically treated genomic DNA (Homo sapiens) CpG-island No: 34597
tatcgtcgcgtcggtcggacgtgcggtaatcgaataatatagaagtatttatttcgtttttttttatttttcgttcgtttgattttttcgttttttcgaataattttttaagaattttatattcgaagaaagatatcgatttcgttaaacgaaatcgaattattaattatacgatattaattatttttatttttttcgattcgttttttaatttttttaaagttttttagtcgggagtcgcgttcgcggggtttacgttatcggacggcgtacggcggcgaggacggacgcgttcgtatcgtatcgcgaattcgcgttattttatagtttttattaattttttcgtagggtacggattcgacgatacgtcgttcgcgtttatcgtaattttagtaacgaaattttttatgcgttcgttttttttttttttttttttttattttatcgattaaaatataggtttatcgcgttttttttaatttttatattcgagatattcgtttcgttttaaaacgagttttttttcgtttcggcggttcgcgagcgcgcgagggtaaatagtttcgacgtata

SEQ ID NO: 34598 - DNA, 573 bp, Artificial Sequence
  chemically treated genomic DNA (Homo sapiens) CpG-island No: 34598
tatacgtcgaaactatttaccctcgcgcgctcgcgaaccgccgaaacgaaaaaaaactcgttttaaaacgaaacgaatatctcgaatataaaaattaaaaaaaacgcgataaacctatattttaatcgataaaataaaaaaaaaaaaaaaaaaaaaacgaacgcataaaaaatttcgttactaaaattacgataaacgcgaacgacgtatcgtcgaatccgtaccctacgaaaaaattaataaaaactataaaataacgcgaattcgcgatacgatacgaacgcgtccgtcctcgccgccgtacgccgtccgataacgtaaaccccgcgaacgcgactcccgactaaaaaactttaaaaaaattaaaaaacgaatcgaaaaaaataaaaataattaatatcgtataattaataattcgatttcgtttaacgaaatcgatatctttcttcgaatataaaattcttaaaaaattattcgaaaaaacgaaaaaatcaaacgaacgaaaaataaaaaaaaacgaaataaatacttctatattattcgattaccgcacgtccgaccgacgcgacgata

SEQ ID NO: 34599 - DNA, 573 bp, Artificial Sequence
  chemically treated genomic DNA (Homo sapiens) CpG-island No: 34599
tgtgcgtcggggttgtttattttcgcgcgttcgcgggtcgtcggggcgggggggggttcgttttggggcggggcggatatttcgggtgtgggggttggggggagcgcggtgggtttatgttttggtcggtaaggtggggggggggggggggggggggcgggcgtatggggggtttcgttgttggggttgcggtgggcgcgggcggcgtgtcgtcgggttcgtgttttgcgggggggttggtggaggttatgaggtggcgcgggttcgcggtgcggtgcgggcgcgttcgttttcgtcgtcgtacgtcgttcggtggcgtgggtttcgcgggcgcggttttcggttggggggttttaggggggttggagggcggatcggggggggtggaggtggttggtgtcgtgtgattgatgattcggtttcgtttggcggggtcggtgttttttttcgggtgtggggtttttggggggttgttcggaggggcggaagggttaaacgggcggggggtgggggggagcggggtgggtgtttttgtgttgttcggttgtcgtacgttcggtcggcgcgacgatg

SEQ ID NO: 34600 - DNA, 573 bp, Artificial Sequence
  chemically treated genomic DNA (Homo sapiens) CpG-island No: 34600
catcgtcgcgccgaccgaacgtacgacaaccgaacaacacaaaaacacccaccccgctcccccccaccccccgcccgtttaacccttccgcccctccgaacaaccccccaaaaaccccacacccgaaaaaaaacaccgaccccgccaaacgaaaccgaatcatcaatcacacgacaccaaccacctccaccccccccgatccgccctccaacccccctaaaaccccccaaccgaaaaccgcgcccgcgaaacccacgccaccgaacgacgtacgacgacgaaaacgaacgcgcccgcaccgcaccgcgaacccgcgccacctcataacctccaccaacccccccgcaaaacacgaacccgacgacacgccgcccgcgcccaccgcaaccccaacaacgaaaccccccatacgcccgccccccccccccccccccccccaccttaccgaccaaaacataaacccaccgcgctccccccaacccccacacccgaaatatccgccccgccccaaaacgaacccccccccgccccgacgacccgcgaacgcgcgaaaataaacaaccccgacgcaca

SEQ ID NO: 34601 - DNA, 594 bp, Artificial Sequence
  chemically treated genomic DNA (Homo sapiens) CpG-island No: 34601
agagggcgcgggaggtgggtcgggcgtaatcgggatgggggcgggggcgcgggatgtttgcgggttttagtgagggggagggcgcgggagtgtggtcggggtttagtgggggagggagcgggagtgtgcgcggggcgtagtgaggggaaattgtggaatgtgggcgaggcgtagttggagaagagtgcgggaatgtgggcggggcgtagtgaggggaaattgtggaatgtgggcgaggcgtagttggaggagagtgcggggatgtgggcggggtgcggtgggggagggtgcggagatgtgggcggggcgtagtgggtggagagtgtagggatgtgggtttagcgtagtgggggatagtgtggggatgcgggcgaggcgtagtgggggcgggggcggggatgtgggcggggcgtagtgggtggagagtgcgggatgtgggcggggcgtagtgggtggagagtgcggaatgtgggcggggcgtagttggggagtttgcggggaatgtgggcggggcgtagtggtgggagggcgtaggagtgtgggcggggcgtagttgggggagggtgtagagatttgagggtttgaggttgtttg

SEQ ID NO: 34602 - DNA, 594 bp, Artificial Sequence
  chemically treated genomic DNA (Homo sapiens) CpG-island No: 34602
caaacaacctcaaaccctcaaatctctacaccctcccccaactacgccccgcccacactcctacgccctcccaccactacgccccgcccacattccccgcaaactccccaactacgccccgcccacattccgcactctccacccactacgccccgcccacatcccgcactctccacccactacgccccgcccacatccccgcccccgcccccactacgcctcgcccgcatccccacactatcccccactacgctaaacccacatccctacactctccacccactacgccccgcccacatctccgcaccctcccccaccgcaccccgcccacatccccgcactctcctccaactacgcctcgcccacattccacaatttcccctcactacgccccgcccacattcccgcactcttctccaactacgcctcgcccacattccacaatttcccctcactacgccccgcgcacactcccgctccctcccccactaaaccccgaccacactcccgcgccctccccctcactaaaacccgcaaacatcccgcgcccccgcccccatcccgattacgcccgacccacctcccgcgccctct

SEQ ID NO: 34603 - DNA, 594 bp, Artificial Sequence
  chemically treated genomic DNA (Homo sapiens) CpG-island No: 34603
taggtaattttaagtttttaggtttttgtatttttttttaattgcgtttcgtttatatttttgcgtttttttattattgcgtttcgtttatatttttcgtaagttttttaattgcgtttcgtttatatttcgtattttttatttattgcgtttcgtttatatttcgtattttttatttattgcgtttcgtttatattttcgttttcgtttttattgcgtttcgttcgtatttttatattgttttttattgcgttgggtttatatttttatattttttatttattgcgtttcgtttatattttcgtatttttttttatcgtatttcgtttatattttcgtatttttttttaattgcgtttcgtttatattttatagtttttttttattgcgtttcgtttatattttcgtatttttttttaattgcgtttcgtttatattttatagtttttttttattgcgtttcgcgtatattttcgtttttttttttattgggtttcggttatattttcgcgtttttttttttattggggttcgtagatatttcgcgttttcgtttttatttcgattgcgttcggtttatttttcgcgtttttt

SEQ ID NO: 34604 - DNA, 594 bp, Artificial Sequence
  chemically treated genomic DNA (Homo sapiens) CpG-island No: 34604
aaaaaacgcgaaaaataaaccgaacgcaatcgaaataaaaacgaaaacgcgaaatatctacgaaccccaataaaaaaaaaaacgcgaaaatataaccgaaacccaataaaaaaaaaaacgaaaatatacgcgaaacgcaataaaaaaaaactataaaatataaacgaaacgcaattaaaaaaaaatacgaaaatataaacgaaacgcaataaaaaaaaactataaaatataaacgaaacgcaattaaaaaaaaatacgaaaatataaacgaaatacgataaaaaaaaatacgaaaatataaacgaaacgcaataaataaaaaatataaaaatataaacccaacgcaataaaaaacaatataaaaatacgaacgaaacgcaataaaaacgaaaacgaaaatataaacgaaacgcaataaataaaaaatacgaaatataaacgaaacgcaataaataaaaaatacgaaatataaacgaaacgcaattaaaaaacttacgaaaaatataaacgaaacgcaataataaaaaaacgcaaaaatataaacgaaacgcaattaaaaaaaaatacaaaaacctaaaaacttaaaattaccta

SEQ ID NO: 34605 - DNA, 537 bp, Artificial Sequence
  chemically treated genomic DNA (Homo sapiens) CpG-island No: 34605
tggattttcgggcgtcgcgtagtagtcggttttttggcgttatttagtttagtttaggtttagatttttattcgggtttcgcggtcggtagagttggttttattttgcggtcgtcgtggtttgcgtatcgatatcgatgcgatttgtacgtttcgtcgcgtagtaagtattcgcgtcgggaatagtcgcgggtcgtacgtcgcgggtcgtacgtcgtacgtttgcgtagggaggcgtcgcgtacgtcggggtcgtttcgggtacgcgcgttggattagtttatttcgtttttttttagggcggttcggcggaagcggttttgtaatttttttttttggttttttcggttgtatttatattggtttttgtttttcgaagtaaaaggggatattttgttttgcggtgcgattgcgggttaaggtacgggcgaaggtagggtaggttggtggaggggatcggtttcgaggggtgtgcggttgtttttatgtttgttatttttttgcgataatttgttttagtaatattaatagatggtat

SEQ ID NO: 34606 - DNA, 537 bp, Artificial Sequence
  chemically treated genomic DNA (Homo sapiens) CpG-island No: 34606
ataccatctattaatattactaaaacaaattatcgcaaaaaaataacaaacataaaaacaaccgcacacccctcgaaaccgatcccctccaccaacctaccctaccttcgcccgtaccttaacccgcaatcgcaccgcaaaacaaaatatccccttttacttcgaaaaacaaaaaccaatataaatacaaccgaaaaaaccaaaaaaaaaaattacaaaaccgcttccgccgaaccgccctaaaaaaaaacgaaataaactaatccaacgcgcgtacccgaaacgaccccgacgtacgcgacgcctccctacgcaaacgtacgacgtacgacccgcgacgtacgacccgcgactattcccgacgcgaatacttactacgcgacgaaacgtacaaatcgcatcgatatcgatacgcaaaccacgacgaccgcaaaataaaaccaactctaccgaccgcgaaacccgaataaaaatctaaacctaaactaaactaaataacgccaaaaaaccgactactacgcgacgcccgaaaatcca

SEQ ID NO: 34607 - DNA, 537 bp, Artificial Sequence
  chemically treated genomic DNA (Homo sapiens) CpG-island No: 34607
atattatttattaatattattgaaataagttatcgtagagaagtgataagtatggagatagtcgtatatttttcggaatcggttttttttattagtttgttttgttttcgttcgtgttttgattcgtagtcgtatcgtaggataaaatgtttttttttatttcggaaagtagaagttagtgtaaatgtaatcgggagaattagagaagggagttgtaaggtcgttttcgtcgggtcgttttgagaaggagcggggtgagttagtttagcgcgcgtattcggagcgatttcggcgtgcgcggcgtttttttgcgtaggcgtgcggcgtgcggttcgcggcgtgcggttcgcggttgttttcggcgcggatatttattgcgcggcggggcgtgtaggtcgtatcgatgtcggtgcgtaggttacggcggtcgtagagtggggttaattttgtcggtcgcgggattcgggtgagggtttgggtttgggttgggttgggtgacgttaggaggtcggttattgcgcggcgttcgagagttta

SEQ ID NO: 34608 - DNA, 537 bp, Artificial Sequence
  chemically treated genomic DNA (Homo sapiens) CpG-island No: 34608
taaactctcgaacgccgcgcaataaccgacctcctaacgtcacccaacccaacccaaacccaaaccctcacccgaatcccgcgaccgacaaaattaaccccactctacgaccgccgtaacctacgcaccgacatcgatacgacctacacgccccgccgcgcaataaatatccgcgccgaaaacaaccgcgaaccgcacgccgcgaaccgcacgccgcacgcctacgcaaaaaaacgccgcgcacgccgaaatcgctccgaatacgcgcgctaaactaactcaccccgctccttctcaaaacgacccgacgaaaacgaccttacaactcccttctctaattctcccgattacatttacactaacttctactttccgaaataaaaaaaaacattttatcctacgatacgactacgaatcaaaacacgaacgaaaacaaaacaaactaataaaaaaaaccgattccgaaaaatatacgactatctccatacttatcacttctctacgataacttatttcaataatattaataaataatat

SEQ ID NO: 34609 - DNA, 641 bp, Artificial Sequence
  chemically treated genomic DNA (Homo sapiens) CpG-island No: 34609
gaatatagcggcgcgaggagaaatttttagagatagggaaaaggtggacgtagcggttgacgttgtttagacgttaggcgtcgataggagtttgattgttatcgtacgattagtgagggggcggggcggagttgtgttttaaagcgtttgcgcggagagtttgtaattagggattaggtttgggaggcgacgaagaggaacgttgggcgtaggaggtttattgtatacgtaggcgtattcggcgatttcggttttttcgcgcgtagttttcgtataggtatcggggggggtaggggcggggtaggggcggggataaatgcggagggacggtttagttttagttttttgttcgtcgtcgtcgttgtcgtcgttattttttttgatttacgaaagttatgttatttaatatcgggtaagggggtaggggcggcgcggggagagattttgtcgggcgaaggacgcgtttcggtggggtcgtcgcggatcgttcgggttggtcggttcggttgtgggaggttaaggatattgtttgggtacgttttgagttttggttcgcgttgggtattgtgtatcgagaatttgcggtaacgtgtgaaaaggaatataaatttttgtattataggatggtagtagtgtagaaa

SEQ ID NO: 34610 - DNA, 641 bp, Artificial Sequence
  chemically treated genomic DNA (Homo sapiens) CpG-island No: 34610
tttctacactactaccatcctataatacaaaaatttatattccttttcacacgttaccgcaaattctcgatacacaatacccaacgcgaaccaaaactcaaaacgtacccaaacaatatccttaacctcccacaaccgaaccgaccaacccgaacgatccgcgacgaccccaccgaaacgcgtccttcgcccgacaaaatctctccccgcgccgcccctacccccttacccgatattaaataacataactttcgtaaatcaaaaaaaataacgacgacaacgacgacgacgaacaaaaaactaaaactaaaccgtccctccgcatttatccccgcccctaccccgcccctaccccccccgatacctatacgaaaactacgcgcgaaaaaaccgaaatcgccgaatacgcctacgtatacaataaacctcctacgcccaacgttcctcttcgtcgcctcccaaacctaatccctaattacaaactctccgcgcaaacgctttaaaacacaactccgccccgccccctcactaatcgtacgataacaatcaaactcctatcgacgcctaacgtctaaacaacgtcaaccgctacgtccaccttttccctatctctaaaaatttctcctcgcgccgctatattc

SEQ ID NO: 34611 - DNA, 641 bp, Artificial Sequence
  chemically treated genomic DNA (Homo sapiens) CpG-island No: 34611
tttttatattgttgttattttgtaatataaaagtttgtgtttttttttatacgttatcgtagattttcggtgtatagtgtttagcgcggattagagtttagagcgtgtttaggtagtatttttgattttttatagtcgggtcggttagttcgggcgattcgcggcggttttatcgagacgcgtttttcgttcgatagggttttttttcgcgtcgtttttatttttttattcggtgttgggtaatatgattttcgtagattagaggaggtggcggcgatagcggcggcggcgagtagagagttaaagttggatcgttttttcgtatttattttcgtttttgtttcgtttttgtttttttcgatgtttgtgcgggaattgcgcgcggaaaagtcgggatcgtcgagtgcgtttgcgtatgtagtgggttttttgcgtttagcgttttttttcgtcgttttttaagtttggtttttgattgtaggtttttcgcgtaggcgttttgaggtatagtttcgtttcgtttttttattggtcgtacggtgataattaggtttttgtcggcgtttagcgtttgggtagcgttagtcgttacgtttattttttttttgtttttaggggttttttttcgcgtcgttgtgttt

SEQ ID NO: 34612 - DNA, 641 bp, Artificial Sequence
  chemically treated genomic DNA (Homo sapiens) CpG-island No: 34612
aaacacaacgacgcgaaaaaaaacccctaaaaacaaaaaaaaaataaacgtaacgactaacgctacccaaacgctaaacgccgacaaaaacctaattatcaccgtacgaccaataaaaaaacgaaacgaaactatacctcaaaacgcctacgcgaaaaacctacaatcaaaaaccaaacttaaaaaacgacgaaaaaaaacgctaaacgcaaaaaacccactacatacgcaaacgcactcgacgatcccgacttttccgcgcgcaattcccgcacaaacatcgaaaaaaacaaaaacgaaacaaaaacgaaaataaatacgaaaaaacgatccaactttaactctctactcgccgccgccgctatcgccgccacctcctctaatctacgaaaatcatattacccaacaccgaataaaaaaataaaaacgacgcgaaaaaaaaccctatcgaacgaaaaacgcgtctcgataaaaccgccgcgaatcgcccgaactaaccgacccgactataaaaaatcaaaaatactacctaaacacgctctaaactctaatccgcgctaaacactatacaccgaaaatctacgataacgtataaaaaaaaacacaaacttttatattacaaaataacaacaatataaaaa

SEQ ID NO: 34613 - DNA, 1078 bp, Artificial Sequence
  chemically treated genomic DNA (Homo sapiens) CpG-island No: 34613
gtttgtagtcgtcgttgagattcgagttgtcgggcggcggggcggttcggggtaggcggatcggagtcgttatcgggggtttttgcgtttcgtatttttaagttcggcgttgtcgacgagcggtcgttcgggtttttgttttcgtttcggtttcgttttttcgagaggagataaaaggaaggtttagtcgggttatcgcgcggtcgttgacggggaagtagagtcgatttcggcgcggtcgttttttatataaaggggtttttcgtttgggtcgcggcgtcggcgtattcgttttcgtttcgcgcgcgggtttttatttatttgtaggtgtttgtgcgtttgtttataggaacgcggtcggcgcgggggggtttgcgagagtcgggtagttcgggttggacgggacgggtcgaaggggcgcgagggcgggaggagagcggttagagggtcgggtattaaaggtaagtggagcggggaaggcgttcggcgggcggcggatcgtagatcgattcgtgtggttttgattttagtttggatagaacgatcgtcgtgtttcgatttattttttttaagttttacgcgtttatatatgaattttgcgtacggattgagggtaaagtgcgggtatatacgagttgttattaagagcgaggttgaaatttaggatttcgggttttagtcggtatcggaaacgcgtcgtggtcggcgagatttataggaagtgtgtaacgatattttttacggtacgtatcgagttcgtagtcgttgttgtttcgaggaggtgtagatcgagttttttgtcgtatatacgttcgtacgcggcggtcggcgcgttggatcgagaggttggagtaatttatttttcgcgcgtacgagtttagtttttattgtttcgataggtgtggaattcgtcgttttcgttatggttcgaggaagtgtatagtattgttttttattatacgttttgggttcgcggttttcgatgtttttcggagttttgtgtatttttattgaaacgtaaggagtagatagaatttatattattcgtgaggtgtgtgattttttttataacgtattg

SEQ ID NO: 34614 - DNA, 1078 bp, Artificial Sequence
  chemically treated genomic DNA (Homo sapiens) CpG-island No: 34614
caatacgttataaaaaaaatcacacacctcacgaataatataaattctatctactccttacgtttcaataaaaatacacaaaactccgaaaaacatcgaaaaccgcgaacccaaaacgtataataaaaaacaatactatacacttcctcgaaccataacgaaaacgacgaattccacacctatcgaaacaataaaaactaaactcgtacgcgcgaaaaataaattactccaacctctcgatccaacgcgccgaccgccgcgtacgaacgtatatacgacaaaaaactcgatctacacctcctcgaaacaacaacgactacgaactcgatacgtaccgtaaaaaatatcgttacacacttcctataaatctcgccgaccacgacgcgtttccgataccgactaaaacccgaaatcctaaatttcaacctcgctcttaataacaactcgtatatacccgcactttaccctcaatccgtacgcaaaattcatatataaacgcgtaaaacttaaaaaaaataaatcgaaacacgacgatcgttctatccaaactaaaatcaaaaccacacgaatcgatctacgatccgccgcccgccgaacgccttccccgctccacttacctttaatacccgaccctctaaccgctctcctcccgccctcgcgccccttcgacccgtcccgtccaacccgaactacccgactctcgcaaacccccccgcgccgaccgcgttcctataaacaaacgcacaaacacctacaaataaataaaaacccgcgcgcgaaacgaaaacgaatacgccgacgccgcgacccaaacgaaaaacccctttatataaaaaacgaccgcgccgaaatcgactctacttccccgtcaacgaccgcgcgataacccgactaaaccttccttttatctcctctcgaaaaaacgaaaccgaaacgaaaacaaaaacccgaacgaccgctcgtcgacaacgccgaacttaaaaatacgaaacgcaaaaacccccgataacgactccgatccgcctaccccgaaccgccccgccgcccgacaactcgaatctcaacgacgactacaaac

SEQ ID NO: 34615 - DNA, 1078 bp, Artificial Sequence
  chemically treated genomic DNA (Homo sapiens) CpG-island No: 34615
taatgcgttataagggaaattatatattttacggatggtgtaggttttgtttgttttttgcgttttagtggaggtgtatagagtttcggggggtatcggggatcgcgggtttaggacgtgtagtagggagtagtgttgtatattttttcggattatagcggggacggcgggttttatatttgtcggggtagtagggattgagttcgtgcgcgcggaggatggattgttttaatttttcggtttagcgcgtcggtcgtcgcgtgcgaacgtgtgtgcggtaggaggttcgatttatattttttcggggtagtaacgattgcgagttcggtgcgtgtcgtaggaggtgtcgttatatattttttgtgggtttcgtcgattacggcgcgttttcggtgtcggttggagttcggggttttagattttagtttcgtttttggtagtagttcgtgtgtgttcgtattttgtttttagttcgtacgtaagatttatatatgggcgcgtaaagtttggggagaatggatcggagtacgacggtcgttttatttaaattggagttagggttatacgaatcgatttacggttcgtcgttcgtcgggcgtttttttcgttttatttatttttggtgttcggttttttggtcgtttttttttcgttttcgcgttttttcggttcgtttcgtttagttcgggttgttcggttttcgtaggttttttcgcgtcgatcgcgtttttatggatagacgtatagatatttgtaggtgggtgagagttcgcgcgcggggcggggacgagtgcgtcgacgtcgcgatttaggcggggagtttttttgtgtggggggcggtcgcgtcggggtcgattttgttttttcgttagcggtcgcgcggtgattcggttgaattttttttttgttttttttcgggggagcgaggtcggagcgagggtagggattcgggcggtcgttcgtcggtagcgtcgggtttgggggtgcgaggcgtagagattttcggtggcggtttcggttcgtttgtttcgggtcgtttcgtcgttcggtagttcgggttttagcggcggttgtaggt

SEQ ID NO: 34616 - DNA, 1078 bp, Artificial Sequence
  chemically treated genomic DNA (Homo sapiens) CpG-island No: 34616
acctacaaccgccgctaaaacccgaactaccgaacgacgaaacgacccgaaacaaacgaaccgaaaccgccaccgaaaatctctacgcctcgcacccccaaacccgacgctaccgacgaacgaccgcccgaatccctaccctcgctccgacctcgctcccccgaaaaaaaacaaaaaaaaaattcaaccgaatcaccgcgcgaccgctaacgaaaaaacaaaatcgaccccgacgcgaccgccccccacacaaaaaaactccccgcctaaatcgcgacgtcgacgcactcgtccccgccccgcgcgcgaactctcacccacctacaaatatctatacgtctatccataaaaacgcgatcgacgcgaaaaaacctacgaaaaccgaacaacccgaactaaacgaaacgaaccgaaaaaacgcgaaaacgaaaaaaaaacgaccaaaaaaccgaacaccaaaaataaataaaacgaaaaaaacgcccgacgaacgacgaaccgtaaatcgattcgtataaccctaactccaatttaaataaaacgaccgtcgtactccgatccattctccccaaactttacgcgcccatatataaatcttacgtacgaactaaaaacaaaatacgaacacacacgaactactaccaaaaacgaaactaaaatctaaaaccccgaactccaaccgacaccgaaaacgcgccgtaatcgacgaaacccacaaaaaatatataacgacacctcctacgacacgcaccgaactcgcaatcgttactaccccgaaaaaatataaatcgaacctcctaccgcacacacgttcgcacgcgacgaccgacgcgctaaaccgaaaaattaaaacaatccatcctccgcgcgcacgaactcaatccctactaccccgacaaatataaaacccgccgtccccgctataatccgaaaaaatatacaacactactccctactacacgtcctaaacccgcgatccccgataccccccgaaactctatacacctccactaaaacgcaaaaaacaaacaaaacctacaccatccgtaaaatatataatttcccttataacgcatta

SEQ ID NO: 34617 - DNA, 678 bp, Artificial Sequence
  chemically treated genomic DNA (Homo sapiens) CpG-island No: 34617
aaacgttttgtggtcgacgttttttttttttttatacgttattggcgtgatcgttcgcgttatatattgcgtttgcgtaagggttgtggttttttttttattttttagcgtcgttgggtttgtaggtttttgtcgagtacgcggacgtcggtttttgtttcgtaggatggtgagtggatgtttcggtttcggggttttagatgtatggaggttttttttttttgttcgtatgttagtttagggttcgtttcgcgcgtcgtaggggtcggatggcgttagattgttagttttgatttggtcgaggtgtagtttttagcgtggttttaaatggttgtcgttcggtgcgcgaatttggggggaggggttggcgaagaagggttgcgtgagtttggacggcggattggggagaagggtgagtttagtagatagtttgagtgcggatattgtcgtttagtgtgagggggcgttggtaagcggtcgggcgtgagaggtcgtaagtagtcgattttagtttagttggggaacgttagaatggaggggggttgtaggttttcgggttttattcgattttcgagtatcgagtatttcgtgggttttttaggagaatgtcggagtcggtaagttttagatttaggaagtttgtgttcgtgggttgagtaagtggtttttaagttaaaa

SEQ ID NO: 34618 - DNA, 678 bp, Artificial Sequence
  chemically treated genomic DNA (Homo sapiens) CpG-island No: 34618
ttttaacttaaaaaccacttactcaacccacgaacacaaacttcctaaatctaaaacttaccgactccgacattctcctaaaaaacccacgaaatactcgatactcgaaaatcgaataaaacccgaaaacctacaacccccctccattctaacgttccccaactaaactaaaatcgactacttacgacctctcacgcccgaccgcttaccaacgccccctcacactaaacgacaatatccgcactcaaactatctactaaactcacccttctccccaatccgccgtccaaactcacgcaacccttcttcgccaacccctccccccaaattcgcgcaccgaacgacaaccatttaaaaccacgctaaaaactacacctcgaccaaatcaaaactaacaatctaacgccatccgacccctacgacgcgcgaaacgaaccctaaactaacatacgaacaaaaaaaaaaaacctccatacatctaaaaccccgaaaccgaaacatccactcaccatcctacgaaacaaaaaccgacgtccgcgtactcgacaaaaacctacaaacccaacgacgctaaaaaataaaaaaaaaaccacaacccttacgcaaacgcaatatataacgcgaacgatcacgccaataacgtataaaaaaaaaaaaaacgtcgaccacaaaacgttt

SEQ ID NO: 34619 - DNA, 678 bp, Artificial Sequence
  chemically treated genomic DNA (Homo sapiens) CpG-island No: 34619
ttttggtttaaaagttatttgtttagtttacgggtataagttttttaaatttaagatttgtcggtttcgatatttttttggaaaatttacgaagtattcggtattcggaggtcgagtgggattcgaggatttgtagtttttttttattttggcgttttttagttaggttgaggtcgattgtttgcgattttttacgttcggtcgtttgttagcgtttttttatattagacggtagtattcgtatttaggttgtttattaaatttatttttttttttaattcgtcgtttaagtttacgtaattttttttcgttaatttttttttttaagttcgcgtatcgggcggtagttatttaaggttacgttgggaattgtatttcgattaagttagagttagtaatttaacgttattcggtttttgcgacgcgcgagacgggttttaggttggtatacgggtaagaaaagggaatttttatgtatttaaagtttcgagatcgaggtatttatttattattttgcggaatagagatcggcgttcgcgtgttcgatagagatttgtaggtttagcggcgttagggggtgggaaaagggttatagtttttgcgtaggcgtagtatgtagcgcggacggttacgttagtgacgtgtgaaagagagaggggcgtcggttataaggcgttt

SEQ ID NO: 34620 - DNA, 678 bp, Artificial Sequence
  chemically treated genomic DNA (Homo sapiens) CpG-island No: 34620
aaacgccttataaccgacgcccctctctctttcacacgtcactaacgtaaccgtccgcgctacatactacgcctacgcaaaaactataacccttttcccaccccctaacgccgctaaacctacaaatctctatcgaacacgcgaacgccgatctctattccgcaaaataataaataaatacctcgatctcgaaactttaaatacataaaaattcccttttcttacccgtataccaacctaaaacccgtctcgcgcgtcgcaaaaaccgaataacgttaaattactaactctaacttaatcgaaatacaattcccaacgtaaccttaaataactaccgcccgatacgcgaacttaaaaaaaaaaattaacgaaaaaaaattacgtaaacttaaacgacgaattaaaaaaaaaaataaatttaataaacaacctaaatacgaatactaccgtctaatataaaaaaacgctaacaaacgaccgaacgtaaaaaatcgcaaacaatcgacctcaacctaactaaaaaacgccaaaataaaaaaaaactacaaatcctcgaatcccactcgacctccgaataccgaatacttcgtaaattttccaaaaaaatatcgaaaccgacaaatcttaaatttaaaaaacttatacccgtaaactaaacaaataacttttaaaccaaaa

SEQ ID NO: 34621 - DNA, 1347 bp, Artificial Sequence
  chemically treated genomic DNA (Homo sapiens) CpG-island No: 34621
gagtagagatacgggacggagtagagatacgggacggagtagagatacgggatggagtagagatacgggacggagtagggatacgggacggagtagagatacgggacggagtagagatacgggacggagtagagatacgggacggagtagagatacgggacggagtagagatacgggggacggggtagagatacgggacggagtagagatacgggggacggagtagagatacgggacggagtagagatacgggacggagtagagatacgggacggagtagagatacgggggacggagtagagattcgggggacggggtagagatacgggggacggggtagagatacgggacggagtagagatacgggacggagtagagatacgggacggagtagggatacgggacggggtagagatacgggacggggtagagatacgggggacggggtagagatacgggacggagtagagatacgggggacggggtagagattcgggacggagtagggatacgggacggagtagagatacgggacggggtagagatacgggacggagtagagatacgggacggagtagagatatgggacggagtagggatacgggacggggtagagatacgggacggagtagagatacgggacggagtagagatacgggacggagtagggatacgggacggggtagagatacgggacggggtagagatacgggggacggggtagagatacgggacggagtagagatacgggggacggggtagagatacgggacggagtagggatacgggacggggtagagatacgggacggggtagagatacgggacggagtagagatattgggacggagtagagatacgggggacggagtagagattcgggggacggggtagagatacgggggacggggtagagatacgggacggggtagagatacgggggacggggtagagatacgggacggagtagggatacgggacggagtagagatacgggggacggagtagagatacgggggacggggtagagatacgggacggggtagagatacgggacggggtagagatacgggacggagtagagatacgggacggagtagagatacgggacggggtagagatacgggacggagtagagatacgggacggggtagagatacgggacggagtagagatacgggggacggagtagagatacgggacggagtagagatacgggacggagtagatacgggacggagtagggatacgggacggagtagatataggacggggtagagatatagggaatggagcggggatacgggggatggagtgcgggtttttacggggattgtttcgtttttag

SEQ ID NO: 34622 - DNA, 1347 bp, Artificial Sequence
  chemically treated genomic DNA (Homo sapiens) CpG-island No: 34622
ctaaaaacgaaacaatccccgtaaaaacccgcactccatcccccgtatccccgctccattccctatatctctaccccgtcctatatctactccgtcccgtatccctactccgtcccgtatctactccgtcccgtatctctactccgtcccgtatctctactccgtcccccgtatctctactccgtcccgtatctctaccccgtcccgtatctctactccgtcccgtatctctaccccgtcccgtatctctactccgtcccgtatctctactccgtcccgtatctctaccccgtcccgtatctctaccccgtcccgtatctctaccccgtcccccgtatctctactccgtcccccgtatctctactccgtcccgtatccctactccgtcccgtatctctaccccgtcccccgtatctctaccccgtcccgtatctctaccccgtcccccgtatctctaccccgtcccccgaatctctactccgtcccccgtatctctactccgtcccaatatctctactccgtcccgtatctctaccccgtcccgtatctctaccccgtcccgtatccctactccgtcccgtatctctaccccgtcccccgtatctctactccgtcccgtatctctaccccgtcccccgtatctctaccccgtcccgtatctctaccccgtcccgtatccctactccgtcccgtatctctactccgtcccgtatctctactccgtcccgtatctctaccccgtcccgtatccctactccgtcccatatctctactccgtcccgtatctctactccgtcccgtatctctaccccgtcccgtatctctactccgtcccgtatccctactccgtcccgaatctctaccccgtcccccgtatctctactccgtcccgtatctctaccccgtcccccgtatctctaccccgtcccgtatctctaccccgtcccgtatccctactccgtcccgtatctctactccgtcccgtatctctactccgtcccgtatctctaccccgtcccccgtatctctaccccgtcccccgaatctctactccgtcccccgtatctctactccgtcccgtatctctactccgtcccgtatctctactccgtcccgtatctctactccgtcccccgtatctctactccgtcccgtatctctaccccgtcccccgtatctctactccgtcccgtatctctactccgtcccgtatctctactccgtcccgtatctctactccgtcccgtatctctactccgtcccgtatccctactccgtcccgtatctctactccatcccgtatctctactccgtcccgtatctctactccgtcccgtatctctactc

SEQ ID NO: 34623 - DNA, 1347 bp, Artificial Sequence
  chemically treated genomic DNA (Homo sapiens) CpG-island No: 34623
ttgggaacggggtagttttcgtggaggttcgtattttatttttcgtgttttcgttttattttttgtgtttttgtttcgttttgtgtttgtttcgtttcgtgtttttgtttcgtttcgtgtttgtttcgtttcgtgtttttgtttcgtttcgtgtttttgtttcgtttttcgtgtttttgtttcgtttcgtgtttttgtttcgtttcgtgtttttgtttcgtttcgtgtttttgtttcgtttcgtgtttttgtttcgtttcgtgtttttgtttcgtttcgtgtttttgtttcgtttcgtgtttttgtttcgtttcgtgtttttgtttcgtttttcgtgtttttgtttcgtttttcgtgtttttgtttcgtttcgtgtttttgtttcgtttcgtgtttttgtttcgtttttcgtgtttttgtttcgtttcgtgtttttgtttcgtttttcgtgtttttgtttcgtttttcgagtttttgtttcgtttttcgtgtttttgtttcgttttagtgtttttgtttcgtttcgtgtttttgtttcgtttcgtgtttttgtttcgtttcgtgtttttgtttcgtttcgtgtttttgtttcgtttttcgtgtttttgtttcgtttcgtgtttttgtttcgtttttcgtgtttttgtttcgtttcgtgtttttgtttcgtttcgtgtttttgtttcgtttcgtgtttttgtttcgtttcgtgtttttgtttcgtttcgtgtttttgtttcgtttcgtgtttttgtttcgttttatgtttttgtttcgtttcgtgtttttgtttcgtttcgtgtttttgtttcgtttcgtgtttttgtttcgtttcgtgtttttgtttcgtttcgagtttttgtttcgtttttcgtgtttttgtttcgtttcgtgtttttgtttcgtttttcgtgtttttgtttcgtttcgtgtttttgtttcgtttcgtgtttttgtttcgtttcgtgtttttgtttcgtttcgtgtttttgtttcgtttcgtgtttttgtttcgtttttcgtgtttttgtttcgtttttcgagtttttgtttcgtttttcgtgtttttgtttcgtttcgtgtttttgtttcgtttcgtgtttttgtttcgtttcgtgtttttgtttcgtttttcgtgtttttgtttcgtttcgtgtttttgtttcgtttttcgtgtttttgtttcgtttcgtgtttttgtttcgtttcgtgtttttgtttcgtttcgtgtttttgtttcgtttcgtgtttttgtttcgtttcgtgtttttgtttcgtttcgtgtttttgttttatttcgtgtttttgtttcgtttcgtgtttttgtttcgtttcgtgtttttgttt

SEQ ID NO: 34624 - DNA, 1347 bp, Artificial Sequence
  chemically treated genomic DNA (Homo sapiens) CpG-island No: 34624
aaacaaaaacacgaaacgaaacaaaaacacgaaacgaaacaaaaacacgaaataaaacaaaaacacgaaacgaaacaaaaacacgaaacgaaacaaaaacacgaaacgaaacaaaaacacgaaacgaaacaaaaacacgaaacgaaacaaaaacacgaaacgaaacaaaaacacgaaaaacgaaacaaaaacacgaaacgaaacaaaaacacgaaaaacgaaacaaaaacacgaaacgaaacaaaaacacgaaacgaaacaaaaacacgaaacgaaacaaaaacacgaaaaacgaaacaaaaactcgaaaaacgaaacaaaaacacgaaaaacgaaacaaaaacacgaaacgaaacaaaaacacgaaacgaaacaaaaacacgaaacgaaacaaaaacacgaaacgaaacaaaaacacgaaacgaaacaaaaacacgaaaaacgaaacaaaaacacgaaacgaaacaaaaacacgaaaaacgaaacaaaaactcgaaacgaaacaaaaacacgaaacgaaacaaaaacacgaaacgaaacaaaaacacgaaacgaaacaaaaacacgaaacgaaacaaaaacataaaacgaaacaaaaacacgaaacgaaacaaaaacacgaaacgaaacaaaaacacgaaacgaaacaaaaacacgaaacgaaacaaaaacacgaaacgaaacaaaaacacgaaacgaaacaaaaacacgaaaaacgaaacaaaaacacgaaacgaaacaaaaacacgaaaaacgaaacaaaaacacgaaacgaaacaaaaacacgaaacgaaacaaaaacacgaaacgaaacaaaaacacgaaacgaaacaaaaacactaaaacgaaacaaaaacacgaaaaacgaaacaaaaactcgaaaaacgaaacaaaaacacgaaaaacgaaacaaaaacacgaaacgaaacaaaaacacgaaaaacgaaacaaaaacacgaaacgaaacaaaaacacgaaacgaaacaaaaacacgaaaaacgaaacaaaaacacgaaaaacgaaacaaaaacacgaaacgaaacaaaaacacgaaacgaaacaaaaacacgaaacgaaacaaaaacacgaaacgaaacaaaaacacgaaacgaaacaaaaacacgaaacgaaacaaaaacacgaaacgaaacaaaaacacgaaacgaaacaaaaacacgaaaaacgaaacaaaaacacgaaacgaaacaaaaacacgaaacgaaacaaacacgaaacgaaacaaaaacacgaaacgaaacaaacacaaaacgaaacaaaaacacaaaaaataaaacgaaaacacgaaaaataaaatacgaacctccacgaaaactaccccgttcccaa

SEQ ID NO: 34625 - DNA, 690 bp, Artificial Sequence
  chemically treated genomic DNA (Homo sapiens) CpG-island No: 34625
tttttcgtgtttttgtttcgtttcgtgtttttgtttcgtttcgtgtttttgtttcgtttcgtgtttttgtttcgtttttcgtgtttttgtttcgtttcgtgtttttgtttcgttttcgtgtttttgtttcgtttcgtgtttttgtttcgttttcgtgtttttgtttcgtttcgtgtttttgtttcgtttttagtgtttttgtttcgtttcgtgtttttgtttcgttttcgtgtttttgtttcgtttttcgtgtttttgtttcgtttttcgtgtttttgtttcgtttttcgtgtttttgtttcgtttcgtgtttttgtttcgtttttcgtgtttttgtttcgtttcgtgtttttgtttcgtttcgtgtttttgtttcgtttcgtgtttttgtttcgtttcgtgtttttgtttcgtttcgtgtttttgtttcgtttcgtgtttttgtttcgtttcgtgtttttgtttcgtttcgtgtttttgtttcgtttcgtgtttttgtttcgtttcgtgtttttgtttcgttttcgtgtttttgtttcgtttttcgtgtttttgtttcgtttcgtgtttttgtttcgtttcgtgtttttgtttcgtttcgtgtttttgtttcgtttcgtgtttttgtttcgttttttatgttttcgttttattttatgtttttgtttattttttttgtttttaggtttg

SEQ ID NO: 34626 - DNA, 690 bp, Artificial Sequence
  chemically treated genomic DNA (Homo sapiens) CpG-island No: 34626
caaacctaaaaacaaaaaaaataaacaaaaacataaaataaaacgaaaacataaaaaacgaaacaaaaacacgaaacgaaacaaaaacacgaaacgaaacaaaaacacgaaacgaaacaaaaacacgaaacgaaacaaaaacacgaaaaacgaaacaaaaacacgaaaacgaaacaaaaacacgaaacgaaacaaaaacacgaaacgaaacaaaaacacgaaacgaaacaaaaacacgaaacgaaacaaaaacacgaaacgaaacaaaaacacgaaacgaaacaaaaacacgaaacgaaacaaaaacacgaaacgaaacaaaaacacgaaacgaaacaaaaacacgaaacgaaacaaaaacacgaaaaacgaaacaaaaacacgaaacgaaacaaaaacacgaaaaacgaaacaaaaacacgaaaaacgaaacaaaaacacgaaaaacgaaacaaaaacacgaaaacgaaacaaaaacacgaaacgaaacaaaaacactaaaaacgaaacaaaaacacgaaacgaaacaaaaacacgaaaacgaaacaaaaacacgaaacgaaacaaaaacacgaaaacgaaacaaaaacacgaaacgaaacaaaaacacgaaaaacgaaacaaaaacacgaaacgaaacaaaaacacgaaacgaaacaaaaacacgaaacgaaacaaaaacacgaaaaa

SEQ ID NO: 34627 - DNA, 690 bp, Artificial Sequence
  chemically treated genomic DNA (Homo sapiens) CpG-island No: 34627
taggtttggggataggggggatgagtagggatatgggatggagcggagatatgggggacggggtagagatacgggacggagtagggatacgggacggagtagggatacgggacggagtagagatacgggacggagtagagatacgggggacggagtagagatacggggacggagtagagatacgggacggagtagagatacgggacggagtagagatacgggacggagtagggatacgggacggagtagagatacgggacggagtagggatacgggacggagtagagatacgggacggagtagagatacgggacggagtagagatacgggacggagtagagatacgggacggagtagagatacgggggacggagtagggatacgggacggagtagagatacgggggacggagtagagatacgggggacggagtagagatacgggggacggagtagagatacggggacggagtagagatacgggacggggtagagatattggggacggagtagagatacgggacggagtagggatacggggacggagtagagatacgggacggagtagagatacggggacggagtagagatacgggacggagtagagatacgggggacggggtagagatacgggacggggtagagatacgggacggggtagagatacgggacggggtagagatacggggga

SEQ ID NO: 34628 - DNA, 690 bp, Artificial Sequence
  chemically treated genomic DNA (Homo sapiens) CpG-island No: 34628
tcccccgtatctctaccccgtcccgtatctctaccccgtcccgtatctctaccccgtcccgtatctctaccccgtcccccgtatctctactccgtcccgtatctctactccgtccccgtatctctactccgtcccgtatctctactccgtccccgtatccctactccgtcccgtatctctactccgtccccaatatctctaccccgtcccgtatctctactccgtccccgtatctctactccgtcccccgtatctctactccgtcccccgtatctctactccgtcccccgtatctctactccgtcccgtatccctactccgtcccccgtatctctactccgtcccgtatctctactccgtcccgtatctctactccgtcccgtatctctactccgtcccgtatctctactccgtcccgtatccctactccgtcccgtatctctactccgtcccgtatccctactccgtcccgtatctctactccgtcccgtatctctactccgtcccgtatctctactccgtccccgtatctctactccgtcccccgtatctctactccgtcccgtatctctactccgtcccgtatccctactccgtcccgtatccctactccgtcccgtatctctaccccgtcccccatatctccgctccatcccatatccctactcatcccccctatccccaaaccta

SEQ ID NO: 34629 - DNA, 899 bp, Artificial Sequence
  chemically treated genomic DNA (Homo sapiens) CpG-island No: 34629
cgggttcggattaggttattgttattttttttgcgggcgggggcggtgcgaacgggcgcgattttacggaggggacgtcggcgttattatttttttttcgggcggaagcggtcgcggggtcgtttcgaggttgattaatgataagggtgttcgaggttacgtgacggtcgtcgattggtcgtcggttttcgagcgtttcggggttcggcgtttgcggaaggtttcggcgcgtttttaggagcgtcgtgcgtacgcgtatcgtttcgagtcggcggcgtttgcgtattcgcgagttcggtttgggtcgtcggttcggcgcgggcgttatgaagttgttgcggcgggcgtggcggcggcgggcggcgttaggtttgggtacgttggcgttgtgcggggcggcgttgttttatttggcgcgttgcgcggtcgagttcggggattttagggcgatgtcgggtcgtagttcgttttttttcgcgttcgcgcgcgtcgtcgtttttttggtagtgttggtggttagcgcgtttcgcgtcgtcgagcgtcgtagcgtgattcgtagtacgtggtttgcgcggcgcggggtttcgggcgacgtgtgggcgcgttttgtcgtgggtacggtcggtttgggcgtcgaggagcggcgcgttttggagcgggagtaggcgcggtacggggatttgttgttgttgttcgcgttgcgcgacgtttacgaaaattttacggttaaggtgttggttatgttggtttggttggacgagtacgtggttttcgagttcgtgtttaaggcggacgacgattttttcgcgcggttgacgcgttgttggtcgagttgcgcgttcgcgagttcgcgcgtcgtcgtcgtttttattggggttttttttcgggtcgcgtcgcgt

SEQ ID NO: 34630 - DNA, 899 bp, Artificial Sequence
  chemically treated genomic DNA (Homo sapiens) CpG-island No: 34630
acgcgacgcgacccgaaaaaaaaccccaataaaaacgacgacgacgcgcgaactcgcgaacgcgcaactcgaccaacaacgcgtcaaccgcgcgaaaaaatcgtcgtccgccttaaacacgaactcgaaaaccacgtactcgtccaaccaaaccaacataaccaacaccttaaccgtaaaattttcgtaaacgtcgcgcaacgcgaacaacaacaacaaatccccgtaccgcgcctactcccgctccaaaacgcgccgctcctcgacgcccaaaccgaccgtacccacgacaaaacgcgcccacacgtcgcccgaaaccccgcgccgcgcaaaccacgtactacgaatcacgctacgacgctcgacgacgcgaaacgcgctaaccaccaacactaccaaaaaaacgacgacgcgcgcgaacgcgaaaaaaaacgaactacgacccgacatcgccctaaaatccccgaactcgaccgcgcaacgcgccaaataaaacaacgccgccccgcacaacgccaacgtacccaaacctaacgccgcccgccgccgccacgcccgccgcaacaacttcataacgcccgcgccgaaccgacgacccaaaccgaactcgcgaatacgcaaacgccgccgactcgaaacgatacgcgtacgcacgacgctcctaaaaacgcgccgaaaccttccgcaaacgccgaaccccgaaacgctcgaaaaccgacgaccaatcgacgaccgtcacgtaacctcgaacacccttatcattaatcaacctcgaaacgaccccgcgaccgcttccgcccgaaaaaaaaataataacgccgacgtcccctccgtaaaatcgcgcccgttcgcaccgcccccgcccgcaaaaaaaataacaataacctaatccgaacccg

SEQ ID NO: 34631 - DNA, 899 bp, Artificial Sequence
  chemically treated genomic DNA (Homo sapiens) CpG-island No: 34631
acgcggcgcggttcgagaagaagttttagtagaggcggcggcggcgcgcgggttcgcgggcgcgtagttcggttagtagcgcgttagtcgcgcgaaggagtcgtcgttcgttttgagtacgaattcgaaggttacgtgttcgtttagttaggttagtatggttagtattttggtcgtgaggttttcgtaggcgtcgcgtagcgcgggtagtagtagtaggttttcgtgtcgcgtttgttttcgttttagggcgcgtcgtttttcggcgtttaggtcggtcgtgtttacggtaaagcgcgtttatacgtcgttcggggtttcgcgtcgcgtaagttacgtgttgcggattacgttgcggcgttcggcggcgcggggcgcgttggttattagtattgttaggaaggcggcggcgcgcgcgggcgcggggggaggcgggttgcggttcgatatcgttttggggttttcgggttcggtcgcgtagcgcgttaggtagagtagcgtcgtttcgtatagcgttagcgtgtttaggtttagcgtcgttcgtcgtcgttacgttcgtcgtagtagttttatggcgttcgcgtcgggtcggcggtttaggtcggattcgcgagtgcgtaggcgtcgtcggttcggggcggtgcgcgtgcgtacggcgtttttgggagcgcgtcggggtttttcgtagacgtcgagtttcggggcgttcggaggtcggcggttaatcggcggtcgttacgtggtttcgggtatttttgttattggttaatttcggagcggtttcgcgatcgttttcgttcggaggagagatggtggcgtcggcgtttttttcgtgaggtcgcgttcgttcgtatcgttttcgttcgtaagaaagatggtagtggtttgattcgggttcg

SEQ ID NO: 34632 - DNA, 899 bp, Artificial Sequence
  chemically treated genomic DNA (Homo sapiens) CpG-island No: 34632
cgaacccgaatcaaaccactaccatctttcttacgaacgaaaacgatacgaacgaacgcgacctcacgaaaaaaacgccgacgccaccatctctcctccgaacgaaaacgatcgcgaaaccgctccgaaattaaccaataacaaaaatacccgaaaccacgtaacgaccgccgattaaccgccgacctccgaacgccccgaaactcgacgtctacgaaaaaccccgacgcgctcccaaaaacgccgtacgcacgcgcaccgccccgaaccgacgacgcctacgcactcgcgaatccgacctaaaccgccgacccgacgcgaacgccataaaactactacgacgaacgtaacgacgacgaacgacgctaaacctaaacacgctaacgctatacgaaacgacgctactctacctaacgcgctacgcgaccgaacccgaaaaccccaaaacgatatcgaaccgcaacccgcctccccccgcgcccgcgcgcgccgccgccttcctaacaatactaataaccaacgcgccccgcgccgccgaacgccgcaacgtaatccgcaacacgtaacttacgcgacgcgaaaccccgaacgacgtataaacgcgctttaccgtaaacacgaccgacctaaacgccgaaaaacgacgcgccctaaaacgaaaacaaacgcgacacgaaaacctactactactacccgcgctacgcgacgcctacgaaaacctcacgaccaaaatactaaccatactaacctaactaaacgaacacgtaaccttcgaattcgtactcaaaacgaacgacgactccttcgcgcgactaacgcgctactaaccgaactacgcgcccgcgaacccgcgcgccgccgccgcctctactaaaacttcttctcgaaccgcgccgcgt

SEQ ID NO: 34633 - DNA, 784 bp, Artificial Sequence
  chemically treated genomic DNA (Homo sapiens) CpG-island No: 34633
gacgagtaggcggttgttaggttagggaggtttagttcgttatttttttcgttgcggggtcgttcgtttttttagtcgttcgcgggttgcgcgtttttggtttcgggtcgcgggggttttttcgtcggtttgttgggttcgggtcgcggcggatttcgttcggggaatttattgttgtatttggcgtttcgcggttttttcgtcggtgttcgtatagggtttttttttatggattcgtcgtagtcgttgtcgttcgggaaggatttcggggcgtttcgaggtttgcggttaaatttcgtcggtggtcgcggataatgggttgtggtcggagttatttgaggaaggtacgcgatttgtttagattatatttcgagtcgggagcggttataggttggaaagttcggtcgcgttttttttttatggttcggcggtttagtttgcgtcgcggacgtttttattggtcggtttcgtttcgcgttacggttttcgtcgcgtttttcggtttttcgttttcggggtttttagtaggggtcgcggtttcggagacgttcggaggggttcgtaagcgtagggagggaaggaaaagggcgtcggtttttaggattaggcgggatttttttatttattgcggaatgagtcgaattcgaaaagaggtagtcgtttaggagttgggattttagtgagaaagacgcggtttgggcgtttagtcgttttttttttaggttaagagggcgttgtattgaagggtttcggttttttcgttttgtgaaagattagtaaatag

SEQ ID NO: 34634 - DNA, 784 bp, Artificial Sequence
  chemically treated genomic DNA (Homo sapiens) CpG-island No: 34634
ctatttactaatctttcacaaaacgaaaaaaccgaaacccttcaatacaacgccctcttaacctaaaaaaaaaacgactaaacgcccaaaccgcgtctttctcactaaaatcccaactcctaaacgactacctcttttcgaattcgactcattccgcaataaataaaaaaatcccgcctaatcctaaaaaccgacgcccttttccttccctccctacgcttacgaacccctccgaacgtctccgaaaccgcgacccctactaaaaaccccgaaaacgaaaaaccgaaaaacgcgacgaaaaccgtaacgcgaaacgaaaccgaccaataaaaacgtccgcgacgcaaactaaaccgccgaaccataaaaaaaaaacgcgaccgaactttccaacctataaccgctcccgactcgaaatataatctaaacaaatcgcgtaccttcctcaaataactccgaccacaacccattatccgcgaccaccgacgaaatttaaccgcaaacctcgaaacgccccgaaatccttcccgaacgacaacgactacgacgaatccataaaaaaaaaccctatacgaacaccgacgaaaaaaccgcgaaacgccaaatacaacaataaattccccgaacgaaatccgccgcgacccgaacccaacaaaccgacgaaaaaacccccgcgacccgaaaccaaaaacgcgcaacccgcgaacgactaaaaaaacgaacgaccccgcaacgaaaaaaataacgaactaaacctccctaacctaacaaccgcctactcgtc

SEQ ID NO: 34635 - DNA, 784 bp, Artificial Sequence
  chemically treated genomic DNA (Homo sapiens) CpG-island No: 34635
ttgtttgttgattttttatagggcgaggggatcggagttttttaatgtagcgtttttttggtttgaagagggggcgattgggcgtttagatcgcgttttttttattgagattttagtttttggacgattgttttttttcgggttcggtttatttcgtaataagtggaggggtttcgtttgattttaggggtcggcgtttttttttttttttttttgcgtttgcgaattttttcgggcgttttcggagtcgcgatttttgttggggatttcgggggcgggaggtcgaggggcgcggcgagggtcgtgacgcgaggcggggtcggttaatgggagcgttcgcggcgtaggttgagtcgtcgggttataaaaaggaggcgcggtcgggttttttagtttgtggtcgttttcggttcggagtgtgatttaagtaggtcgcgtattttttttaggtgatttcggttatagtttattgttcgcggttatcggcggagtttagtcgtagatttcgaagcgtttcggggtttttttcgaacggtagcggttgcggcgggtttatggagaagggttttgtgcgggtatcggcggagaagtcgcggggcgttaggtgtagtaatgggtttttcgagcgggattcgtcgcggttcgggtttagtaggtcggcggagaagttttcgcggttcgaggttaagagcgcgtagttcgcggacggttggaagggcgagcggtttcgtagcgaggaggataacgagttgaatttttttaatttggtagtcgtttattcgtt

SEQ ID NO: 34636 - DNA, 784 bp, Artificial Sequence
  chemically treated genomic DNA (Homo sapiens) CpG-island No: 34636
aacgaataaacgactaccaaattaaaaaaattcaactcgttatcctcctcgctacgaaaccgctcgcccttccaaccgtccgcgaactacgcgctcttaacctcgaaccgcgaaaacttctccgccgacctactaaacccgaaccgcgacgaatcccgctcgaaaaacccattactacacctaacgccccgcgacttctccgccgatacccgcacaaaacccttctccataaacccgccgcaaccgctaccgttcgaaaaaaaccccgaaacgcttcgaaatctacgactaaactccgccgataaccgcgaacaataaactataaccgaaatcacctaaaaaaaatacgcgacctacttaaatcacactccgaaccgaaaacgaccacaaactaaaaaacccgaccgcgcctcctttttataacccgacgactcaacctacgccgcgaacgctcccattaaccgaccccgcctcgcgtcacgaccctcgccgcgcccctcgacctcccgcccccgaaatccccaacaaaaatcgcgactccgaaaacgcccgaaaaaattcgcaaacgcaaaaaaaaaaaaaaaaaaacgccgacccctaaaatcaaacgaaacccctccacttattacgaaataaaccgaacccgaaaaaaaacaatcgtccaaaaactaaaatctcaataaaaaaaacgcgatctaaacgcccaatcgccccctcttcaaaccaaaaaaacgctacattaaaaaactccgatcccctcgccctataaaaaatcaacaaacaa

SEQ ID NO: 34637 - DNA, 727 bp, Artificial Sequence
  chemically treated genomic DNA (Homo sapiens) CpG-island No: 34637
ttgcgggaggcgtacgcggcgcggtttgaggggagggggagaacgggcggaggcggtgcgttcggcgttttttgtttcggcgttaggaggagtcgcgcgttgttggtgttgttgtcgtcgttgttttagttgtcgttagttaggttgcgttcgcgtttttagggtttagtttttcggatttatcgtcgtttttagattttattgcggtttcggatattgtcgggtgaggttgtttcggtattagtgggagtcgtgaaggggaatcggggagttggggttgcggagttcgcgggcgcggttaagcgggaagcgggcgcggtgatcgaggtgtatcgagttacgtttagtgttcgggtcgtggtcgtttgtttggtattaggattaagcgtttttatcggtcgtttttttttacgttgcgggttgtttggggatcgttttttagggagaaggtgtcggaggtcgttgacgtcgcgttcgacgggtttttgggcgtttgacgttaggtttggttgcggggcggggcgggcgcgggtcggttttttttttattttttttcggcgggcgcgattcgttaggaggtcggttcgtttcggttgatttcggattttttttgttcgtgcgtttttaaacggttgtcggtttcgcgttttttggtttcgattttttttttatttttattttattatatttatttattaatttttaataaaaagggaaaggtttgaaa

SEQ ID NO: 34638 - DNA, 727 bp, Artificial Sequence
  chemically treated genomic DNA (Homo sapiens) CpG-island No: 34638
tttcaaacctttccctttttattaaaaattaataaataaatataataaaataaaaataaaaaaaaaatcgaaaccaaaaaacgcgaaaccgacaaccgtttaaaaacgcacgaacaaaaaaaatccgaaatcaaccgaaacgaaccgacctcctaacgaatcgcgcccgccgaaaaaaaataaaaaaaaaaccgacccgcgcccgccccgccccgcaaccaaacctaacgtcaaacgcccaaaaacccgtcgaacgcgacgtcaacgacctccgacaccttctccctaaaaaacgatccccaaacaacccgcaacgtaaaaaaaaacgaccgataaaaacgcttaatcctaataccaaacaaacgaccacgacccgaacactaaacgtaactcgatacacctcgatcaccgcgcccgcttcccgcttaaccgcgcccgcgaactccgcaaccccaactccccgattccccttcacgactcccactaataccgaaacaacctcacccgacaatatccgaaaccgcaataaaatctaaaaacgacgataaatccgaaaaactaaaccctaaaaacgcgaacgcaacctaactaacgacaactaaaacaacgacgacaacaacaccaacaacgcgcgactcctcctaacgccgaaacaaaaaacgccgaacgcaccgcctccgcccgttctccccctcccctcaaaccgcgccgcgtacgcctcccgcaa

SEQ ID NO: 34639 - DNA, 727 bp, Artificial Sequence
  chemically treated genomic DNA (Homo sapiens) CpG-island No: 34639
ttttaggtttttttttttttattaaaaattaatgaatgagtgtaatagggtgggggtagaggggaaatcggggttaaggggcgcgaggtcggtagtcgtttagggacgtacgaataaagggagttcgggattaatcggagcgaatcggttttttagcgggtcgcgttcgtcgggaaggggtgggggaggggtcggttcgcgttcgtttcgtttcgtagttagatttgacgttaggcgtttagaaattcgtcgggcgcgacgttagcggttttcgatattttttttttggggggcgatttttaggtagttcgtagcgtggaggaaggcgatcgatagaaacgtttagttttggtgttaggtaggcgattacggttcgagtattggacgtgattcgatgtatttcggttatcgcgttcgtttttcgtttggtcgcgttcgcgggtttcgtaattttagtttttcgatttttttttacgatttttattagtatcgaagtagttttattcggtaatattcgagatcgtagtagggtttagaagcggcgatgggttcgagggattgggttttgaagacgcgggcgtagtttgattgacggtagttagagtagcggcggtaatagtattagtagcgcgcggttttttttggcgtcggaataggaagcgtcgagcgtatcgttttcgttcgttttttttttttttttaggtcgcgtcgcgtgcgtttttcgtag

SEQ ID NO: 34640 - DNA, 727 bp, Artificial Sequence
  chemically treated genomic DNA (Homo sapiens) CpG-island No: 34640
ctacgaaaaacgcacgcgacgcgacctaaaaaaaaaaaaaaaacgaacgaaaacgatacgctcgacgcttcctattccgacgccaaaaaaaaccgcgcgctactaatactattaccgccgctactctaactaccgtcaatcaaactacgcccgcgtcttcaaaacccaatccctcgaacccatcgccgcttctaaaccctactacgatctcgaatattaccgaataaaactacttcgatactaataaaaatcgtaaaaaaaaatcgaaaaactaaaattacgaaacccgcgaacgcgaccaaacgaaaaacgaacgcgataaccgaaatacatcgaatcacgtccaatactcgaaccgtaatcgcctacctaacaccaaaactaaacgtttctatcgatcgccttcctccacgctacgaactacctaaaaatcgccccccaaaaaaaaaatatcgaaaaccgctaacgtcgcgcccgacgaatttctaaacgcctaacgtcaaatctaactacgaaacgaaacgaacgcgaaccgacccctcccccaccccttcccgacgaacgcgacccgctaaaaaaccgattcgctccgattaatcccgaactccctttattcgtacgtccctaaacgactaccgacctcgcgccccttaaccccgatttcccctctacccccaccctattacactcattcattaatttttaataaaaaaaaaaaaacctaaaa

SEQ ID NO: 34641 - DNA, 1373 bp, Artificial Sequence
  chemically treated genomic DNA (Homo sapiens) CpG-island No: 34641
gagcgggaggcgggataagcggggaggtcgttatttggtattgagtgatgcgttttttagttaatgaacgcgaggaatttcggcgtcggggcgggaggtcgggggcgggtttagtggggaggaggaggttgtaggcgcgtaagaggcgggggtcgggaggaggaaggggaggaggcggaggcgggcgcggtgttggcggcggcggcggcggcggaggggggtaggttgtgttcgggattgtgtttgtcgagttcggcggttgtgttttggtgagtggaggagcggcgcggggaggtagaggcgagcgcgggcgatcgcggcggcgggacgttttcggcggtcgcggtattagcggcggcgttttgtgtggagaagtaggggtagcggtagtagtaatagcggtagcggtagtagtagcggtagtagcggcggtcgttttttcgtcgtcggggacgttaaggtgcggttggtggtattgatatcggcggttttgttttttttttttcgttttcggttttttttatgtgatcggttttaattttggtcgtgtgtgcgcgcgtggggttttatttcgcggtgttgggttttcgtgtcggggtgggtgttcgtgtgtgcgttttttttttttatttttttttttttaagaataaaagaagaatcgggaggcgtgtttagaaaataaataaataattattatatacgcgtagttcggagcgagtcggcggggttggcggtagcggcggaggaggagtgaaggcggcggcggcggaggagggacgcgcggaaaaggtagtaattttaaagttagtttagagtttagatttttagtcgagcggtttgtagcgcggcggcggcggcggcggcggcggcgttgagtgtttggttcgtcggttcggtcggggtgtgtagtcggacggacgagtagcgcgtcgttgtttttcggtagttggagatgttcgagtttaaggtaattgattttaagttgtcgacgatcgatagggtggtgaaaggtaagcggagcgtcgcggtggtttgggtgtatcgtgtgtcgtaggcgttagggtagtttgtttcgtttcgtttttttttttttttttcgttttaggtttttttttgttcgttttagtcgcggattttttaggatattgtgtaattcgcgaatttcgcgaatttttcgttttcgcggcgttttttttttacgcgttttatttagttttatttggggtatttttattgacgggggcgttagttggtaaatggttgagtcgcggggaggtggcggcgggggtggcggtggtgggagggggcgttcggggggtggttgttggtagggtgtagttgttgtgatagaaataggaagtgggtggttttgt

SEQ ID NO: 34642 - DNA, 1373 bp, Artificial Sequence
  chemically treated genomic DNA (Homo sapiens) CpG-island No: 34642
acaaaaccacccacttcctatttctatcacaacaactacaccctaccaacaaccaccccccgaacgccccctcccaccaccgccacccccgccgccacctccccgcgactcaaccatttaccaactaacgcccccgtcaataaaaataccccaaataaaactaaataaaacgcgtaaaaaaaaaacgccgcgaaaacgaaaaattcgcgaaattcgcgaattacacaatatcctaaaaaatccgcgactaaaacgaacaaaaaaaaacctaaaacgaaaaaaaaaaaaaaaaacgaaacgaaacaaactaccctaacgcctacgacacacgatacacccaaaccaccgcgacgctccgcttacctttcaccaccctatcgatcgtcgacaacttaaaatcaattaccttaaactcgaacatctccaactaccgaaaaacaacgacgcgctactcgtccgtccgactacacaccccgaccgaaccgacgaaccaaacactcaacgccgccgccgccgccgccgccgccgcgctacaaaccgctcgactaaaaatctaaactctaaactaactttaaaattactaccttttccgcgcgtccctcctccgccgccgccgccttcactcctcctccgccgctaccgccaaccccgccgactcgctccgaactacgcgtatataataattatttatttattttctaaacacgcctcccgattcttcttttattcttaaaaaaaaaaaaataaaaaaaaaaaacgcacacacgaacacccaccccgacacgaaaacccaacaccgcgaaataaaaccccacgcgcgcacacacgaccaaaattaaaaccgatcacataaaaaaaaccgaaaacgaaaaaaaaaaaacaaaaccgccgatatcaataccaccaaccgcaccttaacgtccccgacgacgaaaaaacgaccgccgctactaccgctactactaccgctaccgctattactactaccgctacccctacttctccacacaaaacgccgccgctaataccgcgaccgccgaaaacgtcccgccgccgcgatcgcccgcgctcgcctctacctccccgcgccgctcctccactcaccaaaacacaaccgccgaactcgacaaacacaatcccgaacacaacctacccccctccgccgccgccgccgccgccaacaccgcgcccgcctccgcctcctccccttcctcctcccgacccccgcctcttacgcgcctacaacctcctcctccccactaaacccgcccccgacctcccgccccgacgccgaaattcctcgcgttcattaactaaaaaacgcatcactcaataccaaataacgacctccccgcttatcccgcctcccgctc

SEQ ID NO: 34643 - DNA, 1373 bp, Artificial Sequence
  chemically treated genomic DNA (Homo sapiens) CpG-island No: 34643
gtagagttatttattttttatttttgttatagtagttatattttattagtaattatttttcgggcgtttttttttattatcgttattttcgtcgttattttttcgcggtttagttatttgttaattgacgttttcgttaataaaaatgttttaagtgaggttgggtgggacgcgtgggggaagggcgtcgcgggggcggggggttcgcggggttcgcgggttgtataatattttagaaggttcgcggttggagcggatagaggagaatttggggcgggggaggggaggaaaggcgaggcgaggtaagttgttttggcgtttgcggtatacggtgtatttaggttatcgcggcgtttcgtttattttttattattttgtcggtcgtcgataatttgggattaattgttttgggttcggatatttttagttgtcggaggatagcgacgcgttgttcgttcgttcgattgtatatttcgatcggatcggcgggttagatatttaacgtcgtcgtcgtcgtcgtcgtcgtcgcgttgtaaatcgttcggttggaggtttaggttttgagttggttttaaagttgttgtttttttcgcgcgtttttttttcgtcgtcgtcgtttttatttttttttcgtcgttgtcgttagtttcgtcgattcgtttcgggttgcgcgtgtgtggtggttatttatttattttttgagtacgtttttcggttttttttttatttttgggggaagggggatggggaggagaagcgtatatacgagtatttatttcggtacggagatttagtatcgcggaatggagttttacgcgcgtatatacggttaggattaagatcgattatatggggaaggtcgggggcgagggaggagaggtagggtcgtcgatgttagtgttattagtcgtattttggcgttttcggcggcggagaggcggtcgtcgttgttgtcgttgttgttgtcgttgtcgttgttgttgttgtcgttgtttttgtttttttatatagagcgtcgtcgttggtgtcgcggtcgtcggagacgtttcgtcgtcgcgatcgttcgcgttcgtttttgttttttcgcgtcgtttttttatttattaaggtatagtcgtcgagttcggtagatatagtttcgggtataatttattttttttcgtcgtcgtcgtcgtcgttaatatcgcgttcgttttcgttttttttttttttttttttcggttttcgttttttgcgcgtttgtagtttttttttttttattgagttcgttttcgatttttcgtttcgacgtcggagtttttcgcgtttattggttagagggcgtattatttagtgttaggtggcggttttttcgtttgtttcgtttttcgttt

SEQ ID NO: 34644 - DNA, 1373 bp, Artificial Sequence
  chemically treated genomic DNA (Homo sapiens) CpG-island No: 34644
aaacgaaaaacgaaacaaacgaaaaaaccgccacctaacactaaataatacgccctctaaccaataaacgcgaaaaactccgacgtcgaaacgaaaaatcgaaaacgaactcaataaaaaaaaaaaaactacaaacgcgcaaaaaacgaaaaccgaaaaaaaaaaaaaaaaaaaacgaaaacgaacgcgatattaacgacgacgacgacgacgaaaaaaaataaattatacccgaaactatatctaccgaactcgacgactataccttaataaataaaaaaacgacgcgaaaaaacaaaaacgaacgcgaacgatcgcgacgacgaaacgtctccgacgaccgcgacaccaacgacgacgctctatataaaaaaacaaaaacaacgacaacaacaacaacgacaacgacaacaacaacgacaacaacgacgaccgcctctccgccgccgaaaacgccaaaatacgactaataacactaacatcgacgaccctacctctcctccctcgcccccgaccttccccatataatcgatcttaatcctaaccgtatatacgcgcgtaaaactccattccgcgatactaaatctccgtaccgaaataaatactcgtatatacgcttctcctccccatcccccttcccccaaaaataaaaaaaaaaccgaaaaacgtactcaaaaaataaataaataaccaccacacacgcgcaacccgaaacgaatcgacgaaactaacgacaacgacgaaaaaaaaataaaaacgacgacgacgaaaaaaaaacgcgcgaaaaaaacaacaactttaaaaccaactcaaaacctaaacctccaaccgaacgatttacaacgcgacgacgacgacgacgacgacgacgttaaatatctaacccgccgatccgatcgaaatatacaatcgaacgaacgaacaacgcgtcgctatcctccgacaactaaaaatatccgaacccaaaacaattaatcccaaattatcgacgaccgacaaaataataaaaaataaacgaaacgccgcgataacctaaatacaccgtataccgcaaacgccaaaacaacttacctcgcctcgcctttcctcccctcccccgccccaaattctcctctatccgctccaaccgcgaaccttctaaaatattatacaacccgcgaaccccgcgaaccccccgcccccgcgacgcccttcccccacgcgtcccacccaacctcacttaaaacatttttattaacgaaaacgtcaattaacaaataactaaaccgcgaaaaaataacgacgaaaataacgataataaaaaaaaacgcccgaaaaataattactaataaaatataactactataacaaaaataaaaaataaataactctac

SEQ ID NO: 34645 - DNA, 539 bp, Artificial Sequence
  chemically treated genomic DNA (Homo sapiens) CpG-island No: 34645
cgtagaggtcgtttttttttaggattggcgggttttggcgggtatgagggaggttagcggggagggttttgttttaagaggttcggagcgtggatagcgtacggggtgttgaattaggtacggggaggaggagtgtcggtaagggcgtcggttcggggaggacgaggtgagtcgaggcgtgattcgtgggggattacgggtcgcgggaggaggttgtggacgcgtaatcgcggtcggtagggtttcgagcgtttttttcgggagcgttgacgggaggcgcggtttttatttggttaaaggcggagttgagtatggggcgtagtcggtggaggaacgggttcgtttcggacgcggcggttggaacggagttttcgcggtttcgggttcgtagagagtttcggaggtcgagcgtcggggatagttttcgtttttttttatttcgttcgcgggtcggcggtagcggcgataacggcgaaagtcgggacgtcgcggtttgtagcgtttttcggggtttgtattgcgtttgggggagtatacgt

SEQ ID NO: 34646 - DNA, 539 bp, Artificial Sequence
  chemically treated genomic DNA (Homo sapiens) CpG-island No: 34646
acgtatactcccccaaacgcaatacaaaccccgaaaaacgctacaaaccgcgacgtcccgactttcgccgttatcgccgctaccgccgacccgcgaacgaaataaaaaaaaacgaaaactatccccgacgctcgacctccgaaactctctacgaacccgaaaccgcgaaaactccgttccaaccgccgcgtccgaaacgaacccgttcctccaccgactacgccccatactcaactccgcctttaaccaaataaaaaccgcgcctcccgtcaacgctcccgaaaaaaacgctcgaaaccctaccgaccgcgattacgcgtccacaacctcctcccgcgacccgtaatcccccacgaatcacgcctcgactcacctcgtcctccccgaaccgacgcccttaccgacactcctcctccccgtacctaattcaacaccccgtacgctatccacgctccgaacctcttaaaacaaaaccctccccgctaacctccctcatacccgccaaaacccgccaatcctaaaaaaaaacgacctctacg

SEQ ID NO: 34647 - DNA, 539 bp, Artificial Sequence
  chemically treated genomic DNA (Homo sapiens) CpG-island No: 34647
gcgtgtgtttttttaggcgtaatgtaggtttcgggaggcgttgtagatcgcggcgtttcgattttcgtcgttgtcgtcgttgtcgtcggttcgcgggcgggatggggaggaacggggattgttttcggcgttcggttttcggggttttttgcgagttcggggtcgcggggatttcgttttagtcgtcgcgttcgaggcggattcgtttttttatcggttgcgttttatgtttagtttcgtttttggttaggtaagggtcgcgtttttcgttagcgttttcgggaaaggcgttcgggattttgtcggtcgcggttgcgcgtttatagttttttttcgcggttcgtggttttttacggattacgtttcggtttatttcgtttttttcgggtcggcgtttttgtcggtatttttttttttcgtgtttgatttagtatttcgtgcgttgtttacgtttcgggttttttggggtaaggtttttttcgttagttttttttatattcgttagaattcgttagttttggaagagagcgatttttacg

SEQ ID NO: 34648 - DNA, 539 bp, Artificial Sequence
  chemically treated genomic DNA (Homo sapiens) CpG-island No: 34648
cgtaaaaatcgctctcttccaaaactaacgaattctaacgaatataaaaaaaactaacgaaaaaaaccttaccccaaaaaacccgaaacgtaaacaacgcacgaaatactaaatcaaacacgaaaaaaaaaaataccgacaaaaacgccgacccgaaaaaaacgaaataaaccgaaacgtaatccgtaaaaaaccacgaaccgcgaaaaaaaactataaacgcgcaaccgcgaccgacaaaatcccgaacgcctttcccgaaaacgctaacgaaaaacgcgacccttacctaaccaaaaacgaaactaaacataaaacgcaaccgataaaaaaacgaatccgcctcgaacgcgacgactaaaacgaaatccccgcgaccccgaactcgcaaaaaaccccgaaaaccgaacgccgaaaacaatccccgttcctccccatcccgcccgcgaaccgacgacaacgacgacaacgacgaaaatcgaaacgccgcgatctacaacgcctcccgaaacctacattacgcctaaaaaaacacacgc

SEQ ID NO: 34649 - DNA, 747 bp, Artificial Sequence
  chemically treated genomic DNA (Homo sapiens) CpG-island No: 34649
tttgagcgaattggtacgggagtaattgttcgttgcggaataggcggcgttggcgtagtttgttgcgtggggaattgtgtcgtaatcggttaatgaatcgcgttgttttaattatgattgtttgtcgatggaaaattacgaaggcgttcgtttgcgttagtatcggatgatataggaggagtagggatgagtaacgatacgttatttgatgcgttgtggtaacgaatgttggcgcgcggttggacgttagttagtgaatttcgttttgacgattggtttacgtaagcgttagacggcgtggtgttattaagtagtgattcgaaacgtacgttagaggttagcgataattcggtaatgattggcgaattattgcgcgagtttttcgattatatatggtaggtggcgattgttgattttgagtagagcggacgtatcggcgatcgttttggcgtttttcgtttttttgttattttagtgtttatcggcggaaattatcgcggcgtgttgaatggtatttattcgttggcggaattgataaatttgatgcgttggtttgtcgaatcgtagtaggagcgtgttttatgagcgaaatttttttttatttgttgggggtaggaacgtaatcgaacgatgatagttttagtatggatttattggcgatttattgttaggtgaatgattgatcgagtatggcggttttgagtaatgttttatagtcgtagtgattcgcgtgtatcgatttatata

SEQ ID NO: 34650 - DNA, 747 bp, Artificial Sequence
  chemically treated genomic DNA (Homo sapiens) CpG-island No: 34650
tatataaatcgatacacgcgaatcactacgactataaaacattactcaaaaccgccatactcgatcaatcattcacctaacaataaatcgccaataaatccatactaaaactatcatcgttcgattacgttcctacccccaacaaataaaaaaaaatttcgctcataaaacacgctcctactacgattcgacaaaccaacgcatcaaatttatcaattccgccaacgaataaataccattcaacacgccgcgataatttccgccgataaacactaaaataacaaaaaaacgaaaaacgccaaaacgatcgccgatacgtccgctctactcaaaatcaacaatcgccacctaccatatataatcgaaaaactcgcgcaataattcgccaatcattaccgaattatcgctaacctctaacgtacgtttcgaatcactacttaataacaccacgccgtctaacgcttacgtaaaccaatcgtcaaaacgaaattcactaactaacgtccaaccgcgcgccaacattcgttaccacaacgcatcaaataacgtatcgttactcatccctactcctcctatatcatccgatactaacgcaaacgaacgccttcgtaattttccatcgacaaacaatcataattaaaacaacgcgattcattaaccgattacgacacaattccccacgcaacaaactacgccaacgccgcctattccgcaacgaacaattactcccgtaccaattcgctcaaa

SEQ ID NO: 34651 - DNA, 747 bp, Artificial Sequence
  chemically treated genomic DNA (Homo sapiens) CpG-island No: 34651
tgtgtaaatcggtatacgcgaattattgcggttgtgagatattgtttaaggtcgttatattcggttaattatttatttgatagtgaatcgttagtggatttatgttgaaattgttatcgttcggttgcgtttttgtttttagtagatggaaaaaagtttcgtttatgaggtacgtttttgttgcggttcgataagttagcgtattaggtttattagtttcgttaacgggtgaatattatttagtacgtcgcgatagttttcgtcggtaaatattaaagtggtaggaaagcgaaagacgttaaagcgatcgtcgatgcgttcgttttgtttaaggttagtaatcgttatttgttatgtatagtcgggaaattcgcgtagtaattcgttaattattatcggattatcgttgatttttggcgtgcgtttcgggttattgtttaataatattacgtcgtttggcgtttgcgtaagttagtcgttaagacgggatttattgattggcgtttagtcgcgcgttagtattcgttgttataacgtattaaatggcgtgtcgttgtttatttttgttttttttgtgttattcggtattggcgtaagcgaacgttttcgtaattttttatcgatagatagttataattgagatagcgcgatttattagtcggttgcggtataattttttacgtagtaagttgcgttagcgtcgtttgtttcgtagcgggtagttgttttcgtgttagttcgtttagg

SEQ ID NO: 34652 - DNA, 747 bp, Artificial Sequence
  chemically treated genomic DNA (Homo sapiens) CpG-island No: 34652
cctaaacgaactaacacgaaaacaactacccgctacgaaacaaacgacgctaacgcaacttactacgtaaaaaattataccgcaaccgactaataaatcgcgctatctcaattataactatctatcgataaaaaattacgaaaacgttcgcttacgccaataccgaataacacaaaaaaaacaaaaataaacaacgacacgccatttaatacgttataacaacgaatactaacgcgcgactaaacgccaatcaataaatcccgtcttaacgactaacttacgcaaacgccaaacgacgtaatattattaaacaataacccgaaacgcacgccaaaaatcaacgataatccgataataattaacgaattactacgcgaatttcccgactatacataacaaataacgattactaaccttaaacaaaacgaacgcatcgacgatcgctttaacgtctttcgctttcctaccactttaatatttaccgacgaaaactatcgcgacgtactaaataatattcacccgttaacgaaactaataaacctaatacgctaacttatcgaaccgcaacaaaaacgtacctcataaacgaaacttttttccatctactaaaaacaaaaacgcaaccgaacgataacaatttcaacataaatccactaacgattcactatcaaataaataattaaccgaatataacgaccttaaacaatatctcacaaccgcaataattcgcgtataccgatttacaca

SEQ ID NO: 34653 - DNA, 575 bp, Artificial Sequence
  chemically treated genomic DNA (Homo sapiens) CpG-island No: 34653
  unsure (305)
attttttacgagtggggtagaggttgcggcggcggcgaagagataattttcgtcggaagacggtttttggcgcggggtacgttgggagttgcggacggcgggcgcgggttgggtcgggtttagtggcggtcgtatatttcgcgtcgtttggggtagtgttgcgcgtgcgttgatgataggttcgatacgttttttttacgttcgcgaattcgttttcgtttagtttttcgtagttttgcgttcgtgggagagtttcgtttttttttgcgaatcgtattatttagatttcggggtgcgcggagggncgcgtttttgacggaagtcggggcggacggtcggagttcggaagaaaaatagttcgcgatagttaggcgcgtgagatcgatcgtcgcgtagggttgttttggtcgggattcgttggtcgggagacgcgaatttgtcggattatcgcgcggggacgacggcggttatgagttcgcggaagttgagcgggtcgaaaggtaggaggtttaggtgagggtattttggcggtagaggtaggtttgttcggggggatcggcgttttttgggttgcg

SEQ ID NO: 34654 - DNA, 575 bp, Artificial Sequence
  chemically treated genomic DNA (Homo sapiens) CpG-island No: 34654
  unsure (271)
cgcaacccaaaaaacgccgatccccccgaacaaacctacctctaccgccaaaataccctcacctaaacctcctacctttcgacccgctcaacttccgcgaactcataaccgccgtcgtccccgcgcgataatccgacaaattcgcgtctcccgaccaacgaatcccgaccaaaacaaccctacgcgacgatcgatctcacgcgcctaactatcgcgaactatttttcttccgaactccgaccgtccgccccgacttccgtcaaaaacgcgnccctccgcgcaccccgaaatctaaataatacgattcgcaaaaaaaaacgaaactctcccacgaacgcaaaactacgaaaaactaaacgaaaacgaattcgcgaacgtaaaaaaaacgtatcgaacctatcatcaacgcacgcgcaacactaccccaaacgacgcgaaatatacgaccgccactaaacccgacccaacccgcgcccgccgtccgcaactcccaacgtaccccgcgccaaaaaccgtcttccgacgaaaattatctcttcgccgccgccgcaacctctaccccactcgtaaaaaat

SEQ ID NO: 34655 - DNA, 575 bp, Artificial Sequence
  chemically treated genomic DNA (Homo sapiens) CpG-island No: 34655
  unsure (271)
cgtagtttaaggggcgtcgattttttcgagtaggtttgtttttgtcgttagggtgtttttatttgagttttttgtttttcggttcgtttagttttcgcgagtttatggtcgtcgtcgttttcgcgcggtggttcggtaggttcgcgtttttcggttagcgggtttcggttagagtagttttgcgcggcggtcggttttacgcgtttagttgtcgcggattgtttttttttcggatttcgatcgttcgtttcggttttcgttagagacgcgntttttcgcgtatttcgggatttgggtggtgcggttcgtagaaggaggcgggatttttttacgagcgtaaagttgcgagaggttgagcgaagacgggttcgcggacgtaagaggggcgtgtcgggtttgttattagcgtacgcgtaatattgttttagacgacgcgaggtgtgcggtcgttattagattcggtttagttcgcgttcgtcgttcgtagtttttagcgtgtttcgcgttaggggtcgtttttcggcggaagttgttttttcgtcgtcgtcgtagtttttgttttattcgtgagggat

SEQ ID NO: 34656 - DNA, 575 bp, Artificial Sequence
  chemically treated genomic DNA (Homo sapiens) CpG-island No: 34656
  unsure (305)
atccctcacgaataaaacaaaaactacgacgacgacgaaaaaacaacttccgccgaaaaacgacccctaacgcgaaacacgctaaaaactacgaacgacgaacgcgaactaaaccgaatctaataacgaccgcacacctcgcgtcgtctaaaacaatattacgcgtacgctaataacaaacccgacacgcccctcttacgtccgcgaacccgtcttcgctcaacctctcgcaactttacgctcgtaaaaaaatcccgcctccttctacgaaccgcaccacccaaatcccgaaatacgcgaaaaancgcgtctctaacgaaaaccgaaacgaacgatcgaaatccgaaaaaaaaacaatccgcgacaactaaacgcgtaaaaccgaccgccgcgcaaaactactctaaccgaaacccgctaaccgaaaaacgcgaacctaccgaaccaccgcgcgaaaacgacgacgaccataaactcgcgaaaactaaacgaaccgaaaaacaaaaaactcaaataaaaacaccctaacgacaaaaacaaacctactcgaaaaaatcgacgccccttaaactacg

SEQ ID NO: 34657 - DNA, 701 bp, Artificial Sequence
  chemically treated genomic DNA (Homo sapiens) CpG-island No: 34657
gaattggaggtgcgattcgtcggggagtcggggcggcgtttcgcgtttttttttttttttttttatcgcgaggggtaggggcgtcggttttcggcgagagttacgcgtttttcgtgtttaattatcggtttttgttaggatgaggcgggtaggcgggggcgtttcgggagttacggtcggcgtcgtttttatcgtcgttttttgtttcgttcgtttgcggtagagtcgggattttttttagttttcgtttatttgttagggtcgtcgtcgtcgtcgttatcgcgggttaaatcgtagtcgcgtttatattttcggggttcgttaggttcgttttttatcggatgtgatttttttgtaacgttcggcgttttagtggcgcgcgtgttcgtttcgcgatttcgttggtcgtttcgtttcgcgcgtttttgagttattacgatatcgtgttatatatatacgttcgcggtcgttcgggttataattacgggagcgtttacgagatttttttagcgttcgtcgtacgtttcggtttcgttttcggtaagaggtttcgtttattgggcggagattaggtcgttttgggttagtgcgtcggcgcggacgttcgtcgtttttcgagtggttagcgaggattcgttttgtatatagttcgattttgggaggttttttagagggatttaaaaggagggggaagtagatgg

SEQ ID NO: 34658 - DNA, 701 bp, Artificial Sequence
  chemically treated genomic DNA (Homo sapiens) CpG-island No: 34658
ccatctacttccccctccttttaaatccctctaaaaaacctcccaaaatcgaactatatacaaaacgaatcctcgctaaccactcgaaaaacgacgaacgtccgcgccgacgcactaacccaaaacgacctaatctccgcccaataaacgaaacctcttaccgaaaacgaaaccgaaacgtacgacgaacgctaaaaaaatctcgtaaacgctcccgtaattataacccgaacgaccgcgaacgtatatatataacacgatatcgtaataactcaaaaacgcgcgaaacgaaacgaccaacgaaatcgcgaaacgaacacgcgcgccactaaaacgccgaacgttacaaaaaaatcacatccgataaaaaacgaacctaacgaaccccgaaaatataaacgcgactacgatttaacccgcgataacgacgacgacgacgaccctaacaaataaacgaaaactaaaaaaaatcccgactctaccgcaaacgaacgaaacaaaaaacgacgataaaaacgacgccgaccgtaactcccgaaacgcccccgcctacccgcctcatcctaacaaaaaccgataattaaacacgaaaaacgcgtaactctcgccgaaaaccgacgcccctacccctcgcgataaaaaaaaaaaaaaaaaaacgcgaaacgccgccccgactccccgacgaatcgcacctccaattc

SEQ ID NO: 34659 - DNA, 701 bp, Artificial Sequence
  chemically treated genomic DNA (Homo sapiens) CpG-island No: 34659
ttatttgtttttttttttttttgggtttttttgagaagttttttaagatcgagttgtgtatagagcgagttttcgttggttattcggaaggcggcggacgttcgcgtcggcgtattagtttagagcggtttggttttcgtttagtgggcggggttttttatcgggggcggggtcgaggcgtgcggcgagcgttggaggggtttcgtgggcgttttcgtggttgtggttcgggcggtcgcgagcgtgtgtgtgtggtacgatgtcgtggtaatttagaggcgcgcgaggcggggcggttaacggggtcgcggggcgagtacgcgcgttattggggcgtcggacgttgtaagggggttatattcggtagggggcgggtttggcggatttcggaagtgtgggcgcggttgcggtttaattcgcggtggcggcggcgacggcggttttggtaggtgagcggagattggggagggtttcggttttgtcgtaggcgggcggggtagaggacgacggtgggggcggcgtcggtcgtggttttcggagcgttttcgtttgttcgttttattttggtagaggtcggtgattgggtacgaggggcgcgtgattttcgtcgggggtcggcgtttttgtttttcgcggtgggagggagggagggagagcgcgaggcgtcgtttcggtttttcggcgggtcgtatttttagttt

SEQ ID NO: 34660 - DNA, 701 bp, Artificial Sequence
  chemically treated genomic DNA (Homo sapiens) CpG-island No: 34660
aaactaaaaatacgacccgccgaaaaaccgaaacgacgcctcgcgctctccctccctccctcccaccgcgaaaaacaaaaacgccgacccccgacgaaaatcacgcgcccctcgtacccaatcaccgacctctaccaaaataaaacgaacaaacgaaaacgctccgaaaaccacgaccgacgccgcccccaccgtcgtcctctaccccgcccgcctacgacaaaaccgaaaccctccccaatctccgctcacctaccaaaaccgccgtcgccgccgccaccgcgaattaaaccgcaaccgcgcccacacttccgaaatccgccaaacccgccccctaccgaatataacccccttacaacgtccgacgccccaataacgcgcgtactcgccccgcgaccccgttaaccgccccgcctcgcgcgcctctaaattaccacgacatcgtaccacacacacacgctcgcgaccgcccgaaccacaaccacgaaaacgcccacgaaacccctccaacgctcgccgcacgcctcgaccccgcccccgataaaaaaccccgcccactaaacgaaaaccaaaccgctctaaactaatacgccgacgcgaacgtccgccgccttccgaataaccaacgaaaactcgctctatacacaactcgatcttaaaaaacttctcaaaaaaacccaaaaaaaaaaaaaaacaaataa

SEQ ID NO: 34661 - DNA, 559 bp, Artificial Sequence
  chemically treated genomic DNA (Homo sapiens) CpG-island No: 34661
gtgcggtgaggacggagcgtgttttttcgtgtgcggtgaggacggagcgggtgttttcgtgtgcggtgaggacggagcgtgttttttcgtgtgcggtgaggacggagcgggtgttttcgtgtgcggtgaggacggagcgtgttttttcgtgtgcggtgaggatggagcgtgttttttcgtgtgcggtgaggacggagcgtgttttttcgtgtgcggtgaggacggagcgggtgttttcgtgtgcggtgaggacggagcgtgttttttcgtgtgcggtgaggacggagcgtgttttttcgtgtgcggtgaggacggagcgtgttttttcgtgtgcggtgaggacggagcgtgttttttcgtgtgcggtgaggacggagcgtgttttttcgtgtgcggtgaggacggagcgtgttttttcgtgtgcggtgaggacggagcgtgttttttcgtgtgcggtgagtatggagcgtgtgttttcgtgtgtggtgagtatggagcgggtgttttcgtgtgatgatgagaatgaaattgtgtaatttaaagattgagaaaaatcgtg

SEQ ID NO: 34662 - DNA, 559 bp, Artificial Sequence
  chemically treated genomic DNA (Homo sapiens) CpG-island No: 34662
cacgatttttctcaatctttaaattacacaatttcattctcatcatcacacgaaaacacccgctccatactcaccacacacgaaaacacacgctccatactcaccgcacacgaaaaaacacgctccgtcctcaccgcacacgaaaaaacacgctccgtcctcaccgcacacgaaaaaacacgctccgtcctcaccgcacacgaaaaaacacgctccgtcctcaccgcacacgaaaaaacacgctccgtcctcaccgcacacgaaaaaacacgctccgtcctcaccgcacacgaaaaaacacgctccgtcctcaccgcacacgaaaacacccgctccgtcctcaccgcacacgaaaaaacacgctccgtcctcaccgcacacgaaaaaacacgctccatcctcaccgcacacgaaaaaacacgctccgtcctcaccgcacacgaaaacacccgctccgtcctcaccgcacacgaaaaaacacgctccgtcctcaccgcacacgaaaacacccgctccgtcctcaccgcacacgaaaaaacacgctccgtcctcaccgcac

SEQ ID NO: 34663 - DNA, 559 bp, Artificial Sequence
  chemically treated genomic DNA (Homo sapiens) CpG-island No: 34663
tacggttttttttagtttttgggttatatagttttatttttattattatacggaggtattcgttttatatttattatatacggaggtatacgttttatatttatcgtatacggagggatacgtttcgtttttatcgtatacggagggatacgtttcgtttttatcgtatacggagggatacgtttcgtttttatcgtatacggagggatacgtttcgtttttatcgtatacggagggatacgtttcgtttttatcgtatacggagggatacgtttcgtttttatcgtatacggagggatacgtttcgtttttatcgtatacggaggtattcgtttcgtttttatcgtatacggagggatacgtttcgtttttatcgtatacggagggatacgttttatttttatcgtatacggagggatacgtttcgtttttatcgtatacggaggtattcgtttcgtttttatcgtatacggagggatacgtttcgtttttatcgtatacggaggtattcgtttcgtttttatcgtatacggagggatacgtttcgtttttatcgtat

SEQ ID NO: 34664 - DNA, 559 bp, Artificial Sequence
  chemically treated genomic DNA (Homo sapiens) CpG-island No: 34664
atacgataaaaacgaaacgtatccctccgtatacgataaaaacgaaacgaatacctccgtatacgataaaaacgaaacgtatccctccgtatacgataaaaacgaaacgaatacctccgtatacgataaaaacgaaacgtatccctccgtatacgataaaaataaaacgtatccctccgtatacgataaaaacgaaacgtatccctccgtatacgataaaaacgaaacgaatacctccgtatacgataaaaacgaaacgtatccctccgtatacgataaaaacgaaacgtatccctccgtatacgataaaaacgaaacgtatccctccgtatacgataaaaacgaaacgtatccctccgtatacgataaaaacgaaacgtatccctccgtatacgataaaaacgaaacgtatccctccgtatacgataaaaacgaaacgtatccctccgtatacgataaatataaaacgtatacctccgtatataataaatataaaacgaatacctccgtataataataaaaataaaactatataacccaaaaactaaaaaaaaccgta

SEQ ID NO: 34665 - DNA, 917 bp, Artificial Sequence
  chemically treated genomic DNA (Homo sapiens) CpG-island No: 34665
tatgtgtgcgcgcgagagtgtgtgtgttaaacgtttatcgtattttttcgtttaggcggttttaggtgttcgcgggaggggattaggatttcgtcgtgtttttgttttcggttttttgtgtcgagtttagagtagcgcgaggttagttttttagtttatattttcggtttcgattttgggtgggagttttcgttttcgtttttttcgtagtcgttcgagttcggtttttgttcgtttgtttttatttcggcgtacgttttcgtcgtgtcgggcggtcggagagttgttagtcggcgtttgggattcggatttcggtcggcggttgtcggtgcgaaaatttattggagcggagaaagatagcgcgcggcgtattaagcggtcgtattggcgtcgtttttgttttttttcgcgtcgttttcgtttggagcgcgtttttcgggatgtttcgtttttcggttatttattagtattacggagtttcgtacggttttagatacgttttgtcggagtttagtcgtcgtgttaggtttgttgagtcgtttggtgaatttgcgtatttcggttatggtagcggcggcgggcgggtttcggcgggcgggcggatttcggcgggcgggtggatttattgtttcggttcgcggcggtcgcggtcgttgttgttttttttgtttattcgtcggtcggtcggttatatcgtagttcggcggcggcgcggtttacgttgttttttttttttattttttattcgttgtttttttttcgttttttttttttttttttttttcgttcgtttcgttcgtttattgttttgttttacggcgtcggcggcggtagtttttttttttagagggttcgagtttcgatcgttattagtcgaagtaggagggtgtgtttgatggggaagggtgtgtagaggg

SEQ ID NO: 34666 - DNA, 917 bp, Artificial Sequence
  chemically treated genomic DNA (Homo sapiens) CpG-island No: 34666
ccctctacacacccttccccatcaaacacaccctcctacttcgactaataacgatcgaaactcgaaccctctaaaaaaaaaaactaccgccgccgacgccgtaaaacaaaacaataaacgaacgaaacgaacgaaaaaaaaaaaaaaaaaaaaaacgaaaaaaaaacaacgaataaaaaataaaaaaaaaaaacaacgtaaaccgcgccgccgccgaactacgatataaccgaccgaccgacgaataaacaaaaaaaacaacaacgaccgcgaccgccgcgaaccgaaacaataaatccacccgcccgccgaaatccgcccgcccgccgaaacccgcccgccgccgctaccataaccgaaatacgcaaattcaccaaacgactcaacaaacctaacacgacgactaaactccgacaaaacgtatctaaaaccgtacgaaactccgtaatactaataaataaccgaaaaacgaaacatcccgaaaaacgcgctccaaacgaaaacgacgcgaaaaaaaacaaaaacgacgccaatacgaccgcttaatacgccgcgcgctatctttctccgctccaataaattttcgcaccgacaaccgccgaccgaaatccgaatcccaaacgccgactaacaactctccgaccgcccgacacgacgaaaacgtacgccgaaataaaaacaaacgaacaaaaaccgaactcgaacgactacgaaaaaaacgaaaacgaaaactcccacccaaaatcgaaaccgaaaatataaactaaaaaactaacctcgcgctactctaaactcgacacaaaaaaccgaaaacaaaaacacgacgaaatcctaatcccctcccgcgaacacctaaaaccgcctaaacgaaaaaatacgataaacgtttaacacacacactctcgcgcgcacacata

SEQ ID NO: 34667 - DNA, 917 bp, Artificial Sequence
  chemically treated genomic DNA (Homo sapiens) CpG-island No: 34667
ttttttatatatttttttttattagatatatttttttgtttcggttggtggcgatcggagttcgggttttttaggggagggagttgtcgtcgtcgacgtcgtggggtaggatagtgagcgggcgaagcgagcgagaaaaggagggaaggagggaacgagggaggagtagcgggtgggaggtgggagggaggagtagcgtgagtcgcgtcgtcgtcgagttgcgatgtggtcggtcggtcggcgagtaaatagagggagtagtagcggtcgcggtcgtcgcgggtcggggtagtgagtttattcgttcgtcgaggttcgttcgttcgtcgagattcgttcgtcgtcgttgttatggtcgaagtgcgtaaatttattaaacggtttagtaagtttggtacggcggttgagtttcggtagagcgtgtttgaggtcgtgcggggtttcgtggtgttggtgagtggtcgggggacggggtatttcgggggacgcgttttaggcgggagcgacgcgggaaggggtaggaacggcgttagtgcggtcgtttggtgcgtcgcgcgttgttttttttcgttttagtaagttttcgtatcggtagtcgtcggtcggggttcgagttttaggcgtcggttgatagtttttcggtcgttcggtacggcggaggcgtgcgtcgggatggaagtagacgggtaaaagtcgggttcggacggttgcggaggaggcggaggcggaggtttttatttagggtcggggtcgggggtgtgagttaaagagttgatttcgcgttgttttggattcggtataaagagtcggggataagggtacgacgagattttgattttttttcgcgagtatttgaggtcgtttaggcggaaggatgcgatgagcgtttggtatatatattttcgcgcgtatatata

SEQ ID NO: 34668 - DNA, 917 bp, Artificial Sequence
  chemically treated genomic DNA (Homo sapiens) CpG-island No: 34668
tatatatacgcgcgaaaatatatataccaaacgctcatcgcatccttccgcctaaacgacctcaaatactcgcgaaaaaaaatcaaaatctcgtcgtacccttatccccgactctttataccgaatccaaaacaacgcgaaatcaactctttaactcacacccccgaccccgaccctaaataaaaacctccgcctccgcctcctccgcaaccgtccgaacccgacttttacccgtctacttccatcccgacgcacgcctccgccgtaccgaacgaccgaaaaactatcaaccgacgcctaaaactcgaaccccgaccgacgactaccgatacgaaaacttactaaaacgaaaaaaaacaacgcgcgacgcaccaaacgaccgcactaacgccgttcctaccccttcccgcgtcgctcccgcctaaaacgcgtcccccgaaataccccgtcccccgaccactcaccaacaccacgaaaccccgcacgacctcaaacacgctctaccgaaactcaaccgccgtaccaaacttactaaaccgtttaataaatttacgcacttcgaccataacaacgacgacgaacgaatctcgacgaacgaacgaacctcgacgaacgaataaactcactaccccgacccgcgacgaccgcgaccgctactactccctctatttactcgccgaccgaccgaccacatcgcaactcgacgacgacgcgactcacgctactcctccctcccacctcccacccgctactcctccctcgttccctccttccctccttttctcgctcgcttcgcccgctcactatcctaccccacgacgtcgacgacgacaactccctcccctaaaaaacccgaactccgatcgccaccaaccgaaacaaaaaaatatatctaataaaaaaaaatatataaaaaa

SEQ ID NO: 34669 - DNA, 503 bp, Artificial Sequence
  chemically treated genomic DNA (Homo sapiens) CpG-island No: 34669
  unsure (470)
tgttttttcgttaagtaataataattcgaggagcgaggcggggaggttcgtgaaacgttatagcgtattgtttaatgggaatcggcgttggtagacgcgcgcgttttgtgtttaattagcgaaggcggttcgaatggtttttttattttgttggttgtgggcggagcggtttgaggaggcggcggtggagtagggggcggtttggttgcgcggtattagcggtgttcgtcgaagggggaggaggcgaggagcgagtcgtgcggttagagcgggaaagagattcgtttttgcgttcgagttttggagtcgtcgtatttcgatttttggggtcgcggtagcggttgcgaggggacgggcgttcgttgttttttgggtttttttcgtagcgattcgcgggatcggaaaaaaaggagaagatggaggaggagggtggtagtagttgcggtgtcgcgttgattagtgcggacggngggtattgaggagagtagttttttattgttaag

SEQ ID NO: 34670 - DNA, 503 bp, Artificial Sequence
  chemically treated genomic DNA (Homo sapiens) CpG-island No: 34670
  unsure (34)
cttaacaataaaaaactactctcctcaatacccnccgtccgcactaatcaacgcgacaccgcaactactaccaccctcctcctccatcttctcctttttttccgatcccgcgaatcgctacgaaaaaaacccaaaaaacaacgaacgcccgtcccctcgcaaccgctaccgcgaccccaaaaatcgaaatacgacgactccaaaactcgaacgcaaaaacgaatctctttcccgctctaaccgcacgactcgctcctcgcctcctcccccttcgacgaacaccgctaataccgcgcaaccaaaccgccccctactccaccgccgcctcctcaaaccgctccgcccacaaccaacaaaataaaaaaaccattcgaaccgccttcgctaattaaacacaaaacgcgcgcgtctaccaacgccgattcccattaaacaatacgctataacgtttcacgaacctccccgcctcgctcctcgaattattattacttaacgaaaaaaca

SEQ ID NO: 34671 - DNA, 503 bp, Artificial Sequence
  chemically treated genomic DNA (Homo sapiens) CpG-island No: 34671
  unsure (34)
tttgatagtgaggaattgttttttttagtatttntcgttcgtattggttaacgcggtatcgtagttgttgttattttttttttttattttttttttttttttcgatttcgcgggtcgttacgaggggaatttaggagatagcggacgttcgttttttcgtagtcgttgtcgcggttttaggagtcggggtgcggcggttttagaattcggacgtaaagacgagtttttttttcgttttggtcgtacggttcgtttttcgtttttttttttttcggcgggtatcgttagtatcgcgtaattaaatcgttttttgttttatcgtcgtttttttaggtcgtttcgtttatagttagtaaggtaagggagttattcgagtcgttttcgttgattggatatagggcgcgcgcgtttgttaacgtcggtttttattgggtagtacgttgtgacgttttacgagttttttcgtttcgtttttcgaattgttgttgtttggcggggaggta

SEQ ID NO: 34672 - DNA, 503 bp, Artificial Sequence
  chemically treated genomic DNA (Homo sapiens) CpG-island No: 34672
  unsure (470)
tacctccccgccaaacaacaacaattcgaaaaacgaaacgaaaaaactcgtaaaacgtcacaacgtactacccaataaaaaccgacgttaacaaacgcgcgcgccctatatccaatcaacgaaaacgactcgaataactcccttaccttactaactataaacgaaacgacctaaaaaaacgacgataaaacaaaaaacgatttaattacgcgatactaacgatacccgccgaaaaaaaaaaaaacgaaaaacgaaccgtacgaccaaaacgaaaaaaaaactcgtctttacgtccgaattctaaaaccgccgcaccccgactcctaaaaccgcgacaacgactacgaaaaaacgaacgtccgctatctcctaaattcccctcgtaacgacccgcgaaatcgaaaaaaaaaaaaaaaataaaaaaaaaaaataacaacaactacgataccgcgttaaccaatacgaacganaaatactaaaaaaaacaattcctcactatcaaa

SEQ ID NO: 34673 - DNA, 844 bp, Artificial Sequence
  chemically treated genomic DNA (Homo sapiens) CpG-island No: 34673
gcgggttttggttagtatatttttttaacgttggttgttcgggttatttttttgcgaagagcgtttttatttgaggcgaaattaaaatttttttttcgcgttcgtttttcgtttttttgttgagagaaatttaaataatttttatggcgtcgaaattttttttatgtcgataagttcgttttgggcgtacgagtggatgtttggttagttttttttgggatcgatttcgtcgtcgtgtttagtttttattacgtttttattttattttacgttttatagtcggggtttttggttagtttcggaagttatcgagaaataggatttcgtgcgttcgagagaatttttttaggggttaaggaatcggttagtcggaggcgcgagaaaagttttgggaaggcggttgtatttaggatgggtggatgttacggggttttcgtttaggttgtttcgttcgtacgggtcgattggttattttggaattttttttgtaggttttagcgtttttcgggaattcgtagttttcgcggagagcgtgggtttttttttatcgttggggcgtagcgtagtgtacgtttgagggtggtcgtcgggggttgggtacgtttttagttttgcgtcgtcgggggttgcggcggtgttgtttattttagagagttttcggtttggggtttcggcgaagtaagtgttttttcggcgtcggtcgttaggggggcgcgggagtagttagatgcgtcgtagcgttgggaaggcggcgaaggataggggttaggggagtgaggggcgttcggtaggtagttttagttttggttttgcgcgggagaagggatagtagagatcgttcgtg

SEQ ID NO: 34674 - DNA, 844 bp, Artificial Sequence
  chemically treated genomic DNA (Homo sapiens) CpG-island No: 34674
cacgaacgatctctactatcccttctcccgcgcaaaaccaaaactaaaactacctaccgaacgcccctcactcccctaacccctatccttcgccgccttcccaacgctacgacgcatctaactactcccgcgcccccctaacgaccgacgccgaaaaaacacttacttcgccgaaaccccaaaccgaaaactctctaaaataaacaacaccgccgcaacccccgacgacgcaaaactaaaaacgtacccaacccccgacgaccaccctcaaacgtacactacgctacgccccaacgataaaaaaaaacccacgctctccgcgaaaactacgaattcccgaaaaacgctaaaacctacaaaaaaaattccaaaataaccaatcgacccgtacgaacgaaacaacctaaacgaaaaccccgtaacatccacccatcctaaatacaaccgccttcccaaaacttttctcgcgcctccgactaaccgattccttaacccctaaaaaaattctctcgaacgcacgaaatcctatttctcgataacttccgaaactaaccaaaaaccccgactataaaacgtaaaataaaataaaaacgtaataaaaactaaacacgacgacgaaatcgatcccaaaaaaaactaaccaaacatccactcgtacgcccaaaacgaacttatcgacataaaaaaaatttcgacgccataaaaattatttaaatttctctcaacaaaaaaacgaaaaacgaacgcgaaaaaaaaattttaatttcgcctcaaataaaaacgctcttcgcaaaaaaataacccgaacaaccaacgttaaaaaaatatactaaccaaaacccgc

SEQ ID NO: 34675 - DNA, 844 bp, Artificial Sequence
  chemically treated genomic DNA (Homo sapiens) CpG-island No: 34675
tacgggcggtttttgttgttttttttttcgcgtagggttagggttgaggttgtttgtcgagcgttttttatttttttagtttttgtttttcgtcgtttttttagcgttgcggcgtatttggttgttttcgcgtttttttggcgatcggcgtcgggaaggtatttgtttcgtcggagttttaggtcgagggttttttggggtgggtagtatcgtcgtagttttcggcggcgtaggattgggggcgtgtttagttttcggcgattatttttaggcgtgtattgcgttgcgttttagcggtagggagaggtttacgtttttcgcggaggttgcgggttttcggggggcgttgggatttgtaaaggggattttaaggtgattagtcgattcgtgcggacgggatagtttggacggaggtttcgtggtatttatttattttaggtgtaatcgtttttttagaatttttttcgcgttttcggttggtcgattttttagtttttggaaaagttttttcgggcgtacggaattttatttttcggtggttttcgaagttggttaggaatttcggttgtgaggcgtggggtgggatggggacgtggtgagggttgagtacggcggcggggtcgattttaggaaaggttggttaagtatttattcgtgcgtttagggcgggtttgtcggtatggaaaggatttcggcgttatgagggttgtttgggttttttttagtaggagggcgggaggcgggcgcgaaggggggattttaatttcgttttaaatgaaaacgtttttcgtaaagaaatagttcgggtagttagcgttggagagatgtgttggttaggattcgt

SEQ ID NO: 34676 - DNA, 844 bp, Artificial Sequence
  chemically treated genomic DNA (Homo sapiens) CpG-island No: 34676
acgaatcctaaccaacacatctctccaacgctaactacccgaactatttctttacgaaaaacgttttcatttaaaacgaaattaaaatccccccttcgcgcccgcctcccgccctcctactaaaaaaaacccaaacaaccctcataacgccgaaatcctttccataccgacaaacccgccctaaacgcacgaataaatacttaaccaacctttcctaaaatcgaccccgccgccgtactcaaccctcaccacgtccccatcccaccccacgcctcacaaccgaaattcctaaccaacttcgaaaaccaccgaaaaataaaattccgtacgcccgaaaaaacttttccaaaaactaaaaaatcgaccaaccgaaaacgcgaaaaaaattctaaaaaaacgattacacctaaaataaataaataccacgaaacctccgtccaaactatcccgtccgcacgaatcgactaatcaccttaaaatcccctttacaaatcccaacgccccccgaaaacccgcaacctccgcgaaaaacgtaaacctctccctaccgctaaaacgcaacgcaatacacgcctaaaaataatcgccgaaaactaaacacgcccccaatcctacgccgccgaaaactacgacgatactacccaccccaaaaaaccctcgacctaaaactccgacgaaacaaataccttcccgacgccgatcgccaaaaaaacgcgaaaacaaccaaatacgccgcaacgctaaaaaaacgacgaaaaacaaaaactaaaaaaataaaaaacgctcgacaaacaacctcaaccctaaccctacgcgaaaaaaaaaacaacaaaaaccgcccgta

SEQ ID NO: 34677 - DNA, 867 bp, Artificial Sequence
  chemically treated genomic DNA (Homo sapiens) CpG-island No: 34677
ggtggaggcgtcgcgtagggacggaggtttattcgtttagatgtggggagattcgcgggaggggatttcgttcggttcggtgagtttcgttgggagagtggtgtgcggcgttggttggtaataggcgtttacggtcgagagagaggtagaggggttgtgttattcgtcgtcgcgtttcgtttttttggcgtatatttggtaggcgttttagcgtttcggtagcggttagttttttttttttcggggtcggttttgtcgcgtgatttttttttcgtcgaggtagtttttattcgtattttcgggcgttcgtgtagtttttatttggtaaataggacggtgtcgtgttttagcgggttgcggtttattgttcgttagttttgtcggattagttcgggtttcgggcgttttatgttgtttcggggacgcggagcgcggggttgggatttttagggttcgggtgtcgttatcgtacgtgtcgcgttatttttttcgcgacgcggtttttttcgtttttcgtacgtttttcgtgttttcgttcggcgggggtcgtagtcgttttttttttggcgcgggagagaaaaggcgcgcggttagtcgtaggtggagatattttagttgtgttttcggggatttcgtttggtcgttgcgttttgcgtttcgtagtcgttagagtcgttttatttcgcgacgtttgggttgggcgttttaaagtcgttacggttttcgttttttttaggttagtaaggcgcgcgtttttttcgttagtcgttatggtggtttgggaaaggttcggtttgtagaacgtaattgatatcgcggaggttttttgggttttagttttttttttcgagtttcgagggtattgtg

SEQ ID NO: 34678 - DNA, 867 bp, Artificial Sequence
  chemically treated genomic DNA (Homo sapiens) CpG-island No: 34678
cacaataccctcgaaactcgaaaaaaaaaactaaaacccaaaaaacctccgcgatatcaattacgttctacaaaccgaacctttcccaaaccaccataacgactaacgaaaaaaacgcgcgccttactaacctaaaaaaaacgaaaaccgtaacgactttaaaacgcccaacccaaacgtcgcgaaataaaacgactctaacgactacgaaacgcaaaacgcaacgaccaaacgaaatccccgaaaacacaactaaaatatctccacctacgactaaccgcgcgccttttctctcccgcgccaaaaaaaaaacgactacgacccccgccgaacgaaaacacgaaaaacgtacgaaaaacgaaaaaaaccgcgtcgcgaaaaaaataacgcgacacgtacgataacgacacccgaaccctaaaaatcccaaccccgcgctccgcgtccccgaaacaacataaaacgcccgaaacccgaactaatccgacaaaactaacgaacaataaaccgcaacccgctaaaacacgacaccgtcctatttaccaaataaaaactacacgaacgcccgaaaatacgaataaaaactacctcgacgaaaaaaaaatcacgcgacaaaaccgaccccgaaaaaaaaaaaactaaccgctaccgaaacgctaaaacgcctaccaaatatacgccaaaaaaacgaaacgcgacgacgaataacacaacccctctacctctctctcgaccgtaaacgcctattaccaaccaacgccgcacaccactctcccaacgaaactcaccgaaccgaacgaaatcccctcccgcgaatctccccacatctaaacgaataaacctccgtccctacgcgacgcctccacc

SEQ ID NO: 34679 - DNA, 867 bp, Artificial Sequence
  chemically treated genomic DNA (Homo sapiens) CpG-island No: 34679
tatagtgttttcggggttcgggaggagaaattgaggtttagagagttttcgcgatgttagttacgttttgtaggtcgggttttttttaggttattatagcggttggcggagggagcgcgcgttttgttggtttggagggggcgggggtcgtggcggttttaaagcgtttagtttaggcgtcgcggggtggggcggttttggcggttgcggggcgtagggcgtagcggttaagcggggttttcggaagtatagttggggtgtttttatttacgattggtcgcgcgttttttttttttcgcgttagggaaggagcggttgcggttttcgtcgggcggaggtacggggggcgtacgaggggcggaggggatcgcgtcgcggaggagatggcgcggtacgtgcggtgacggtattcgagttttgagggttttagtttcgcgtttcgcgttttcgggatagtatggagcgttcggagttcgagttgattcggtagagttggcgggtagtgagtcgtagttcgttggagtacggtatcgttttgtttgttaggtgagggttatacgagcgttcggggatgcgggtggaggttgtttcggcgggaaaggggttacgcggtaggatcggtttcgaaggagggaaaattggtcgttgtcggggcgttggggcgtttgttagatgtgcgttagaggagcggggcgcggcgacgggtggtatagtttttttgtttttttttcgatcgtgggcgtttgttgttaattagcgtcgtatattatttttttagcggggtttatcgggtcgggcgggattttttttcgcggatttttttatatttgggcgggtggattttcgtttttgcgcggcgtttttatt

SEQ ID NO: 34680 - DNA, 867 bp, Artificial Sequence
  chemically treated genomic DNA (Homo sapiens) CpG-island No: 34680
aataaaaacgccgcgcaaaaacgaaaatccacccgcccaaatataaaaaaatccgcgaaaaaaaatcccgcccgacccgataaaccccgctaaaaaaataatatacgacgctaattaacaacaaacgcccacgatcgaaaaaaaaacaaaaaaactataccacccgtcgccgcgccccgctcctctaacgcacatctaacaaacgccccaacgccccgacaacgaccaattttccctccttcgaaaccgatcctaccgcgtaacccctttcccgccgaaacaacctccacccgcatccccgaacgctcgtataaccctcacctaacaaacaaaacgataccgtactccaacgaactacgactcactacccgccaactctaccgaatcaactcgaactccgaacgctccatactatcccgaaaacgcgaaacgcgaaactaaaaccctcaaaactcgaataccgtcaccgcacgtaccgcgccatctcctccgcgacgcgatcccctccgcccctcgtacgccccccgtacctccgcccgacgaaaaccgcaaccgctccttccctaacgcgaaaaaaaaaaaacgcgcgaccaatcgtaaataaaaacaccccaactatacttccgaaaaccccgcttaaccgctacgccctacgccccgcaaccgccaaaaccgccccaccccgcgacgcctaaactaaacgctttaaaaccgccacgacccccgccccctccaaaccaacaaaacgcgcgctccctccgccaaccgctataataacctaaaaaaaacccgacctacaaaacgtaactaacatcgcgaaaactctctaaacctcaatttctcctcccgaaccccgaaaacactata

SEQ ID NO: 34681 - DNA, 732 bp, Artificial Sequence
  chemically treated genomic DNA (Homo sapiens) CpG-island No: 34681
  unsure (228, 326, 390, 510, 654)
ttggttttcgtattttttttgacgttaaatttttattagggttgtaacgttacgttgttttggatgtttgcgtgagtggagtcgcgattcggggttcgcgttttgagagacgcgttttttttcgtttttcgttttcggatcgtaggggtcgaagtcgtttatttttggtttcgcgggtagcggggtcgtggcgttcggacggtttgggattcgggttcgtcgcgcggnaatcggaataagaagggagagcgttcggttcggttttcggtttttatcgcggttcggaaagaattcggcgagtttttcgcggaggtgagtgtcgcggnttgggggcggggcgcggtcggggcgacgcgcggggcgggtttgttcgtcgggcgttcgggtttnttttttcgagggacgttaggatcgttcgttgggttttcgcggtcgtttcgtaggttttcggtttttttttatttcgcgtttttttttgtttttgttgcgtgagaggtgtcggcggttttnggtcgggatcgaggtggcggggcgagggaaggaggtggggcgtaggttgtattgcgtttttgttcggggttttgggttagaggggtcggcggacgaggtttcgggttcgggtttggggagggggcggtttgcggggtcggattngagggtcgggaattcgcggagttttgtttttgggtatttgtggggtcgagatttcgagttatttgtttatatattttt

SEQ ID NO: 34682 - DNA, 732 bp, Artificial Sequence
  chemically treated genomic DNA (Homo sapiens) CpG-island No: 34682
  unsure (79, 223, 343, 407, 505)
aaaaatatataaacaaataactcgaaatctcgaccccacaaatacccaaaaacaaaactccgcgaattcccgaccctcnaatccgaccccgcaaaccgccccctccccaaacccgaacccgaaacctcgtccgccgacccctctaacccaaaaccccgaacaaaaacgcaatacaacctacgccccacctccttccctcgccccgccacctcgatcccgaccnaaaaccgccgacacctctcacgcaacaaaaacaaaaaaaaacgcgaaataaaaaaaaaccgaaaacctacgaaacgaccgcgaaaacccaacgaacgatcctaacgtccctcgaaaaaanaaacccgaacgcccgacgaacaaacccgccccgcgcgtcgccccgaccgcgccccgcccccaanccgcgacactcacctccgcgaaaaactcgccgaattctttccgaaccgcgataaaaaccgaaaaccgaaccgaacgctctcccttcttattccgattnccgcgcgacgaacccgaatcccaaaccgtccgaacgccacgaccccgctacccgcgaaaccaaaaataaacgacttcgacccctacgatccgaaaacgaaaaacgaaaaaaaacgcgtctctcaaaacgcgaaccccgaatcgcgactccactcacgcaaacatccaaaacaacgtaacgttacaaccctaataaaaatttaacgtcaaaaaaaatacgaaaaccaa

SEQ ID NO: 34683 - DNA, 732 bp, Artificial Sequence
  chemically treated genomic DNA (Homo sapiens) CpG-island No: 34683
  unsure (79, 223, 343, 407, 505)
gggggtgtgtggataggtggttcgggatttcggttttataggtgtttaggggtaagatttcgcgggttttcggtttttnaattcgatttcgtagatcgttttttttttaagttcggattcgaggtttcgttcgtcggtttttttgatttagggtttcggatagaagcgtaatgtagtttgcgttttatttttttttttcgtttcgttatttcgatttcggttnggagtcgtcgatattttttacgtagtaggggtagaaagggacgcggggtggggggaagtcgaggatttgcgaggcggtcgcgggagtttagcgagcggttttggcgtttttcgggaaganaagttcgggcgttcggcgagtaggttcgtttcgcgcgtcgtttcggtcgcgtttcgtttttagntcgcggtatttattttcgcgagaggttcgtcggatttttttcgggtcgcggtggagatcgaggatcgagtcgggcgttttttttttttatttcggttntcgcgcggcgggttcgaattttagatcgttcgagcgttacggtttcgttgttcgcggagttagaaataggcgatttcggtttttgcggttcggaggcgagaagcgggggggagcgcgttttttaggacgcgggtttcgagtcgcgattttatttacgtaggtatttaaggtaacgtggcgttgtaattttgatggaggtttgacgttagggaaggtgcgaaaattag

SEQ ID NO: 34684 - DNA, 732 bp, Artificial Sequence
  chemically treated genomic DNA (Homo sapiens) CpG-island No: 34684
  unsure (228, 326, 390, 510, 654)
ctaattttcgcaccttccctaacgtcaaacctccatcaaaattacaacgccacgttaccttaaatacctacgtaaataaaatcgcgactcgaaacccgcgtcctaaaaaacgcgctcccccccgcttctcgcctccgaaccgcaaaaaccgaaatcgcctatttctaactccgcgaacaacgaaaccgtaacgctcgaacgatctaaaattcgaacccgccgcgcganaaccgaaataaaaaaaaaaaacgcccgactcgatcctcgatctccaccgcgacccgaaaaaaatccgacgaacctctcgcgaaaataaataccgcganctaaaaacgaaacgcgaccgaaacgacgcgcgaaacgaacctactcgccgaacgcccgaacttntcttcccgaaaaacgccaaaaccgctcgctaaactcccgcgaccgcctcgcaaatcctcgacttccccccaccccgcgtccctttctacccctactacgtaaaaaatatcgacgactccnaaccgaaatcgaaataacgaaacgaaaaaaaaaaataaaacgcaaactacattacgcttctatccgaaaccctaaatcaaaaaaaccgacgaacgaaacctcgaatccgaacttaaaaaaaaaacgatctacgaaatcgaattnaaaaaccgaaaacccgcgaaatcttacccctaaacacctataaaaccgaaatcccgaaccacctatccacacaccccc

SEQ ID NO: 34685 - DNA, 509 bp, Artificial Sequence
  chemically treated genomic DNA (Homo sapiens) CpG-island No: 34685
  unsure (61, 66, 69, 205, 221..222, 230)
gacgttcggtttcgaggttggggttattttcggcggaattgcgggtttaagttgttttttntcgtnttncgggttgggtcgattttagtttcgttttttggtcggttgacggaaattgtcgataaatttgtcgaatgtaaggattttagttttttcgggtttttcgttttttaggttcggttgatagagttagtcgaggtcgttnatattgaataagcgannttcggttnttttagggggtcgtcgtggtttagatagtttagtagaatagttttcgcggtttcggggagaaggtgaggttttgtatggatgggaagggtgaggtgcgtcggttagaggtttatttattgacgggattgttttttttggtttacgcgacgtagttttttgttgtttttgattaggcgtcgtttttcgtttcgtcgtttcggaagtttttgagagtcggtagatgggggtttttagttacggtttttggtttgatgaagtagaaaagaagatgaggatta

SEQ ID NO: 34686 - DNA, 509 bp, Artificial Sequence
  chemically treated genomic DNA (Homo sapiens) CpG-island No: 34686
  unsure (280, 288..289, 305, 441, 444, 449)
taatcctcatcttcttttctacttcatcaaaccaaaaaccgtaactaaaaacccccatctaccgactctcaaaaacttccgaaacgacgaaacgaaaaacgacgcctaatcaaaaacaacaaaaaactacgtcgcgtaaaccaaaaaaaacaatcccgtcaataaataaacctctaaccgacgcacctcacccttcccatccatacaaaacctcaccttctccccgaaaccgcgaaaactattctactaaactatctaaaccacgacgaccccctaaaanaaccgaanntcgcttattcaatatnaacgacctcgactaactctatcaaccgaacctaaaaaacgaaaaacccgaaaaaactaaaatccttacattcgacaaatttatcgacaatttccgtcaaccgaccaaaaaacgaaactaaaatcgacccaacccgnaanacganaaaaaacaacttaaacccgcaattccgccgaaaataaccccaacctcgaaaccgaacgtc

SEQ ID NO: 34687 - DNA, 509 bp, Artificial Sequence
  chemically treated genomic DNA (Homo sapiens) CpG-island No: 34687
  unsure (280, 288..289, 305, 441, 444, 449)
tgatttttatttttttttttgttttattagattagagatcgtggttaaaagtttttatttgtcggtttttaggggttttcgaggcggcggggcgggaggcggcgtttagttaaggataatagaagattacgtcgcgtgggttaaaggaaatagtttcgttaataaataagtttttggtcgacgtattttattttttttatttatataagattttatttttttttcggagtcgcggaggttgttttgttaaattgtttggattacgacgattttttagganggtcgggnntcgtttatttaatatnggcggtttcggttaattttgttagtcgggtttggagaacggaaagttcggagggattagaatttttgtattcgataagtttgtcggtaattttcgttagtcgattagagggcggagttgaggtcggtttagttcgngangcggngaaggataatttggattcgtagtttcgtcggaagtggttttagtttcgaggtcgggcgtt

SEQ ID NO: 34688 - DNA, 509 bp, Artificial Sequence
  chemically treated genomic DNA (Homo sapiens) CpG-island No: 34688
  unsure (61, 66, 69, 205, 221..222, 230)
aacgcccgacctcgaaactaaaaccacttccgacgaaactacgaatccaaattatccttcnccgcntcncgaactaaaccgacctcaactccgccctctaatcgactaacgaaaattaccgacaaacttatcgaatacaaaaattctaatccctccgaactttccgttctccaaacccgactaacaaaattaaccgaaaccgccnatattaaataaacganncccgaccntcctaaaaaatcgtcgtaatccaaacaatttaacaaaacaacctccgcgactccgaaaaaaaaataaaatcttatataaataaaaaaaataaaatacgtcgaccaaaaacttatttattaacgaaactatttcctttaacccacgcgacgtaatcttctattatccttaactaaacgccgcctcccgccccgccgcctcgaaaacccctaaaaaccgacaaataaaaacttttaaccacgatctctaatctaataaaacaaaaaaaaaaataaaaatca

SEQ ID NO: 34689 - DNA, 519 bp, Artificial Sequence
  chemically treated genomic DNA (Homo sapiens) CpG-island No: 34689
gtttggcgaaatcggttggatagtgatattgatgatgcgacgttttagggcggggatttttttattttatttatgttttataggatttgtttaaatcgggtttcgttattttgcgatgttacgtttattcggaaacgcgtgtatacgttggtgatcgcgggtatttatatagtagggggaggggggaagtttttttattatttgttatttagaggatttgttagtaattcgtttacgttgtcgcggatttaacggtttgtcgtttgcgttaattttacgtttggcgatttttgtttagtattgtttattttcgtggggtacgcgtatataggggggtgcggggcgggtatattagtgagagtgtggatcgtagtagaatgtttgagggggggtggcgattgtatgaaattggtggttatcgacgggtatcgatagaagaggtacgtgagggttgtttgtgcgggcgtgggagattagataatagtaagaaatattagttagggggatggggtggttttg

SEQ ID NO: 34690 - DNA, 519 bp, Artificial Sequence
  chemically treated genomic DNA (Homo sapiens) CpG-island No: 34690
caaaaccaccccatccccctaactaatatttcttactattatctaatctcccacgcccgcacaaacaaccctcacgtacctcttctatcgatacccgtcgataaccaccaatttcatacaatcgccaccccccctcaaacattctactacgatccacactctcactaatatacccgccccgcacccccctatatacgcgtaccccacgaaaataaacaatactaaacaaaaatcgccaaacgtaaaattaacgcaaacgacaaaccgttaaatccgcgacaacgtaaacgaattactaacaaatcctctaaataacaaataataaaaaaacttcccccctccccctactatataaatacccgcgatcaccaacgtatacacgcgtttccgaataaacgtaacatcgcaaaataacgaaacccgatttaaacaaatcctataaaacataaataaaataaaaaaatccccgccctaaaacgtcgcatcatcaatatcactatccaaccgatttcgccaaac

SEQ ID NO: 34691 - DNA, 519 bp, Artificial Sequence
  chemically treated genomic DNA (Homo sapiens) CpG-island No: 34691
taaggttattttatttttttaattggtgttttttattattgtttgattttttacgttcgtataggtaatttttacgtgttttttttgtcggtattcgtcggtaattattagttttatgtaatcgttatttttttttaagtattttattgcggtttatatttttattggtgtgttcgtttcgtatttttttatgtacgcgtgttttacgagggtaagtaatattggataagagtcgttaagcgtggagttggcgtaggcggtaaatcgttagattcgcggtagcgtaggcgggttattagtaaattttttaagtgataggtggtgaaggaattttttttttttttttattatgtgaatattcgcggttattaacgtatgtacgcgttttcgggtaggcgtaatatcgtagggtggcgaagttcggtttaagtaaattttgtaagatataggtgaagtggaagggttttcgttttgggacgtcgtattattaatgttattatttagtcggtttcgttaagt

SEQ ID NO: 34692 - DNA, 519 bp, Artificial Sequence
  chemically treated genomic DNA (Homo sapiens) CpG-island No: 34692
acttaacgaaaccgactaaataataacattaataatacgacgtcccaaaacgaaaacccttccacttcacctatatcttacaaaatttacttaaaccgaacttcgccaccctacgatattacgcctacccgaaaacgcgtacatacgttaataaccgcgaatattcacataataaaaaaaaaaaaaaaattccttcaccacctatcacttaaaaaatttactaataacccgcctacgctaccgcgaatctaacgatttaccgcctacgccaactccacgcttaacgactcttatccaatattacttaccctcgtaaaacacgcgtacataaaaaaatacgaaacgaacacaccaataaaaatataaaccgcaataaaatacttaaaaaaaaataacgattacataaaactaataattaccgacgaataccgacaaaaaaaacacgtaaaaattacctatacgaacgtaaaaaatcaaacaataataaaaaacaccaattaaaaaaataaaataacctta

SEQ ID NO: 34693 - DNA, 527 bp, Artificial Sequence
  chemically treated genomic DNA (Homo sapiens) CpG-island No: 34693
ttgtttttgtttatatatattcgtaatttcgttacggtcgtggtcgttgtttaatttttgtattcgtagtgtttataattacggtcgcggtggtttttttttatttgtgataatgtttatatattttttcgttttcgtttttgcgcggtttttattatattagtatttattatcgtttttttaattttcgtttatttatatcgttagttatatgtattgttttcgcgtttttggttatagttttattgttttaatcgttgtcgtcgttatcgttattagtgtaattgttagttttttttcgttttttttattttttatattttgttggttacgtttattttataattattatcgtcgcggtcgtggattttttttttattacgtgttatcgtacggtttattgttacggtttttttgttacgttcgcgattattatttatttatttttttttttagtattatttcggttattttttgtatcgttttgtatttttagtggttttatttaaatgagtcgttattgtttg

SEQ ID NO: 34694 - DNA, 527 bp, Artificial Sequence
  chemically treated genomic DNA (Homo sapiens) CpG-island No: 34694
caaacaataacgactcatttaaataaaaccactaaaaatacaaaacgatacaaaaaataaccgaaataatactaaaaaaaaaaataaataaataataatcgcgaacgtaacaaaaaaaccgtaacaataaaccgtacgataacacgtaataaaaaaaaaatccacgaccgcgacgataataattataaaataaacgtaaccaacaaaatataaaaaataaaaaaaacgaaaaaaaactaacaattacactaataacgataacgacgacaacgattaaaacaataaaactataaccaaaaacgcgaaaacaatacatataactaacgatataaataaacgaaaattaaaaaaacgataataaatactaatataataaaaaccgcgcaaaaacgaaaacgaaaaaatatataaacattatcacaaataaaaaaaaaccaccgcgaccgtaattataaacactacgaatacaaaaattaaacaacgaccacgaccgtaacgaaattacgaatatatataaacaaaaacaa

SEQ ID NO: 34695 - DNA, 527 bp, Artificial Sequence
  chemically treated genomic DNA (Homo sapiens) CpG-island No: 34695
taagtagtagcgatttatttaggtgagattattagggatataagacggtgtagagagtggtcggggtggtgttgaggaagagggtggatgagtagtggtcgcgagcgtggtaagaggatcgtgatagtgggtcgtacggtaatacgtagtagaggaagagtttacgatcgcgacggtagtgattgtggagtagacgtgattagtagggtataagaagtgagggagacgagagagagttggtaattgtattagtagcggtagcggcgataacggttgaagtagtagaattgtggttaggagcgcggagatagtgtatgtgattagcgatgtagataagcgagggttggaggagcggtggtagatattaatgtggtaaagatcgcgtagagacggagacgggagagtatgtggatattattataagtagggaagaattatcgcggtcgtgattgtggatattgcgaatgtagagattgagtaacgattacgatcgtgacgaagttgcggatgtatgtggatagggataa

SEQ ID NO: 34696 - DNA, 527 bp, Artificial Sequence
  chemically treated genomic DNA (Homo sapiens) CpG-island No: 34696
ttatccctatccacatacatccgcaacttcgtcacgatcgtaatcgttactcaatctctacattcgcaatatccacaatcacgaccgcgataattcttccctacttataataatatccacatactctcccgtctccgtctctacgcgatctttaccacattaatatctaccaccgctcctccaaccctcgcttatctacatcgctaatcacatacactatctccgcgctcctaaccacaattctactacttcaaccgttatcgccgctaccgctactaatacaattaccaactctctctcgtctccctcacttcttataccctactaatcacgtctactccacaatcactaccgtcgcgatcgtaaactcttcctctactacgtattaccgtacgacccactatcacgatcctcttaccacgctcgcgaccactactcatccaccctcttcctcaacaccaccccgaccactctctacaccgtcttatatccctaataatctcacctaaataaatcgctactactta

SEQ ID NO: 34697 - DNA, 648 bp, Artificial Sequence
  chemically treated genomic DNA (Homo sapiens) CpG-island No: 34697
gggataggcggatgggtagaggggtcgtagtggcggggtgaatttcgggtatatttcgggatgtatattttgggggaaataacgtaggagttttgtggatgtgttcggtgggtcgggggggatcgagagattcgatgtgatggtaagggggttaatatgtgcggggttgggtggatggtgggtacggcgcgtggtttgtgcgaacggcggggagaaagtggatagtttgataggtggtacgacggaggttgcggaagcggtcgttatgggtggtatagagcgggggggggataggaggataggaaaggggattttggggcgtaacggagcgataaatatggggcggcgtgagtggagttgggtgttagagtcggggcgagtatggtgatgtacgaggatgcggggattgggatggggtagtggacgcgagatgataagttgtgtaaggggattaaaagattgggacgtgtttggaggggggattatcgcgttacggggggttcgggtaaatagtgaataattattcggatagggaagtagtggttgtagtcgcggtgtaaatcgtaaatattggggtttggggaacgttagttgttattttgcggatttgattagttatcgaattaataattgggcgttcggatttaa

SEQ ID NO: 34698 - DNA, 648 bp, Artificial Sequence
  chemically treated genomic DNA (Homo sapiens) CpG-island No: 34698
ttaaatccgaacgcccaattattaattcgataactaatcaaatccgcaaaataacaactaacgttccccaaaccccaatatttacgatttacaccgcgactacaaccactacttccctatccgaataattattcactatttacccgaaccccccgtaacgcgataatcccccctccaaacacgtcccaatcttttaatccccttacacaacttatcatctcgcgtccactaccccatcccaatccccgcatcctcgtacatcaccatactcgccccgactctaacacccaactccactcacgccgccccatatttatcgctccgttacgccccaaaatcccctttcctatcctcctatcccccccccgctctataccacccataacgaccgcttccgcaacctccgtcgtaccacctatcaaactatccactttctccccgccgttcgcacaaaccacgcgccgtacccaccatccacccaaccccgcacatattaacccccttaccatcacatcgaatctctcgatcccccccgacccaccgaacacatccacaaaactcctacgttatttcccccaaaatatacatcccgaaatatacccgaaattcaccccgccactacgacccctctacccatccgcctatccc

SEQ ID NO: 34699 - DNA, 648 bp, Artificial Sequence
  chemically treated genomic DNA (Homo sapiens) CpG-island No: 34699
ttggattcgaacgtttaattattaattcggtggttagttaaattcgtaaagtagtaattagcgttttttaagttttaatatttgcggtttgtatcgcggttatagttattgtttttttgttcgggtggttgtttattgtttattcgggtttttcgtggcgcggtagttttttttttaggtacgttttaattttttagtttttttgtataatttattatttcgcgtttattattttattttagttttcgtattttcgtatattattatattcgtttcggttttggtatttagttttatttacgtcgttttatatttgtcgtttcgttgcgttttagggtttttttttttatttttttatttttttttcgttttatattatttatagcggtcgttttcgtaattttcgtcgtgttatttattaaattatttatttttttttcgtcgttcgtataaattacgcgtcgtgtttattatttatttagtttcgtatatattaatttttttattattatatcgggtttttcggtttttttcggtttatcgggtatatttataaaatttttgcgttattttttttagggtatgtatttcggaatatattcggggtttatttcgttattacgatttttttatttattcgtttatttt

SEQ ID NO: 34700 - DNA, 648 bp, Artificial Sequence
  chemically treated genomic DNA (Homo sapiens) CpG-island No: 34700
aaaataaacgaataaataaaaaaatcgtaataacgaaataaaccccgaatatattccgaaatacataccctaaaaaaaataacgcaaaaattttataaatatacccgataaaccgaaaaaaaccgaaaaacccgatataataataaaaaaattaatatatacgaaactaaataaataataaacacgacgcgtaatttatacgaacgacgaaaaaaaaataaataatttaataaataacacgacgaaaattacgaaaacgaccgctataaataatataaaacgaaaaaaaaataaaaaaataaaaaaaaaaaccctaaaacgcaacgaaacgacaaatataaaacgacgtaaataaaactaaataccaaaaccgaaacgaatataataatatacgaaaatacgaaaactaaaataaaataataaacgcgaaataataaattatacaaaaaaactaaaaaattaaaacgtacctaaaaaaaaaactaccgcgccacgaaaaacccgaataaacaataaacaaccacccgaacaaaaaaacaataactataaccgcgatacaaaccgcaaatattaaaacttaaaaaacgctaattactactttacgaatttaactaaccaccgaattaataattaaacgttcgaatccaa

SEQ ID NO: 34701 - DNA, 550 bp, Artificial Sequence
  chemically treated genomic DNA (Homo sapiens) CpG-island No: 34701
cgattttgggtataaggggaggcgttggtgtagtggggtcgcgaggcggcgttgtgagttatgttgtaagaagatgtagttttattttttgttttataggttcgttgagttcgtcggtatttcgtcggttgggcggcggtataatatatgcgagttataagttatgttttggcggcgggagattgtttattcgggggtattgttagcgttatgtgttttcgagtttggaatgcgtaggagggtatacgaggatggtttatatggacgacgtcggtaggtttttcgagatgttatgtgacgtcggttcggcgcggtcgggatggtatacgtgggtattttatgggaaatttaattaaggggaagtgtaatgggggtagacgcggggattgattgtttacggtcgggtgtggggtatacgtgggaagtttatgtagttatgcggtgggatacgtcggtgtttatgggatatacgtgcgaggtttatgcgtagattatattatgatcgtacgagattttcggtcggggagtcgagacgtattatattttttta

SEQ ID NO: 34702 - DNA, 550 bp, Artificial Sequence
  chemically treated genomic DNA (Homo sapiens) CpG-island No: 34702
taaaaaaatataatacgtctcgactccccgaccgaaaatctcgtacgatcataatataatctacgcataaacctcgcacgtatatcccataaacaccgacgtatcccaccgcataactacataaacttcccacgtataccccacacccgaccgtaaacaatcaatccccgcgtctacccccattacacttccccttaattaaatttcccataaaatacccacgtataccatcccgaccgcgccgaaccgacgtcacataacatctcgaaaaacctaccgacgtcgtccatataaaccatcctcgtataccctcctacgcattccaaactcgaaaacacataacgctaacaatacccccgaataaacaatctcccgccgccaaaacataacttataactcgcatatattataccgccgcccaaccgacgaaataccgacgaactcaacgaacctataaaacaaaaaataaaactacatcttcttacaacataactcacaacgccgcctcgcgaccccactacaccaacgcctccccttatacccaaaatcg

SEQ ID NO: 34703 - DNA, 550 bp, Artificial Sequence
  chemically treated genomic DNA (Homo sapiens) CpG-island No: 34703
taaggaggtatgatgcgtttcgatttttcggtcggagatttcgtgcggttatgatgtaatttacgtataaatttcgtacgtgtattttataaatatcgacgtgttttatcgtatggttgtataaattttttacgtgtattttatattcggtcgtaggtagttaattttcgcgtttgtttttattgtatttttttttaattaggttttttataaagtatttacgtgtattatttcggtcgcgtcgggtcgacgttatatggtatttcgaaaaatttatcgacgtcgtttatataaattattttcgtgtatttttttgcgtattttaagttcggagatatatggcgttggtaatattttcgggtgaataatttttcgtcgttagagtataatttatagttcgtatgtattgtatcgtcgtttagtcggcgaggtatcgacgagtttagcgaatttgtgaagtagaagatagagttatatttttttatagtataatttatagcgtcgtttcgcggttttattatattagcgtttttttttgtgtttaaaatcg

SEQ ID NO: 34704 - DNA, 550 bp, Artificial Sequence
  chemically treated genomic DNA (Homo sapiens) CpG-island No: 34704
cgattttaaacacaaaaaaaaacgctaatataataaaaccgcgaaacgacgctataaattatactataaaaaaatataactctatcttctacttcacaaattcgctaaactcgtcgatacctcgccgactaaacgacgatacaatacatacgaactataaattatactctaacgacgaaaaattattcacccgaaaatattaccaacgccatatatctccgaacttaaaatacgcaaaaaaatacacgaaaataatttatataaacgacgtcgataaatttttcgaaataccatataacgtcgacccgacgcgaccgaaataatacacgtaaatactttataaaaaacctaattaaaaaaaaatacaataaaaacaaacgcgaaaattaactacctacgaccgaatataaaatacacgtaaaaaatttatacaaccatacgataaaacacgtcgatatttataaaatacacgtacgaaatttatacgtaaattacatcataaccgcacgaaatctccgaccgaaaaatcgaaacgcatcatacctcctta

SEQ ID NO: 34705 - DNA, 550 bp, Artificial Sequence
  chemically treated genomic DNA (Homo sapiens) CpG-island No: 34705
  unsure (132)
ttcgtacggtatcgtttttttcgtggttcgtcggtttttttttattagggtttaagttttagtggttggttttttggtttggcgttcgtcgtgttcgtcgattggaacggtgttgtttataaatattgttanaggtcggtggtggtgtgtggggggtagtgtcggtttggggggttgtggggttgggtggtggtgtggggggtggggtgtgttgaggggagttgttgtacgaatgtgatatggggggcgatcgagacgatgacggcggtggggagtaatatcgtcggttatttatggttttttatgatgttgaaatagcgcgagggtaagatcgaagagcgggcgagggtgaaagggtgataaaaggtatgggaggaagacgagaagggagaatatgattagaaaaacggagtgaggggtggaggtcggatcgtcgtgtgggatgcggaggcggggacggagtcgagggcggtaattaatggggaacgcggcgaaacgttaatatgaggtcgagaagaatgatgacgattaattttaggcgaaaggtaaa

SEQ ID NO: 34706 - DNA, 550 bp, Artificial Sequence
  chemically treated genomic DNA (Homo sapiens) CpG-island No: 34706
  unsure (419)
tttacctttcgcctaaaattaatcgtcatcattcttctcgacctcatattaacgtttcgccgcgttccccattaattaccgccctcgactccgtccccgcctccgcatcccacacgacgatccgacctccacccctcactccgtttttctaatcatattctcccttctcgtcttcctcccataccttttatcaccctttcaccctcgcccgctcttcgatcttaccctcgcgctatttcaacatcataaaaaaccataaataaccgacgatattactccccaccgccgtcatcgtctcgatcgccccccatatcacattcgtacaacaactcccctcaacacaccccaccccccacaccaccacccaaccccacaaccccccaaaccgacactaccccccacacaccaccaccgacctntaacaatatttataaacaacaccgttccaatcgacgaacacgacgaacgccaaaccaaaaaaccaaccactaaaacttaaaccctaataaaaaaaaaccgacgaaccacgaaaaaaacgataccgtacgaa

SEQ ID NO: 34707 - DNA, 550 bp, Artificial Sequence
  chemically treated genomic DNA (Homo sapiens) CpG-island No: 34707
  unsure (419)
tttatttttcgtttggaattaatcgttattatttttttcggttttatattaacgtttcgtcgcgttttttattagttatcgttttcggtttcgttttcgttttcgtattttatacggcggttcggtttttattttttatttcgtttttttggttatgtttttttttttcgttttttttttatattttttgttatttttttattttcgttcgtttttcgattttattttcgcgttgttttaatattataggaaattataagtagtcgacggtgttgttttttatcgtcgttatcgtttcggtcgttttttatattatattcgtataataattttttttaatatattttattttttatattattatttaattttataattttttaaatcgatattattttttatatattattatcgatttntgataatgtttatggataatatcgttttagtcgacggatacggcgagcgttaagttaaagaattagttattggggtttaaattttggtaaaagaggatcggcgagttacgaagaggacggtgtcgtgcgga

SEQ ID NO: 34708 - DNA, 550 bp, Artificial Sequence
  chemically treated genomic DNA (Homo sapiens) CpG-island No: 34708
  unsure (132)
tccgcacgacaccgtcctcttcgtaactcgccgatcctcttttaccaaaatttaaaccccaataactaattctttaacttaacgctcgccgtatccgtcgactaaaacgatattatccataaacattatcanaaatcgataataatatataaaaaataatatcgatttaaaaaattataaaattaaataataatataaaaaataaaatatattaaaaaaaattattatacgaatataatataaaaaacgaccgaaacgataacgacgataaaaaacaacaccgtcgactacttataatttcctataatattaaaacaacgcgaaaataaaatcgaaaaacgaacgaaaataaaaaaataacaaaaaatataaaaaaaaaacgaaaaaaaaaaacataaccaaaaaaacgaaataaaaaataaaaaccgaaccgccgtataaaatacgaaaacgaaaacgaaaccgaaaacgataactaataaaaaacgcgacgaaacgttaatataaaaccgaaaaaaataataacgattaattccaaacgaaaaataaa

SEQ ID NO: 34709 - DNA, 656 bp, Artificial Sequence
  chemically treated genomic DNA (Homo sapiens) CpG-island No: 34709
gcgaggataaaagaacgcgtatataacgggcgagcgtggtgaaaagttggcgggtataaggcgcgtaggtagtcggtggtattgtgtagagattataggaacggtcgaagcgttgttcgcgaatacggtttgtcgggttagaaataaaaaaggagggaagttagtggtaggatcgcgtaagggaagatttgtagcgggacggaacgggggcgtagagtggcgtttgtatttgggtagcggttgtttgcgaggacgtgcgtatgagtgggacgaggcgcgggggtggggtagcggtaacgtatatgtaaaaagtaaataatggtacgcggcgacgtgaatttgaaggttggttattgcggtgttaatcgcgggtgtaaatatatagaaacgttgttagttcggatcgcgaggtgaaaggcggggataagtaaacggtattaggcgcggagtttaatacgatcgggagatttatatcgatatgcggcgcgaagaacgagagcgaaaatcggtggtattaaagtgcgggggggaggattgacgtgcggaggggattttgcgtgcgtaaacggtgtacgggggtgaatatattgttagtaagttatttcgtatatttcgaattatatttattagaggtgggcggtgtggtatttttatag

SEQ ID NO: 34710 - DNA, 656 bp, Artificial Sequence
  chemically treated genomic DNA (Homo sapiens) CpG-island No: 34710
ctataaaaataccacaccgcccacctctaataaatataattcgaaatatacgaaataacttactaacaatatattcacccccgtacaccgtttacgcacgcaaaatcccctccgcacgtcaatcctcccccccgcactttaataccaccgattttcgctctcgttcttcgcgccgcatatcgatataaatctcccgatcgtattaaactccgcgcctaataccgtttacttatccccgcctttcacctcgcgatccgaactaacaacgtttctatatatttacacccgcgattaacaccgcaataaccaaccttcaaattcacgtcgccgcgtaccattatttactttttacatatacgttaccgctaccccacccccgcgcctcgtcccactcatacgcacgtcctcgcaaacaaccgctacccaaatacaaacgccactctacgcccccgttccgtcccgctacaaatcttcccttacgcgatcctaccactaacttccctccttttttatttctaacccgacaaaccgtattcgcgaacaacgcttcgaccgttcctataatctctacacaataccaccgactacctacgcgccttatacccgccaacttttcaccacgctcgcccgttatatacgcgttcttttatcctcgc

SEQ ID NO: 34711 - DNA, 656 bp, Artificial Sequence
  chemically treated genomic DNA (Homo sapiens) CpG-island No: 34711
ttgtgggggtattatatcgtttatttttggtgggtgtaattcgaggtgtgcggggtggtttattggtaatgtgtttattttcgtgtatcgtttacgtacgtagggtttttttcgtacgttaattttttttttcgtattttaatattatcggttttcgttttcgtttttcgcgtcgtatatcggtatgggtttttcggtcgtgttgaatttcgcgtttaatgtcgtttatttgttttcgttttttatttcgcggttcgggttggtagcgtttttgtgtgtttgtattcgcggttggtatcgtagtaattaatttttaagtttacgtcgtcgcgtattattgtttgttttttatatatacgttgtcgttgttttattttcgcgtttcgttttatttatacgtacgttttcgtaagtagtcgttgtttaggtataggcgttattttacgttttcgtttcgtttcgttgtaggtttttttttacgcggttttgttattggtttttttttttttttatttttagttcggtaggtcgtgttcgcgggtagcgtttcggtcgtttttgtggtttttgtatagtattatcggttgtttgcgcgttttgtgttcgttaattttttattacgttcgttcgttatgtgcgcgtttttttgttttcgt

SEQ ID NO: 34712 - DNA, 656 bp, Artificial Sequence
  chemically treated genomic DNA (Homo sapiens) CpG-island No: 34712
acgaaaacaaaaaaacgcgcacataacgaacgaacgtaataaaaaattaacgaacacaaaacgcgcaaacaaccgataatactatacaaaaaccacaaaaacgaccgaaacgctacccgcgaacacgacctaccgaactaaaaataaaaaaaaaaaaaaaccaataacaaaaccgcgtaaaaaaaaacctacaacgaaacgaaacgaaaacgtaaaataacgcctatacctaaacaacgactacttacgaaaacgtacgtataaataaaacgaaacgcgaaaataaaacaacgacaacgtatatataaaaaacaaacaataatacgcgacgacgtaaacttaaaaattaattactacgataccaaccgcgaatacaaacacacaaaaacgctaccaacccgaaccgcgaaataaaaaacgaaaacaaataaacgacattaaacgcgaaattcaacacgaccgaaaaacccataccgatatacgacgcgaaaaacgaaaacgaaaaccgataatattaaaatacgaaaaaaaaaattaacgtacgaaaaaaaccctacgtacgtaaacgatacacgaaaataaacacattaccaataaaccaccccgcacacctcgaattacacccaccaaaaataaacgatataatacccccacaa

SEQ ID NO: 34713 - DNA, 511 bp, Artificial Sequence
  chemically treated genomic DNA (Homo sapiens) CpG-island No: 34713
ggaggtaagttcgggggagggggaaggggggggattagtacggattgcggtgtcgacgaagagggcggtgttgattaggggtattggggagatgcgtgtgtgcggggatacggggcgtttgggtcggggagggtgcggagttaaagggtcggacgtgaaagcgaagtgttagggaataacgtgttggtggatcgggttgtagcgtgtatcggagagaaagtagatattatatttttatgtgttaggcgaagagtttatgcgggggattaaaatggaggaagacgacgggagggcgtgaaaatgcgggggtgggttacgggatgaattatgttgttgataaatcgtagggtcgggtatatggaagaataggtgatcgggcgtggaggatttacgacgggttatgcgtttttgcggtaggtcggcgcgggtggggtattagggagataggtagtgaaagggtggataacgaatagaggggaggagtaggagataagattttaaaaggggaaaa

SEQ ID NO: 34714 - DNA, 511 bp, Artificial Sequence
  chemically treated genomic DNA (Homo sapiens) CpG-island No: 34714
ttttccccttttaaaatcttatctcctactcctcccctctattcgttatccaccctttcactacctatctccctaataccccacccgcgccgacctaccgcaaaaacgcataacccgtcgtaaatcctccacgcccgatcacctattcttccatatacccgaccctacgatttatcaacaacataattcatcccgtaacccacccccgcattttcacgccctcccgtcgtcttcctccattttaatcccccgcataaactcttcgcctaacacataaaaatataatatctactttctctccgatacacgctacaacccgatccaccaacacgttattccctaacacttcgctttcacgtccgaccctttaactccgcaccctccccgacccaaacgccccgtatccccgcacacacgcatctccccaatacccctaatcaacaccgccctcttcgtcgacaccgcaatccgtactaatccccccccttccccctcccccgaacttacctcc

SEQ ID NO: 34715 - DNA, 511 bp, Artificial Sequence
  chemically treated genomic DNA (Homo sapiens) CpG-island No: 34715
ttttttttttttggggttttattttttattttttttttttgttcgttgtttatttttttattgtttgtttttttggtattttattcgcgtcggtttgtcgtaggggcgtatggttcgtcgtaaattttttacgttcggttatttatttttttatatattcggttttacggtttattagtaatataatttatttcgtaatttattttcgtatttttacgttttttcgtcgtttttttttattttagtttttcgtataaatttttcgtttaatatatgggggtgtagtgtttatttttttttcggtatacgttgtaattcggtttattagtacgttattttttagtatttcgtttttacgttcggttttttaatttcgtatttttttcggtttaagcgtttcgtattttcgtatatacgtatttttttagtatttttggttagtatcgtttttttcgtcggtatcgtaattcgtattaatttttttttttttttttttttcggatttattttt

SEQ ID NO: 34716 - DNA, 511 bp, Artificial Sequence
  chemically treated genomic DNA (Homo sapiens) CpG-island No: 34716
aaaaataaatccgaaaaaaaaaaaaaaaaaaaaattaatacgaattacgataccgacgaaaaaaacgatactaaccaaaaatactaaaaaaatacgtatatacgaaaatacgaaacgcttaaaccgaaaaaaatacgaaattaaaaaaccgaacgtaaaaacgaaatactaaaaaataacgtactaataaaccgaattacaacgtataccgaaaaaaaaataaacactacacccccatatattaaacgaaaaatttatacgaaaaactaaaataaaaaaaaacgacgaaaaaacgtaaaaatacgaaaataaattacgaaataaattatattactaataaaccgtaaaaccgaatatataaaaaaataaataaccgaacgtaaaaaatttacgacgaaccatacgcccctacgacaaaccgacgcgaataaaataccaaaaaaacaaacaataaaaaaataaacaacgaacaaaaaaaaaaaataaaaaataaaaccccaaaaaaaaaaaa

SEQ ID NO: 34717 - DNA, 609 bp, Artificial Sequence
  chemically treated genomic DNA (Homo sapiens) CpG-island No: 34717
  unsure (569)
taaatataggcgcgttgttatttgtgtttatataatgatggtgatttgtgcgttttttgagcgggtaggtagttcgtcgttcgagttgtaagtattagtaggtgggtggcgcgttgttcgcgatttagtttttttttaatattaatttcgggtattcgttgtcgttaattcgcgatttatgtttaggcgaaagtgttgattggggtttaggttgtagtttagtatttattgtttttttcgtcgttattttgggtattcgggagagtaaagcgggttcgggcgttaggaattcggggatgtgtagttgtacgttatcggaggtacggaggtagtcgtattggtgttaggacgtgaatcgatttgtgtaatttagggttattatataggacgagttagagtagaagttggttgtcggtgattagagcgagtcgatataatgcgtgtaaattacggaatgtcgagggtagaggaacgagtatggggggaatcgtggaaagtagacggtattcgggttggcgaggaaaaatgtcggatttggatataggacgtttggtttttttgttgtgttnacgtacggagaggtatatagatatgtattgggtaagtaaa

SEQ ID NO: 34718 - DNA, 609 bp, Artificial Sequence
  chemically treated genomic DNA (Homo sapiens) CpG-island No: 34718
  unsure (41)
tttacttacccaatacatatctatatacctctccgtacgtnaacacaacaaaaaaaccaaacgtcctatatccaaatccgacatttttcctcgccaacccgaataccgtctactttccacgattccccccatactcgttcctctaccctcgacattccgtaatttacacgcattatatcgactcgctctaatcaccgacaaccaacttctactctaactcgtcctatataataaccctaaattacacaaatcgattcacgtcctaacaccaatacgactacctccgtacctccgataacgtacaactacacatccccgaattcctaacgcccgaacccgctttactctcccgaatacccaaaataacgacgaaaaaaacaataaatactaaactacaacctaaaccccaatcaacactttcgcctaaacataaatcgcgaattaacgacaacgaatacccgaaattaatattaaaaaaaaactaaatcgcgaacaacgcgccacccacctactaatacttacaactcgaacgacgaactacctacccgctcaaaaaacgcacaaatcaccatcattatataaacacaaataacaacgcgcctatattta

SEQ ID NO: 34719 - DNA, 609 bp, Artificial Sequence
  chemically treated genomic DNA (Homo sapiens) CpG-island No: 34719
  unsure (41)
tttgtttgtttaatatatgtttgtatgttttttcgtgcgtnaatataataaaaggattaagcgttttgtatttaagttcggtattttttttcgttagttcgagtgtcgtttattttttacggttttttttatgttcgtttttttattttcgatatttcgtgatttatacgtattgtgtcgattcgttttgattatcgatagttaatttttgttttgattcgttttgtgtgatgattttgagttgtatagatcgatttacgttttgatattagtgcgattattttcgtgttttcggtgacgtgtagttgtatattttcgagtttttgacgttcgagttcgttttattttttcgaatgtttaagatgacgacgagggaagtaatggatattaagttatagtttaagttttagttagtattttcgtttggatatggatcgcgggttgacggtagcgaatattcggagttggtgttggagaaagattggatcgcgaatagcgcgttatttatttgttggtgtttatagttcggacggcgggttatttgttcgtttaggagacgtataagttattattattgtgtggatataaatgataacgcgtttgtatttg

SEQ ID NO: 34720 - DNA, 609 bp, Artificial Sequence
  chemically treated genomic DNA (Homo sapiens) CpG-island No: 34720
  unsure (569)
caaatacaaacgcgttatcatttatatccacacaataataataacttatacgtctcctaaacgaacaaataacccgccgtccgaactataaacaccaacaaataaataacgcgctattcgcgatccaatctttctccaacaccaactccgaatattcgctaccgtcaacccgcgatccatatccaaacgaaaatactaactaaaacttaaactataacttaatatccattacttccctcgtcgtcatcttaaacattcgaaaaaataaaacgaactcgaacgtcaaaaactcgaaaatatacaactacacgtcaccgaaaacacgaaaataatcgcactaatatcaaaacgtaaatcgatctatacaactcaaaatcatcacacaaaacgaatcaaaacaaaaattaactatcgataatcaaaacgaatcgacacaatacgtataaatcacgaaatatcgaaaataaaaaaacgaacataaaaaaaaccgtaaaaaataaacgacactcgaactaacgaaaaaaaataccgaacttaaatacaaaacgcttaatccttttattatattnacgcacgaaaaaacatacaaacatatattaaacaaacaaa

SEQ ID NO: 34721 - DNA, 714 bp, Artificial Sequence
  chemically treated genomic DNA (Homo sapiens) CpG-island No: 34721
agtcggtagcgcggtagagtttaattagtacgtagggataaaaaaggggtaattagtcgtttataaaggcgtagatgtgtatatttattacgcggatatcggaaggtggcgttatttaatgggaaaggagcgagggagggttaggcgattagtgagggagtcgacgagtaggggttggcggagaataggcgttatagcgggttagtgatgagtataagaatcggaatcgggggggataaatttaaaatttaataacggtcgcgtttacggcgtatgacgataaaagtattaagggggatcgggcgtaaaatttattcgcggagatcgcgtaggtgttagaatacgcggcgcgtaggtaaggtacgtagagtgcggggaattgggatagttacgggacgtcggagtattgtaaatttagggttgtgattaatttgaggcgtcgtatacgagagggttggcggggtaggagacgcgggggttaaaatagagtaaacgtagtagcgtcgtaggaaaacgtgtataatgggtatgaaacgggtatatgggggtatacggttggagtcggagggggtagaaggttcggcgattattggtcgaagggacggtcgcggacgggagtcggatcgtgttaagtttggatgtttggttatgtattggagtgtttgtcgcgttgttgggaattgagggtgtaatgaaatgtttgggtgtttgatt

SEQ ID NO: 34722 - DNA, 714 bp, Artificial Sequence
  chemically treated genomic DNA (Homo sapiens) CpG-island No: 34722
aatcaaacacccaaacatttcattacaccctcaattcccaacaacgcgacaaacactccaatacataaccaaacatccaaacttaacacgatccgactcccgtccgcgaccgtcccttcgaccaataatcgccgaaccttctaccccctccgactccaaccgtatacccccatatacccgtttcatacccattatacacgttttcctacgacgctactacgtttactctattttaacccccgcgtctcctaccccgccaaccctctcgtatacgacgcctcaaattaatcacaaccctaaatttacaatactccgacgtcccgtaactatcccaattccccgcactctacgtaccttacctacgcgccgcgtattctaacacctacgcgatctccgcgaataaattttacgcccgatcccccttaatacttttatcgtcatacgccgtaaacgcgaccgttattaaattttaaatttatcccccccgattccgattcttatactcatcactaacccgctataacgcctattctccgccaacccctactcgtcgactccctcactaatcgcctaaccctccctcgctcctttcccattaaataacgccaccttccgatatccgcgtaataaatatacacatctacgcctttataaacgactaattaccccttttttatccctacgtactaattaaactctaccgcgctaccgact

SEQ ID NO: 34723 - DNA, 714 bp, Artificial Sequence
  chemically treated genomic DNA (Homo sapiens) CpG-island No: 34723
aattaagtatttaggtattttattatatttttaatttttagtagcgcggtaaatattttagtatatagttagatatttaaatttggtacggttcggttttcgttcgcggtcgttttttcggttagtagtcgtcggattttttgtttttttcgattttagtcgtgtgtttttatgtattcgttttatgtttattatatacgtttttttgcgacgttattgcgtttattttgttttaattttcgcgttttttgtttcgttagttttttcgtgtgcggcgttttaaattggttatagttttgggtttataatgtttcggcgtttcgtaattgttttaatttttcgtattttgcgtgttttatttgcgcgtcgcgtattttggtatttacgcggttttcgcgggtaaattttgcgttcggttttttttggtatttttgtcgttatgcgtcgtgaacgcggtcgttgttaaattttaagtttatttttttcggtttcggtttttgtgtttattattggttcgttgtggcgtttgtttttcgttagtttttgttcgtcgatttttttattaatcgtttggttttttttcgttttttttttattaggtaacgttatttttcgatattcgcgtagtaagtgtatatatttgcgtttttatgggcggttaattgttttttttttgtttttgcgtgttagttgagttttatcgcgttgtcggtt

SEQ ID NO: 34724 - DNA, 714 bp, Artificial Sequence
  chemically treated genomic DNA (Homo sapiens) CpG-island No: 34724
aaccgacaacgcgataaaactcaactaacacgcaaaaacaaaaaaaaaacaattaaccgcccataaaaacgcaaatatatacacttactacgcgaatatcgaaaaataacgttacctaataaaaaaaaaacgaaaaaaaaccaaacgattaataaaaaaatcgacgaacaaaaactaacgaaaaacaaacgccacaacgaaccaataataaacacaaaaaccgaaaccgaaaaaaataaacttaaaatttaacaacgaccgcgttcacgacgcataacgacaaaaataccaaaaaaaaccgaacgcaaaatttacccgcgaaaaccgcgtaaataccaaaatacgcgacgcgcaaataaaacacgcaaaatacgaaaaattaaaacaattacgaaacgccgaaacattataaacccaaaactataaccaatttaaaacgccgcacacgaaaaaactaacgaaacaaaaaacgcgaaaattaaaacaaaataaacgcaataacgtcgcaaaaaaacgtatataataaacataaaacgaatacataaaaacacacgactaaaatcgaaaaaaacaaaaaatccgacgactactaaccgaaaaaacgaccgcgaacgaaaaccgaaccgtaccaaatttaaatatctaactatatactaaaatatttaccgcgctactaaaaattaaaaatataataaaatacctaaatacttaatt

SEQ ID NO: 34725 - DNA, 560 bp, Artificial Sequence
  chemically treated genomic DNA (Homo sapiens) CpG-island No: 34725
  unsure (525..526, 536..537, 545, 548, 553, 559)
tgtcggttaaaaattttatcgatatttattttttgtttttattgtaaattcgattttcgtatacgattttaattcgattacggtggaagattacgcggagggatttaattttaaagagatcgggatatcggacgtatcgagattataaaaatatataagggtgcgcggttatttataagatgtacgcggttcggtcgggtgtatttcggggatatttgaagattagcgtattttgaagaaggatatgtcgtttatatagtttaaagagtcggtagtatatatatgacgatttattggttttaggtcggggtcgaaacggagatttaagtcggtggagcgggataattattttataagttaacggtatcgtttcgaaatatgttggatcgtgcggtggttaggacggtgtgcggttgacgatattaatattaaaagtgtttgtagtattattttttgtatcgttcgtgttttcggtttatcgtacgttcgtcggttgttgtttcggtgttgtaagagagaagaaanntttaagtgtnnngtcgatnttnattangcgggng

SEQ ID NO: 34726 - DNA, 560 bp, Artificial Sequence
  chemically treated genomic DNA (Homo sapiens) CpG-island No: 34726
  unsure (2, 8, 13, 16, 23..24, 35..)
cncccgcntaatnaanatcgacnnnacacttaaanntttcttctctcttacaacaccgaaacaacaaccgacgaacgtacgataaaccgaaaacacgaacgatacaaaaaataatactacaaacacttttaatattaatatcgtcaaccgcacaccgtcctaaccaccgcacgatccaacatatttcgaaacgataccgttaacttataaaataattatcccgctccaccgacttaaatctccgtttcgaccccgacctaaaaccaataaatcgtcatatatatactaccgactctttaaactatataaacgacatatccttcttcaaaatacgctaatcttcaaatatccccgaaatacacccgaccgaaccgcgtacatcttataaataaccgcgcacccttatatatttttataatctcgatacgtccgatatcccgatctctttaaaattaaatccctccgcgtaatcttccaccgtaatcgaattaaaatcgtatacgaaaatcgaatttacaataaaaacaaaaaataaatatcgataaaatttttaaccgaca

SEQ ID NO: 34727 - DNA, 560 bp, Artificial Sequence
  chemically treated genomic DNA (Homo sapiens) CpG-island No: 34727
  unsure (2, 8, 13, 16, 23..24, 35..)
tnttcgtntgatnaangtcgatnnnatatttgagnntttttttttttttatagtatcggggtaatagtcggcgagcgtgcgataaatcgagggtacgagcgatgtagaagatagtgttgtaagtatttttaatgttggtgtcgttaatcgtatatcgttttaattatcgtacggtttagtatgtttcggagcggtgtcgttgatttgtggagtgattatttcgttttatcggtttaagttttcgtttcgatttcgatttggagttagtaagtcgttatgtatgtgttgtcggttttttgagttgtgtaagcggtatatttttttttagaatgcgttgatttttaaatattttcgggatgtattcgatcgagtcgcgtatattttgtaggtagtcgcgtatttttgtatgtttttgtagtttcggtgcgttcggtgtttcggtttttttaaggttaagttttttcgcgtaattttttatcgtagtcgagttggagtcgtatgcggaagtcgagtttgtagtgggaatagaaagtaggtgtcggtagagtttttggtcgata

SEQ ID NO: 34728 - DNA, 560 bp, Artificial Sequence
  chemically treated genomic DNA (Homo sapiens) CpG-island No: 34728
  unsure (525..526, 536..537, 545, 548, 553, 559)
tatcgaccaaaaactctaccgacacctactttctattcccactacaaactcgacttccgcatacgactccaactcgactacgataaaaaattacgcgaaaaaacttaaccttaaaaaaaccgaaacaccgaacgcaccgaaactacaaaaacatacaaaaatacgcgactacctacaaaatatacgcgactcgatcgaatacatcccgaaaatatttaaaaatcaacgcattctaaaaaaaaatataccgcttacacaactcaaaaaaccgacaacacatacataacgacttactaactccaaatcgaaatcgaaacgaaaacttaaaccgataaaacgaaataatcactccacaaatcaacgacaccgctccgaaacatactaaaccgtacgataattaaaacgatatacgattaacgacaccaacattaaaaatacttacaacactatcttctacatcgctcgtaccctcgatttatcgcacgctcgccgactattaccccgatactataaaaaaaaaaaaannctcaaatatnnnatcgacnttnatcanacgaana

SEQ ID NO: 34729 - DNA, 513 bp, Artificial Sequence
  chemically treated genomic DNA (Homo sapiens) CpG-island No: 34729
  unsure (56)
ggtagattatggggggaaagcggtacgcgggaaaaacggggtacgaagatatattnagcgtaatttcggtttcgaggaggttaaatacggtattttcgtgggtcgtatcgcgtaggatttggattggagttggcggagttggtgtcgcgtttgtttcgggtggcgtttaaggtcgcggaggttttttggaggtaaatttgtagaatggtattttgtttgtaattttcggatcgatcgggaggagttgtgtcggcggagcgcggagtgtatatttatttggaggtgatcgtagataggtcgttgtaggttttttatgtgacgtggaggtgagggatattaacgataattcgtcggtgtttttagtaattaaaagaatttgtttatcgcggaatttaggtcgtttgattttcggttttattagagggcgtttcggatgtagatatcggggagaacgttttgtttattatagattgagtttaaatgaatatttttttttggaaaaattatttgatg

SEQ ID NO: 34730 - DNA, 513 bp, Artificial Sequence
  chemically treated genomic DNA (Homo sapiens) CpG-island No: 34730
  unsure (458)
catcaaataatttttccaaaaaaaaatattcatttaaactcaatctataataaacaaaacgttctccccgatatctacatccgaaacgccctctaataaaaccgaaaatcaaacgacctaaattccgcgataaacaaattcttttaattactaaaaacaccgacgaattatcgttaatatccctcacctccacgtcacataaaaaacctacaacgacctatctacgatcacctccaaataaatatacactccgcgctccgccgacacaactcctcccgatcgatccgaaaattacaaacaaaataccattctacaaatttacctccaaaaaacctccgcgaccttaaacgccacccgaaacaaacgcgacaccaactccgccaactccaatccaaatcctacgcgatacgacccacgaaaataccgtatttaacctcctcgaaaccgaaattacgctnaatatatcttcgtaccccgtttttcccgcgtaccgctttccccccataatctacc

SEQ ID NO: 34731 - DNA, 513 bp, Artificial Sequence
  chemically treated genomic DNA (Homo sapiens) CpG-island No: 34731
  unsure (458)
tattaggtggtttttttagagaaaagtatttatttgggtttagtttgtagtgagtagggcgtttttttcgatatttgtattcgaggcgttttttagtgaaatcgagagttaagcggtttggatttcgcgatggataggtttttttggttgttgggaatatcggcgggttatcgttaatgttttttatttttacgttatatggaaaatttgtagcggtttgtttacgattatttttaggtggatgtgtatttcgcgtttcgtcggtatagtttttttcggtcgattcgagaattataaataaaatgttattttgtagatttatttttagaaggttttcgcggttttggacgttattcggaataggcgcggtattagtttcgttagttttagtttaggttttgcgcgatgcggtttacgaaggtgtcgtgtttggttttttcgagatcggagttacgttnggtatgttttcgtatttcgtttttttcgcgtgtcgttttttttttatggtttgtt

SEQ ID NO: 34732 - DNA, 513 bp, Artificial Sequence
  chemically treated genomic DNA (Homo sapiens) CpG-island No: 34732
  unsure (56)
aacaaaccataaaaaaaaaacgacacgcgaaaaaaacgaaatacgaaaacataccnaacgtaactccgatctcgaaaaaaccaaacacgacaccttcgtaaaccgcatcgcgcaaaacctaaactaaaactaacgaaactaataccgcgcctattccgaataacgtccaaaaccgcgaaaaccttctaaaaataaatctacaaaataacattttatttataattctcgaatcgaccgaaaaaaactataccgacgaaacgcgaaatacacatccacctaaaaataatcgtaaacaaaccgctacaaattttccatataacgtaaaaataaaaaacattaacgataacccgccgatattcccaacaaccaaaaaaacctatccatcgcgaaatccaaaccgcttaactctcgatttcactaaaaaacgcctcgaatacaaatatcgaaaaaaacgccctactcactacaaactaaacccaaataaatacttttctctaaaaaaaccacctaata

SEQ ID NO: 34733 - DNA, 555 bp, Artificial Sequence
  chemically treated genomic DNA (Homo sapiens) CpG-island No: 34733
  unsure (487..488, 494..495, 500, 504, 506..507, 512..513, 519..520)
  unsure (528, 533..534, 540..541, 549..)
cgagagcgtgttatttatgagttggtggtgatcgcgcgagacgggggttcgttttcgttgtggttacggttagtgtttttgtggaggtggttgatgtgaacgataacgttcggcgttcgcgtagttcgagtatatagtgttcgtgaaggagaataattcgcgggttgttatatttttattgtgtttgcgtgggacgcggacgcgtaggaaacgcgttggtgttttattcgttggtagagcggcgggtaggggagcgcggttgtcgagttacgtttcggtgtatgcggagagcggtaaggtgtacgcgtgtagtcgttggattacgaggagttagagttgttgtagttttaggtgacgttcgcgatgtcggcgtgttatttttgggtagtaacgtgacgttgtagggttcgtgttggacgaaaacgataacgcgttagtattgttagcgtttcggcgggtggtattggtggcgtagtgagcgagttgnngtgttnnatggntttngnntgggnntgttgnnggttacgnttggnntggtannaaggtgtnngttcg

SEQ ID NO: 34734 - DNA, 555 bp, Artificial Sequence
  chemically treated genomic DNA (Homo sapiens) CpG-island No: 34734
  unsure (6..7, 15..16, 22..23, 28, 36..37, 43..44, 49..50, 52, 56)
  unsure (61..62, 68..)
cgaacnnacaccttnntaccannccaancgtaaccnncaacanncccanncnaaanccatnnaacacnncaactcgctcactacgccaccaataccacccgccgaaacgctaacaatactaacgcgttatcgttttcgtccaacacgaaccctacaacgtcacgttactacccaaaaataacacgccgacatcgcgaacgtcacctaaaactacaacaactctaactcctcgtaatccaacgactacacgcgtacaccttaccgctctccgcatacaccgaaacgtaactcgacaaccgcgctcccctacccgccgctctaccaacgaataaaacaccaacgcgtttcctacgcgtccgcgtcccacgcaaacacaataaaaatataacaacccgcgaattattctccttcacgaacactatatactcgaactacgcgaacgccgaacgttatcgttcacatcaaccacctccacaaaaacactaaccgtaaccacaacgaaaacgaacccccgtctcgcgcgatcaccaccaactcataaataacacgctctcg

SEQ ID NO: 34735 - DNA, 555 bp, Artificial Sequence
  chemically treated genomic DNA (Homo sapiens) CpG-island No: 34735
  unsure (6..7, 15..16, 22..23, 28, 36..37, 43..44, 49..50, 52, 56)
  unsure (61..62, 68..)
cgggtnngtattttnntgttannttaancgtggttnntaatanntttanntngganttatnnggtatnntagttcgtttattgcgttattagtgttattcgtcgaggcgttagtagtgttggcgcgttgtcgttttcgtttagtacgaattttgtagcgttacgttgttgtttagaggtggtacgtcggtatcgcgagcgttatttgaaattgtagtagttttagtttttcgtggtttagcggttgtacgcgtatattttgtcgtttttcgtatgtatcgaaacgtagttcgatagtcgcgtttttttattcgtcgttttattagcgagtaggatattagcgcgttttttgcgcgttcgcgttttacgtagatatagtgaagatgtggtagttcgcgggttgtttttttttacgaatattgtgtattcgggttgcgcgaacgtcgagcgttgtcgtttatattagttatttttatagaaatattggtcgtggttatagcgaaggcgagttttcgtttcgcgcggttattattagtttataggtgatacgttttcg

SEQ ID NO: 34736 - DNA, 555 bp, Artificial Sequence
  chemically treated genomic DNA (Homo sapiens) CpG-island No: 34736
  unsure (487..488, 494..495, 500, 504, 506..507, 512..513, 519..520)
  unsure (528, 533..534, 540..541, 549..)
cgaaaacgtatcacctataaactaataataaccgcgcgaaacgaaaactcgccttcgctataaccacgaccaatatttctataaaaataactaatataaacgacaacgctcgacgttcgcgcaacccgaatacacaatattcgtaaaaaaaaacaacccgcgaactaccacatcttcactatatctacgtaaaacgcgaacgcgcaaaaaacgcgctaatatcctactcgctaataaaacgacgaataaaaaaacgcgactatcgaactacgtttcgatacatacgaaaaacgacaaaatatacgcgtacaaccgctaaaccacgaaaaactaaaactactacaatttcaaataacgctcgcgataccgacgtaccacctctaaacaacaacgtaacgctacaaaattcgtactaaacgaaaacgacaacgcgccaacactactaacgcctcgacgaataacactaataacgcaataaacgaactannataccnnataantccnanntaaanntattannaaccacgnttaanntaacannaaaatacnnacccg

SEQ ID NO: 34737 - DNA, 936 bp, Artificial Sequence
  chemically treated genomic DNA (Homo sapiens) CpG-island No: 34737
gtttatgagttggggtaatcgcgcgggacgggggttcgttttcgttgtgggttatcgttagttgtttgtggaggtggtcgacgtgaacgataatgtttcggcgttcgcgtattcgagtatacggtgttcgtgaaggagaataattcgtcgggttgttatattttacggtgtttgcgcgagacgcggacgcgtaggagaacgcgttggtgtttattcgtttgtggagcggcgggtgggcgagcgttcgttgtcgagttaatttcggtgtatacggagagcggtaaggtgtacgcgttgtagtcgttggttacgaggagttagagttgttgtagttttaggtgagcgcgcgcgacgcggcgtgtcgtttttgggtagtaacgtgacgttgtaggtgttcgtgttggagagaatgataacgcgtcggtattgttggagtttcgggtgggtggtattgtggcgtagcgagtaagttggtgtcgcggtttgtgggcgcgggttacgtgtagcgaaggtgcgcgtagtggacgtcgattcgggttataacgcgtggtttcgtatgagttgtagttagttgtaagtagttttcgtatttcgtttcgcgggggttgtatacgggcgagattagtattattcgtgttttggacgaagcgatttttcgcgttatcgtttgttggttttggtgaaggattatggtgaatcgcgttgatcgttacggttacggttttggtgtcgttggtggagagcggtcggttttaaaagcgttatcgaggtagtcggttggcgttttgggttcggaacggcgttggtggatgttaacgtgtatttgattatcgttatttgcgcggttttagtttgttggtgtttacgttgttgttgtatattgcgttgcggtgttagtattgtttattgagggcgggtgtcgggcgggtaagttta

SEQ ID NO: 34738 - DNA, 936 bp, Artificial Sequence
  chemically treated genomic DNA (Homo sapiens) CpG-island No: 34738
taaacttacccgcccgacacccgccctcaataaacaatactaacaccgcaacgcaatatacaacaacaacgtaaacaccaacaaactaaaaccgcgcaaataacgataatcaaatacacgttaacatccaccaacgccgttccgaacccaaaacgccaaccgactacctcgataacgcttttaaaaccgaccgctctccaccaacgacaccaaaaccgtaaccgtaacgatcaacgcgattcaccataatccttcaccaaaaccaacaaacgataacgcgaaaaatcgcttcgtccaaaacacgaataatactaatctcgcccgtatacaacccccgcgaaacgaaatacgaaaactacttacaactaactacaactcatacgaaaccacgcgttataacccgaatcgacgtccactacgcgcaccttcgctacacgtaacccgcgcccacaaaccgcgacaccaacttactcgctacgccacaataccacccacccgaaactccaacaataccgacgcgttatcattctctccaacacgaacacctacaacgtcacgttactacccaaaaacgacacgccgcgtcgcgcgcgctcacctaaaactacaacaactctaactcctcgtaaccaacgactacaacgcgtacaccttaccgctctccgtatacaccgaaattaactcgacaacgaacgctcgcccacccgccgctccacaaacgaataaacaccaacgcgttctcctacgcgtccgcgtctcgcgcaaacaccgtaaaatataacaacccgacgaattattctccttcacgaacaccgtatactcgaatacgcgaacgccgaaacattatcgttcacgtcgaccacctccacaaacaactaacgataacccacaacgaaaacgaacccccgtcccgcgcgattaccccaactcataaac

SEQ ID NO: 34739 - DNA, 936 bp, Artificial Sequence
  chemically treated genomic DNA (Homo sapiens) CpG-island No: 34739
tgggtttgttcgttcggtattcgtttttagtgggtagtgttagtatcgtagcgtagtgtatagtagtagcgtgagtattagtaggttggaatcgcgtagatggcgatgattaggtatacgttgatatttattagcgtcgtttcggatttaaaacgttagtcgattgtttcgatgacgtttttggagtcggtcgttttttattagcgatattagaatcgtggtcgtggcggttagcgcggtttattatgattttttattaggattagtagacggtggcgcggagagtcgtttcgtttaggatacgagtggtgttgatttcgttcgtgtatagttttcgcggaacgggatgcgagggttgtttgtagttggttgtagtttatacgaagttacgcgttgtagttcgagtcggcgtttattgcgcgtattttcgttatacgtggttcgcgtttatagatcgcggtattagtttgttcgttgcgttatagtgttatttattcgaggttttagtagtgtcggcgcgttgttattttttttagtacgaatatttgtagcgttacgttgttgtttagaggcggtacgtcgcgtcgcgcgcgtttatttggaattgtagtagttttagtttttcgtggttagcggttgtagcgcgtatattttgtcgtttttcgtgtgtatcgaaattagttcgatagcgagcgttcgtttattcgtcgttttataagcgagtaggtattagcgcgtttttttgcgcgttcgcgtttcgcgtagatatcgtgaagtgtggtagttcggcgggttgtttttttttacgaatatcgtgtattcgggtgcgcgaacgtcggagtattgtcgtttacgtcggttatttttatagatagttggcggtggtttatagcgaaggcgagttttcgtttcgcgcggttattttaatttataggt

SEQ ID NO: 34740 - DNA, 936 bp, Artificial Sequence
  chemically treated genomic DNA (Homo sapiens) CpG-island No: 34740
acctataaattaaaataaccgcgcgaaacgaaaactcgccttcgctataaaccaccgccaactatctataaaaataaccgacgtaaacgacaatactccgacgttcgcgcacccgaatacacgatattcgtaaaaaaaaacaacccgccgaactaccacacttcacgatatctacgcgaaacgcgaacgcgcaaaaaaacgcgctaatacctactcgcttataaaacgacgaataaacgaacgctcgctatcgaactaatttcgatacacacgaaaaacgacaaaatatacgcgctacaaccgctaaccacgaaaaactaaaactactacaattccaaataaacgcgcgcgacgcgacgtaccgcctctaaacaacaacgtaacgctacaaatattcgtactaaaaaaaataacaacgcgccgacactactaaaacctcgaataaataacactataacgcaacgaacaaactaataccgcgatctataaacgcgaaccacgtataacgaaaatacgcgcaataaacgccgactcgaactacaacgcgtaacttcgtataaactacaaccaactacaaacaaccctcgcatcccgttccgcgaaaactatacacgaacgaaatcaacaccactcgtatcctaaacgaaacgactctccgcgccaccgtctactaatcctaataaaaaatcataataaaccgcgctaaccgccacgaccacgattctaatatcgctaataaaaaacgaccgactccaaaaacgtcatcgaaacaatcgactaacgttttaaatccgaaacgacgctaataaatatcaacgtatacctaatcatcgccatctacgcgattccaacctactaatactcacgctactactatacactacgctacgatactaacactacccactaaaaacgaataccgaacgaacaaaccca

SEQ ID NO: 34741 - DNA, 1229 bp, Artificial Sequence
  chemically treated genomic DNA (Homo sapiens) CpG-island No: 34741
tgttaacgggtaggttatttgttttcgacgttttacgttttttttaagttggtgtttatttataagaattattatcgttggtgttggatagagttttggatcgcgagagtgtgttcgtttacgattggtggttatcgcgcgggatcggggttcgtttttattgtgggttacggtagggtgtttgtggaggtggtcgacgtgaacgataacgtattagcgtttcgtagttcgagtatacggtgttcgtgaaggagaataattcgtcgggttgtatatttttacggtgtttgcgcgggacgcggacgcgtaggagaacgttcggtgttttattcgttggtggagcggcggttgggcgagcgttcgttgtcggttacgtgttagtgtacgcggagagcggtaaggtgtacgcgttgtagttttggattacgaggagttggagttgttatagttttaggtgagcgcgcgcgcgcgggcgtgtcgtttttgggtagtaacgtgacgttgtaggtgttcgtgtggacgagaacgataatgcgtcggcgttgttgatatttcggatgaggggattgacggcgtagtgagcgagatggtgttgcggtcggtgggcgtcggcgagtggtggggaaggtgcgcgtagtggacgtcgattcgggttataacgcgggtttttatacgagttgtagttagaaacggttagcgcgagtatttcgttcgcgtggggttgtatacgggcgagattagtataacgcgtgttttggacgaacggacgtatcgcgttagcgtttattggtgttggtgaaagattacgggagttagcgttgacggttacggttattgtgttggtgtcgttggtggagagggttaggcgttaaagttatcgtcgcgggcgtagtgggtgttacgggttcgaggtgacgttggtggatgttaacgtgtatttgattatcgttatttgcgggtgtttagtttgttggtttttacgttgttgttgtatattgtgttgcgggttcggcgatgtttatcgagggcgagtgcgcgtttggtaagtcgacgttgtgtgttttagcgcggtggggagttggtcgtattcgtagtagaggaggcgagggtgtgttttggcgagggttcgtagaagatcgattttatggttttcgttcgggtttttttttttgtgttggatttatagagcgaacgggagaatttttgtttttttagatttaattgggaag

SEQ ID NO: 34742 - DNA, 1229 bp, Artificial Sequence
  chemically treated genomic DNA (Homo sapiens) CpG-island No: 34742
cttcccaattaaatctaaaaaaacaaaaattctcccgttcgctctataaatccaacacaaaaaaaaaaacccgaacgaaaaccataaaatcgatcttctacgaaccctcgccaaaacacaccctcgcctcctctactacgaatacgaccaactccccaccgcgctaaaacacacaacgtcgacttaccaaacgcgcactcgccctcgataaacatcgccgaacccgcaacacaatatacaacaacaacgtaaaaaccaacaaactaaacacccgcaaataacgataatcaaatacacgttaacatccaccaacgtcacctcgaacccgtaacacccactacgcccgcgacgataactttaacgcctaaccctctccaccaacgacaccaacacaataaccgtaaccgtcaacgctaactcccgtaatctttcaccaacaccaataaacgctaacgcgatacgtccgttcgtccaaaacacgcgttatactaatctcgcccgtatacaaccccacgcgaacgaaatactcgcgctaaccgtttctaactacaactcgtataaaaacccgcgttataacccgaatcgacgtccactacgcgcaccttccccaccactcgccgacgcccaccgaccgcaacaccatctcgctcactacgccgtcaatcccctcatccgaaatatcaacaacgccgacgcattatcgttctcgtccacacgaacacctacaacgtcacgttactacccaaaaacgacacgcccgcgcgcgcgcgctcacctaaaactataacaactccaactcctcgtaatccaaaactacaacgcgtacaccttaccgctctccgcgtacactaacacgtaaccgacaacgaacgctcgcccaaccgccgctccaccaacgaataaaacaccgaacgttctcctacgcgtccgcgtcccgcgcaaacaccgtaaaaatatacaacccgacgaattattctccttcacgaacaccgtatactcgaactacgaaacgctaatacgttatcgttcacgtcgaccacctccacaaacaccctaccgtaacccacaataaaaacgaaccccgatcccgcgcgataaccaccaatcgtaaacgaacacactctcgcgatccaaaactctatccaacaccaacgataataattcttataaataaacaccaacttaaaaaaaacgtaaaacgtcgaaaacaaataacctacccgttaaca

SEQ ID NO: 34743 - DNA, 1229 bp, Artificial Sequence
  chemically treated genomic DNA (Homo sapiens) CpG-island No: 34743
ttttttagttgaatttgaggaagtagaggttttttcgttcgttttgtagatttagtataaggagaaaggttcgggcgaaggttatgaggtcggttttttgcggattttcgttagagtatattttcgttttttttgttgcgagtacgattaattttttatcgcgttagaatatatagcgtcggtttgttaggcgcgtattcgttttcggtgggtatcgtcgagttcgtagtatagtgtatagtagtagcgtgagaattaataggttagatattcgtagatggcgatgattaggtatacgttgatatttattagcgttatttcgggttcgtggtatttattacgttcgcgacgatgattttggcgtttggttttttttattagcgatattagtatagtggtcgtggtcgttagcgttggttttcgtggttttttattagtattagtaggcgttggcgcggtgcgttcgttcgtttagggtacgcgttgtgttgatttcgttcgtgtatagttttacgcgaacgggatgttcgcgttggtcgtttttggttgtagttcgtatgaaagttcgcgttgtagttcgagtcggcgtttattgcgcgtattttttttattattcgtcggcgtttatcgatcgtagtattatttcgtttattgcgtcgttagtttttttattcgaggtgttagtagcgtcggcgtattgtcgttttcgtttatacgaatatttgtagcgttacgttgttgtttagaggcggtacgttcgcgcgcgcgcgtttatttggaattgtagtagttttagtttttcgtggtttaaggttgtagcgcgtatattttgtcgtttttcgcgtgtattgatacgtagtcgatagcgagcgttcgtttaatcgtcgttttattagcgagtaggatatcgggcgtttttttgcgcgttcgcgtttcgcgtagatatcgtgaagatgtgtagttcggcgggttgtttttttttacgaatatcgtgtattcggattgcggaacgttggtgcgttgtcgtttacgtcggttatttttatagatattttgtcgtggtttatagtgaaggcgagtttcggtttcgcgcggtaattattagtcgtaggcggatatattttcgcggtttagagttttgtttagtattaacggtagtaatttttgtaggtggatattagtttgaaggggacgtggggcgtcgggagtaggtaatttgttcgttggta

SEQ ID NO: 34744 - DNA, 1229 bp, Artificial Sequence
  chemically treated genomic DNA (Homo sapiens) CpG-island No: 34744
taccaacgaacaaattacctactcccgacgccccacgtccccttcaaactaatatccacctacaaaaattactaccgttaatactaaacaaaactctaaaccgcgaaaatatatccgcctacgactaataattaccgcgcgaaaccgaaactcgccttcactataaaccacgacaaaatatctataaaaataaccgacgtaaacgacaacgcaccaacgttccgcaatccgaatacacgatattcgtaaaaaaaaacaacccgccgaactacacatcttcacgatatctacgcgaaacgcgaacgcgcaaaaaaacgcccgatatcctactcgctaataaaacgacgattaaacgaacgctcgctatcgactacgtatcaatacacgcgaaaaacgacaaaatatacgcgctacaaccttaaaccacgaaaaactaaaactactacaattccaaataaacgcgcgcgcgcgaacgtaccgcctctaaacaacaacgtaacgctacaaatattcgtataaacgaaaacgacaatacgccgacgctactaacacctcgaataaaaaaactaacgacgcaataaacgaaataatactacgatcgataaacgccgacgaataataaaaaaaatacgcgcaataaacgccgactcgaactacaacgcgaactttcatacgaactacaaccaaaaacgaccaacgcgaacatcccgttcgcgtaaaactatacacgaacgaaatcaacacaacgcgtaccctaaacgaacgaacgcaccgcgccaacgcctactaatactaataaaaaaccacgaaaaccaacgctaacgaccacgaccactatactaatatcgctaataaaaaaaaccaaacgccaaaatcatcgtcgcgaacgtaataaataccacgaacccgaaataacgctaataaatatcaacgtatacctaatcatcgccatctacgaatatctaacctattaattctcacgctactactatacactatactacgaactcgacgatacccaccgaaaacgaatacgcgcctaacaaaccgacgctatatattctaacgcgataaaaaattaatcgtactcgcaacaaaaaaaacgaaaatatactctaacgaaaatccgcaaaaaaccgacctcataaccttcgcccgaacctttctccttatactaaatctacaaaacgaacgaaaaaacctctacttcctcaaattcaactaaaaaa

SEQ ID NO: 34745 - DNA, 1069 bp, Artificial Sequence
  chemically treated genomic DNA (Homo sapiens) CpG-island No: 34745
tttttgtcgcgttggagtatattagagtgggtttgttcggcgcgtacgcgtttcggtgggcggtgtcgagtatcgtagcgtagtatatagtagtaacgtgagattaataggttggatatcgcgtagatggtaatgattaagtaaatattgaatttattagcgtcgtttttggatttatagcgtttgtcgacgttttcgataagtttgtggcgtttggtcgttttttattagcgataatagtatcgttgcgtggtcgttagcgcgggtttatcgtggttttttattagtattagaaggcgtggtgcggcgcgtttatttcgtttagagggcgcgtcgtgttgatttcgtagtgtatagttttacgcggaacgggatgcgcgcgtcgatcgtcgttagtgtaatttatacgaaagttacgtattgtagttcgaatcggcgtttatcggcgtattttcgttattacgtggtttgtatttatcgatcgcggtattagtcgtttattgtgtttttcgcgttgttagtttcgggcgttagtagcgtcgggcgttgtcgttttcgtttagtacgaatatttgtagcgttacgttgttgttagaggcggtacgttagagtcgcgcgcgtttatttggaattgtaatagtttagtttttcgtggtttaacggttgtagcgcgtatattttgtcgttttcgcgtgtatcgatacgtagttcgatagcgtacgttcgtttattcgtcgtttattagcgagtaggagattagcgcgtttttttgtgcgttcgcgttttgttagatatcgtgaagatgtggtagttcggcggattgtttttttttacgaaatcgtgtattcgggttgcgcgaacgtcggcgcgttgtcgtttacgtcggtatttttatcgatacgttggtcgtggtttatagcgaaggcgagttttcgttcgcgcggttattattagtttataggttgatacgttttcgcggtttagcgttgtttagtattaatgagtagtagtttttgtaggtggatattagtttaaggggatatgcggcgttaaggtgtaggtgatttgt

SEQ ID NO: 34746 - DNA, 1069 bp, Artificial Sequence
  chemically treated genomic DNA (Homo sapiens) CpG-island No: 34746
acaaatcacctacaccttaacgccgcatatccccttaaactaatatccacctacaaaaactactactcattaatactaaacaacgctaaaccgcgaaaacgtatcaacctataaactaataataaccgcgcgaacgaaaactcgccttcgctataaaccacgaccaacgtatcgataaaaataccgacgtaaacgacaacgcgccgacgttcgcgcaacccgaatacacgatttcgtaaaaaaaaacaatccgccgaactaccacatcttcacgatatctaacaaaacgcgaacgcacaaaaaaacgcgctaatctcctactcgctaataaacgacgaataaacgaacgtacgctatcgaactacgtatcgatacacgcgaaaacgacaaaatatacgcgctacaaccgttaaaccacgaaaaactaaactattacaattccaaataaacgcgcgcgactctaacgtaccgcctctaacaacaacgtaacgctacaaatattcgtactaaacgaaaacgacaacgcccgacgctactaacgcccgaaactaacaacgcgaaaaacacaataaacgactaataccgcgatcgataaatacaaaccacgtaataacgaaaatacgccgataaacgccgattcgaactacaatacgtaactttcgtataaattacactaacgacgatcgacgcgcgcatcccgttccgcgtaaaactatacactacgaaatcaacacgacgcgccctctaaacgaaataaacgcgccgcaccacgccttctaatactaataaaaaaccacgataaacccgcgctaacgaccacgcaacgatactattatcgctaataaaaaacgaccaaacgccacaaacttatcgaaaacgtcgacaaacgctataaatccaaaaacgacgctaataaattcaatatttacttaatcattaccatctacgcgatatccaacctattaatctcacgttactactatatactacgctacgatactcgacaccgcccaccgaaacgcgtacgcgccgaacaaacccactctaatatactccaacgcgacaaaaa

SEQ ID NO: 34747 - DNA, 1069 bp, Artificial Sequence
  chemically treated genomic DNA (Homo sapiens) CpG-island No: 34747
ataggttatttgtattttgacgtcgtatgtttttttaagttggtgtttatttataagaattattatttattagtgttggatagcgttggatcgcgagagcgtattagtttatgaattggtggtgatcgcgcgggcgggggttcgttttcgttgtgggttacggttagcgtgtcggtgggggtgtcgacgtgaacgataacgcgtcggcgttcgcgtagttcgagtatacggtttcgtgaaggaaaataattcgtcgggttgttatatttttacggtgtttggtaggacgcggacgtataggagaacgcgttggttttttattcgttggtgagcggcgggtgggcgagcgtgcgttgtcgagttacgtgtcggtgtacgcgagagcggtaaggtgtacgcgttgtagtcgttggattacgaggagttgggttgttgtagttttaggtgagcgcgcgcgattttggcgtgtcgtttttggtagtaacgtgacgttgtaggtgttcgtgttggacgagaacgataacgttcggcgttgttgacgttcggggttggtagcgcgggaggtatagtgagcggttgatgtcgcggtcggtgggtgtaggttacgtggtggcgaaggtgcgtcggtggacgtcgattcgggttataatgcgtggttttcgtatgaattgtattggcggcggtcggcgcgcgtatttcgtttcgcgtggggttgtatattgcgagattagtacgacgcgttttttggacgaggtggacgcgtcgtattacgttttttggtgttggtgaaggattacggtgagttcgcgttgacggttacgtaacggtgttgttgtcgttggtggagagcggttaagcgttataggtttgtcgagggcgtcggtaggcgttgtgggtttagaagcggcgttggtggatttaatgtttatttgattattgttatttgcgcggtgtttagtttgttggttttacgttgttgttgtatattgcgttgcggtgttcggtatcgtttatcggggcgcgtgcgcgtcgggtaagtttattttagtgtgttttagcgcggtaggag

SEQ ID NO: 34748 - DNA, 1069 bp, Artificial Sequence
  chemically treated genomic DNA (Homo sapiens) CpG-island No: 34748
ctcctaccgcgctaaaacacactaaaataaacttacccgacgcgcacgcgccccgataaacgataccgaacaccgcaacgcaatatacaacaacaacgtaaaaccaacaaactaaacaccgcgcaaataacaataatcaaataaacattaaatccaccaacgccgcttctaaacccacaacgcctaccgacgccctcgacaaacctataacgcttaaccgctctccaccaacgacaacaacaccgttacgtaaccgtcaacgcgaactcaccgtaatccttcaccaacaccaaaaaacgtaatacgacgcgtccacctcgtccaaaaaacgcgtcgtactaatctcgcaatatacaaccccacgcgaaacgaaatacgcgcgccgaccgccgccaatacaattcatacgaaaaccacgcattataacccgaatcgacgtccaccgacgcaccttcgccaccacgtaacctacacccaccgaccgcgacatcaaccgctcactatacctcccgcgctaccaaccccgaacgtcaacaacgccgaacgttatcgttctcgtccaacacgaacacctacaacgtcacgttactaccaaaaacgacacgccaaaatcgcgcgcgctcacctaaaactacaacaacccaactcctcgtaatccaacgactacaacgcgtacaccttaccgctctcgcgtacaccgacacgtaactcgacaacgcacgctcgcccacccgccgctcaccaacgaataaaaaaccaacgcgttctcctatacgtccgcgtcctaccaaacaccgtaaaaatataacaacccgacgaattattttccttcacgaaaccgtatactcgaactacgcgaacgccgacgcgttatcgttcacgtcgacacccccaccgacacgctaaccgtaacccacaacgaaaacgaacccccgcccgcgcgatcaccaccaattcataaactaatacgctctcgcgatccaacgctatccaacactaataaataataattcttataaataaacaccaacttaaaaaaacatacgacgtcaaaatacaaataacctat

SEQ ID NO: 34749 - DNA, 1106 bp, Artificial Sequence
  chemically treated genomic DNA (Homo sapiens) CpG-island No: 34749
tttttgacgttttacgtttcgtttagttggtgtttatttataagaattattatttattggtgttggatagcgtttggatcgcgagagggtgtcggtttatgagttggtggtgatcgcgcgggagggggttcgttttcgttgtgggttacggttaggtgtttgtggaggtggcgacgtgaacgataacgcgtttgcgttcgcgtagttcgagtatacggtgtcgtgaaggagaataattcgttaggttgttatatttttacggtgtttgcggggacgcggacgcgtaggagaacgttttggtgttttattcgttggtggacggcggttgggcgagcgttcgttgtcgagttacgtgtcggtgtacgcgggagcggtaaggtgtattgcgttgtagtcgttggattacgaggagttggattgttatagttttaggtgagcgcgcgcgatgggggcgtgtcgtttttggtagtaatttgacgttgtaggtgttcgtgttggacgagaacgataacgtttcgcgttgttggcgtttttcgttggtagcgcgggcggtgtagttagtgattggtgttgcggtcggtgggtgcgggttacgtggtggttaaggtgcgcgagtggacgttgattttggatataacgcgtggttgtcgtatgaattgtagcggcggcggttggtgttacgtatttcgtttcgcgtgtgggtttgtatacggcgagattagtacgacgcgcgttttggatgaggttgattcgttacgtcgcgtttattggtgttggtgaaggattatggcgagtcgtcgttgacggttcggttattgtgtttgtgtcgtttgtggagggtagttaggtatttaaggttcgtcgcgggttttagtgggcgtggcgttcgaggtggttttggtggatgtaacgtgtatttgattatcgttatttgcgcggtgtttagtttgttggtgttacgttgttgttgtatattgtattgaggtgttcggcggcgtttatcgaggcgtatgtgggtcggtgaagtttacgttggtgtgttttagcgcggtgggagttggttttattcgtagtagaggcggtagagggtgtgttttggggaggtt

SEQ ID NO: 34750 - DNA, 1106 bp, Artificial Sequence
  chemically treated genomic DNA (Homo sapiens) CpG-island No: 34750
aacctccccaaaacacaccctctaccgcctctactacgaataaaaccaactcccaccgcgctaaaacacaccaacgtaaacttcaccgacccacatacgcctcgataaacgccgccgaacacctcaatacaatatacaacaacaacgtaacaccaacaaactaaacaccgcgcaaataacgataatcaaatacacgttacatccaccaaaaccacctcgaacgccacgcccactaaaacccgcgacgaaccttaaatacctaactaccctccacaaacgacacaaacacaataaccgaaccgtcaacgacgactcgccataatccttcaccaacaccaataaacgcgacgtaacgaatcaacctcatccaaaacgcgcgtcgtactaatctcgccgtatacaaacccacacgcgaaacgaaatacgtaacaccaaccgccgccgctacaattcatacgacaaccacgcgttatatccaaaatcaacgtccactcgcgcaccttaaccaccacgtaacccgcacccaccgaccgcaacaccaatcactaactacaccgcccgcgctaccaacgaaaaacgccaacaacgcgaaacgttatcgttctcgtccaacacgaacacctacaacgtcaaattactaccaaaaacgacacgcccccatcgcgcgcgctcacctaaaactataacaatccaactcctcgtaatccaacgactacaacgcaatacaccttaccgctcccgcgtacaccgacacgtaactcgacaacgaacgctcgcccaaccgccgtccaccaacgaataaaacaccaaaacgttctcctacgcgtccgcgtccccgcaaacaccgtaaaaatataacaacctaacgaattattctccttcacgacaccgtatactcgaactacgcgaacgcaaacgcgttatcgttcacgtcgccacctccacaaacacctaaccgtaacccacaacgaaaacgaaccccctcccgcgcgatcaccaccaactcataaaccgacaccctctcgcgatccaaacgctatccaacaccaataaataataattcttataaataaacaccaactaaacgaaacgtaaaacgtcaaaaa

SEQ ID NO: 34751 - DNA, 1106 bp, Artificial Sequence
  chemically treated genomic DNA (Homo sapiens) CpG-island No: 34751
ggtttttttagaatatattttttgtcgtttttgttgcgagtaagattagtttttatcgcgttagagtatattagcgtgggttttatcggtttatatgcgtttcggtgggcgtcgtcgagtattttagtgtagtgtatagtagtagcgtgatattagtaagttggatatcgcgtagatggcgatgattaggtatacgttgtatttattagggttatttcgggcgttacgtttattgaagttcgcgacgagttttgggtgtttggttgttttttataagcgatataagtatagtggtcgggtcgttagcgacggttcgttatggttttttattagtattagtaggcgcggcgtggcgagttagttttatttagagcgcgcgtcgtattgatttcgtcgtgtataagtttatacgcgaaacgggatgcgtggtattaatcgtcgtcgttgtaatttatacgatagttacgcgttgtatttagagttagcgtttattcgcgtattttagttattacgtgattcgtatttatcgatcgtagtattagttattgattgtatcgttcgcgttgttagcgggagacgttagtagcgcggagcgttgtcgttttcgtttagtacgaatatttgtagcgttaagttgttgttagaggcggtacgtttttatcgcgcgcgtttatttggaattgtagtagtttagtttttcgtggtttagcggttgtagcgtagtatattttgtcgttttcgcgtgtatcgatacgtagttcgatagcgagcgttcgtttaatcgtcgtttattagcgagtaggatattagggcgtttttttgcgcgttcgcgttttcgtagatatcgtgaagatgtggtagtttggcgggttgtttttttttacgatatcgtgtattcggattgcgcgaacgtaggcgcgttgtcgtttacgtcgttatttttatagatatttggtcgtggtttatagcggaggcgagttttttttcgcgcggttattattagtttataggtcgatattttttcgcggtttaagcgttgtttagtattaatgagtagtaatttttgtaggtggatattagttgaacggaacgtgaggcgttagaga

SEQ ID NO: 34752 - DNA, 1106 bp, Artificial Sequence
  chemically treated genomic DNA (Homo sapiens) CpG-island No: 34752
tctctaacgcctcacgttccgttcaactaatatccacctacaaaaattactactcattaatactaaacaacgcttaaaccgcgaaaaaatatcgacctataaactaataataaccgcgcgaaaaaaaactcgcctccgctataaaccacgaccaaatatctataaaaataacgacgtaaacgacaacgcgcctacgttcgcgcaatccgaatacacgatatcgtaaaaaaaaacaacccgccaaactaccacatcttcacgatatctacgaaaacgcgaacgcgcaaaaaaacgccctaatatcctactcgctaataaacgacgattaaacgaacgctcgctatcgaactacgtatcgatacacgcgaaaacgacaaaatatactacgctacaaccgctaaaccacgaaaaactaaactactacaattccaaataaacgcgcgcgataaaaacgtaccgcctctaacaacaacttaacgctacaaatattcgtactaaacgaaaacgacaacgctccgcgctactaacgtctcccgctaacaacgcgaacgatacaatcaataactaatactacgatcgataaatacgaatcacgtaataactaaaatacgcgaataaacgctaactctaaatacaacgcgtaactatcgtataaattacaacgacgacgattaataccacgcatcccgtttcgcgtataaacttatacacgacgaaatcaatacgacgcgcgctctaaataaaactaactcgccacgccgcgcctactaatactaataaaaaaccataacgaaccgtcgctaacgacccgaccactatacttatatcgcttataaaaaacaaccaaacacccaaaactcgtcgcgaacttcaataaacgtaacgcccgaaataaccctaataaatacaacgtatacctaatcatcgccatctacgcgatatccaacttactaatatcacgctactactatacactacactaaaatactcgacgacgcccaccgaaacgcatataaaccgataaaacccacgctaatatactctaacgcgataaaaactaatcttactcgcaacaaaaacgacaaaaaatatattctaaaaaaacc

SEQ ID NO: 34753 - DNA, 1046 bp, Artificial Sequence
  chemically treated genomic DNA (Homo sapiens) CpG-island No: 34753
cgcgagagcgtgtcggtttatgagttggtggtatcgcgcgggacgggggttcgttttcgttgtgggttatcgttagcgtgttgtggaagtggtcgacgtgaacgataacgtttcggcgttcgcgtagtttagtatatcgtgttcgtgaaggagaataatttattaggttgttatattttatagtgtcggcgcgggacgcggacgcgtaggagaacgcgttggtgttttttcgttggtggagcggcggttgggcgatcgcgcgttgtcgagttacgtgcggtgtacgcggagagcggtaaggtgtacgcgttgtagtcgttggattagaggagttggagttgttatagttttaggtgagcgcgcgcgatgcgggcggtcgtttttgagtagtaacgtgacgttgtaggtgttcgtgttggacgagacgataacgcgtcggtattgttggcgatttaggttggtagcgcgggagggtagttaataagttagtatcgcggtcggtgggtgcgggttacgtggtgggaaggtgcgcgtagtggatgcggatttaggttataacgcgtggtttttaatgaattgtagtcggcggcgggcggttcgcgtatttcgtttcgcgtgggttgtatacgggcgagataagtataacgcgtgttttggacgaggtagattgtcgcgttatcgatttttagtattggtgaaggattacggtgagtcggcgtgacggttacggttatcgtgttggtgtcgttggtggagagcggataggtttaaaggttttttttcggattttggcgggcgtcgcgagtttagaggttggttggtggatgttaacgtgtatttgattatcgttatttgcgtggtgttcgttttttggtatttacgttgttgttgtatacggcgttgtggtggtcggtacgtttattgagggcgcgtgcgcgtcggggaagtttacgttggtgtgtttcgcgcggtggggagttggttatattcgtagtagaggcggtagagggtggttttgaggagggtttatttaagacggattttat

SEQ ID NO: 34754 - DNA, 1046 bp, Artificial Sequence
  chemically treated genomic DNA (Homo sapiens) CpG-island No: 34754
ataaaatccgtcttaaataaaccctcctcaaaaccaccctctaccgcctctactacgaatataaccaactccccaccgcgcgaaacacaccaacgtaaacttccccgacgcgcacgcgccctcaataaacgtaccgaccaccacaacgccgtatacaacaacaacgtaaataccaaaaaacgaacaccacgcaaataacgataatcaaatacacgttaacatccaccaaccaacctctaaactcgcgacgcccgccaaaatccgaaaaaaaacctttaaacctatccgctctccaccaacgacaccaacacgataaccgtaaccgtcacgccgactcaccgtaatccttcaccaatactaaaaatcgataacgcgacaatctacctcgtccaaaacacgcgttatacttatctcgcccgtatacaacccacgcgaaacgaaatacgcgaaccgcccgccgccgactacaattcattaaaaaccacgcgttataacctaaatccgcatccactacgcgcaccttcccaccacgtaacccgcacccaccgaccgcgatactaacttattaactaccctcccgcgctaccaacctaaatcgccaacaataccgacgcgttatcgtctcgtccaacacgaacacctacaacgtcacgttactactcaaaaacgaccgcccgcatcgcgcgcgctcacctaaaactataacaactccaactcctctaatccaacgactacaacgcgtacaccttaccgctctccgcgtacaccgcacgtaactcgacaacgcgcgatcgcccaaccgccgctccaccaacgaaaaaacaccaacgcgttctcctacgcgtccgcgtcccgcgccgacactataaaatataacaacctaataaattattctccttcacgaacacgatatactaaactacgcgaacgccgaaacgttatcgttcacgtcgaccacttccacaacacgctaacgataacccacaacgaaaacgaacccccgtcccgcgcgataccaccaactcataaaccgacacgctctcgcg

SEQ ID NO: 34755 - DNA, 1046 bp, Artificial Sequence
  chemically treated genomic DNA (Homo sapiens) CpG-island No: 34755
atgaggttcgttttaggtgggttttttttagagttattttttgtcgtttttgttgcgagtatgattagttttttatcgcgcggagtatattagcgtgggttttttcggcgcgtacgcgtttttagtgggcgtgtcgattattatagcgtcgtatatagtagtagcgtgagtattaggaggcggatattacgtagatggcgatgattaggtatacgttgatatttattagttagtttttgggttcgcggcgttcgttaaagttcgggaagaggtttttgggtttgttcgttttttattaacgatattagtacggtggtcgtggtcgttacgtcggtttatcgtgattttttattagtattagaagtcggtggcgcggtagtttgtttcgtttagggtacgcgttgtgtttatttcgttcgtgtatagtttacgcggaacgggatgcgcgagtcgttcgtcgtcggttgtaatttattgaaagttacgcgttgtagtttgagttcgtatttattgcgcgtatttttttattacgtggttcgtatttatcgatcgcggtattagtttgttaattgttttttcgcgttgttagtttgagtcgttagtagtgtcggcgcgttgtcgtttcgtttagtacgaatatttgtagcgttacgttgttgtttagaggcggtcgttcgtatcgcgcgcgtttatttggaattgtagtagttttagtttttttggtttagcggttgtagcgcgtatattttgtcgtttttcgcgtgtatcgtacgtagttcgatagcgcgcggtcgtttaatcgtcgttttattagcgagaggatattagcgcgtttttttgcgcgttcgcgtttcgcgtcgatattgtaagatgtggtagtttggtgggttgtttttttttacgaatacggtatattgggttgcgcgaacgtcggagcgttgtcgtttacgtcggttatttttataatacgttggcggtggtttatagcgaaggcgagttttcgtttcgcgcggtattattagtttatagatcgatacgttttcgcg

SEQ ID NO: 34756 - DNA, 1046 bp, Artificial Sequence
  chemically treated genomic DNA (Homo sapiens) CpG-island No: 34756
cgcgaaaacgtatcgatctataaactaataataccgcgcgaaacgaaaactcgccttcgctataaaccaccgccaacgtattataaaaataaccgacgtaaacgacaacgctccgacgttcgcgcaacccaatataccgtattcgtaaaaaaaaacaacccaccaaactaccacatcttacaatatcgacgcgaaacgcgaacgcgcaaaaaaacgcgctaatatcctctcgctaataaaacgacgattaaacgaccgcgcgctatcgaactacgtacgatacacgcgaaaaacgacaaaatatacgcgctacaaccgctaaaccaaaaaaactaaaactactacaattccaaataaacgcgcgcgatacgaacgaccgcctctaaacaacaacgtaacgctacaaatattcgtactaaacgaaacgacaacgcgccgacactactaacgactcaaactaacaacgcgaaaaaacaattaacaaactaataccgcgatcgataaatacgaaccacgtaataaaaaaatacgcgcaataaatacgaactcaaactacaacgcgtaactttcaataaattacaaccgacgacgaacgactcgcgcatcccgttccgcgtaaactatacacgaacgaaataaacacaacgcgtaccctaaacgaaacaaactaccgcgccaccgacttctaatactaataaaaaatcacgataaaccgacgtaacgaccacgaccaccgtactaatatcgttaataaaaaacgaacaaacccaaaaacctcttcccgaactttaacgaacgccgcgaacccaaaaactaactaataaatatcaacgtatacctaatcatcgccatctacgtaatatccgcctcctaatactcacgctactactatatacgacgctataataatcgacacgcccactaaaaacgcgtacgcgccgaaaaaacccacgctaatatactccgcgcgataaaaaactaatcatactcgcaacaaaaacgacaaaaaataactctaaaaaaaacccacctaaaacgaacctcat

SEQ ID NO: 34757 - DNA, 1131 bp, Artificial Sequence
  chemically treated genomic DNA (Homo sapiens) CpG-island No: 34757
ggtgttaacgggtagtgaattgttcgttgacgttttacgttttttttaagttggtgtttattttaagaattattattcgttggtgttggatagtgttttggatcgcgagagcggtcggtttatgagttggtggtaatcgcgcgggacgggggttcgttttcgtgtgggttatcgttagtttgtttgtggaggtggtcgatatgaatgataagtttcggcgttcgcgtagttcgagtatatagtgttcgtgaaggagaatattcgtcgggttgttatatttttacggtgtttgcgcgagacgcggacgcgaggagaacgcgttggtgttttattcgttggtggagcggcgggtgggcgacgcgcgttgtcgagttatatttcggtgtacgcggagagcggtaaggtgtcgcgttgtagtcgttggattacgaggagttagagttgttgtagttttagtgagcgcgcgcgacgcgggcgtgtcgtttttgggtagtaacgtgacgtttaggtgttcgtgttggacgagaacgataacgcgtcggcgttgttggcgttcgggtgggtggtattggtggtgtagtgagcgagttggtgtcgcggttatgggtgtaggttaagtggtggcgaaggtgcgcgtagttgacgtcgattcggttataacgcgtggttttcgtatgagttgtagttttcggtaagtagcgtcgtttttcgtttcgcgtggggttgtatacgggcgagattagtattattgtgttttggacgaagcggatttttcgcgttatcggttgttggtgttggtaaagattacggtgagtcggcgttgatagcgacggttacggttttggtgtgttggtggagagtggttaggttttaaaggcgttattacgggcgtcggtggcgtcgcgggtttagaggcggcgttggtggatgttaacgtgtatttgatatcgttatttgcgcggtatttagtttgttggtttttacgttattgttgttatagcgttgcggtgttcggcgttatttatcgagggcgcgtgtacggcgataagtttacgttggtgtgttttagcgtagtggggagttggtcgtattttagtagaggcggtagagggtgtgtttcggggagggttt

SEQ ID NO: 34758 - DNA, 1131 bp, Artificial Sequence
  chemically treated genomic DNA (Homo sapiens) CpG-island No: 34758
aaaccctccccgaaacacaccctctaccgcctctactaaaatacgaccaactccccactacgctaaaacacaccaacgtaaacttatcgccgtacacgcgccctcgataaataacgccgaacaccgcaacgctataacaacaataacgtaaaaaccaacaaactaaataccgcgcaaataacgatatcaaatacacgttaacatccaccaacgccgcctctaaacccgcgacgccaccgacgcccgtaataacgcctttaaaacctaaccactctccaccaacacaccaaaaccgtaaccgtcgctatcaacgccgactcaccgtaatctttaccaacaccaacaaccgataacgcgaaaaatccgcttcgtccaaaacacaataatactaatctcgcccgtatacaaccccacgcgaaacgaaaaacgacgctacttaccgaaaactacaactcatacgaaaaccacgcgttataaccgaatcgacgtcaactacgcgcaccttcgccaccacttaacctacacccataaccgcgacaccaactcgctcactacaccaccaataccacccacccgaacgccaacaacgccgacgcgttatcgttctcgtccaacacgaacacctaaacgtcacgttactacccaaaaacgacacgcccgcgtcgcgcgcgctcactaaaactacaacaactctaactcctcgtaatccaacgactacaacgcgacaccttaccgctctccgcgtacaccgaaatataactcgacaacgcgcgtcgcccacccgccgctccaccaacgaataaaacaccaacgcgttctcctcgcgtccgcgtctcgcgcaaacaccgtaaaaatataacaacccgacgaatattctccttcacgaacactatatactcgaactacgcgaacgccgaaacttatcattcatatcgaccacctccacaaacaaactaacgataacccacacgaaaacgaacccccgtcccgcgcgattaccaccaactcataaaccgaccgctctcgcgatccaaaacactatccaacaccaacgaataataattcttaaaataaacaccaacttaaaaaaaacgtaaaacgtcaacgaacaattcactacccgttaacacc

SEQ ID NO: 34759 - DNA, 1131 bp, Artificial Sequence
  chemically treated genomic DNA (Homo sapiens) CpG-island No: 34759
gggtttttttcggagtatattttttgtcgtttttgttggagtacgattagttttttattgcgttggagtatattagcgtgggtttgtcgtcgtgtacgcgttttcggtgggtggcgtcgagtatcgtagcgttgtgatagtagtagcgtgaggattagtaggttggatatcgcgtagatggcgatattaggtatacgttgatatttattagcgtcgtttttgggttcgcggcgttatcgacgttcgtgatgacgtttttggagtttggttattttttattagtatattagaatcgtggtcgtcgttgttagcgtcggtttatcgtggtttttattagtattagtagtcggtggcgcggagagttcgtttcgtttaggatatagtggtgttgatttcgttcgtgtatagttttacgcgaaacgggaagcgacgttgtttgtcgggggttgtagtttatacgaaagttacgcgttgtagtcgagtcggcgttaattgcgcgtattttcgttattatttggtttgtatttatgatcgcggtattagttcgtttattgtattattagtattatttattcgagcgttagtagcgtcggcgcgttgtcgttttcgtttagtacgaatatttgagcgttacgttgttgtttagaggcggtacgttcgcgtcgcgcgcgtttattgaaattgtagtagttttagtttttcgtggtttagcggttgtagcgcgatattttgtcgtttttcgcgtgtatcgaaatgtagttcgataacgcgcgtcgtttattcgtcgttttattagcgagtaggatattagcgcgtttttttcgcgttcgcgtttcgcgtagatatcgtgaagatgtggtagttcggcgggtgtttttttttacgaatattgtgtattcgggttgcgcgaacgtcggagtttgttatttatgtcggttatttttatagataagttggcggtggtttatacgaaggcgagttttcgtttcgcgcggttattattaatttataggtcgatcgttttcgcggtttagggtattgtttagtattaacgagtagtaatttttaaggtggatattagtttgaaagggacgtgaggcgttagcgagtagtttattgttcgttggtatt

SEQ ID NO: 34760 - DNA, 1131 bp, Artificial Sequence
  chemically treated genomic DNA (Homo sapiens) CpG-island No: 34760
aataccaacgaacaataaactactcgctaacgcctcacgtccctttcaaactaatatccaccttaaaaattactactcgttaatactaaacaataccctaaaccgcgaaaacgatcgacctataaattaataataaccgcgcgaaacgaaaactcgccttcgtataaaccaccgccaacttatctataaaaataaccgacataaataacaaactccgacgttcgcgcaacccgaatacacaatattcgtaaaaaaaaacacccgccgaactaccacatcttcacgatatctacgcgaaacgcgaacgcgaaaaaaacgcgctaatatcctactcgctaataaaacgacgaataaacgacgcgcgttatcgaactacatttcgatacacgcgaaaaacgacaaaatatcgcgctacaaccgctaaaccacgaaaaactaaaactactacaatttcaataaacgcgcgcgacgcgaacgtaccgcctctaaacaacaacgtaacgctcaaatattcgtactaaacgaaaacgacaacgcgccgacgctactaacgctcgaataaataatactaataatacaataaacgaactaataccgcgatcataaatacaaaccaaataataacgaaaatacgcgcaattaacgccgactcgactacaacgcgtaactttcgtataaactacaacccccgacaaacaacgtcgcttcccgtttcgcgtaaaactatacacgaacgaaatcaacaccactatatcctaaacgaaacgaactctccgcgccaccgactactaatactaataaaaaccacgataaaccgacgctaacaacgacgaccacgattctaatatactaataaaaaataaccaaactccaaaaacgtcatcacgaacgtcgataacgccgcgaacccaaaaacgacgctaataaatatcaacgtatacctaatatcgccatctacgcgatatccaacctactaatcctcacgctactactatcacaacgctacgatactcgacgccacccaccgaaaacgcgtacacgacgacaaacccacgctaatatactccaacgcaataaaaaactaatcgtactccaacaaaaacgacaaaaaatatactccgaaaaaaaccc

SEQ ID NO: 34761 - DNA, 1116 bp, Artificial Sequence
  chemically treated genomic DNA (Homo sapiens) CpG-island No: 34761
gagattttggagttaacggataggttatttgtttttgacgtttcgcgttttttttaagttggtgtttatttttaagaattttatttattggtgttggatagcgttttggatcgcgagagtgtgttcgttatgagttggtggttatcgcgcgggacgggggttcgttttttttgtgggtattgttagcgtgttcgtggaggtggtcgacgtgaacgataacgtttcgggttcgcgtagttcgagtatacggtgttcgtgaaggagaataattcgtcggttgttatatttttattgtgtcggcgggggacgcggacgcgtagaagaagcgttggtgttttattcgttggtggagttgcgggtgggcgagcgcgcgcgtcgagttacgtgttagtgtacgcggagagcggtaaggtgtacgcgttgagtcgttggattacgaggagttggagttgttgtagttttaggtgagcgtcgcgatgcgggcgtgtcgtttttgggtagtaacgtgacgttgtaggtgtcgtgttggacgagaacgataacgcgtcggtattgttggcgtttcgggtggtggtattggtggcgtagtgagagagtttgtgtcgcggtttgtgggcgcggttatgtggtggcgaaggtacgtgtagttgacgttgatttaggttatacgcgtggttttcgtatgagttgtaatcggtggcggtcggtgcgagtattcgtttcgcgtggggttgtatattggtgagattagtacgatacgagttttgatgagacggacgtatcgcgttatcgttttttggtgtttgtgaaggattcggggagttttcgttgatagttatagttatcgtgttggtgtcgttggtgaaagcggttaggtattaaaggcgtcgtcgcgggtatcgttgggtattgcggtttagagatcgagttggtggatgttaacgtgtatttgattatcgttattgcgcggtgtttagtttgttggtgtttattttgttgttgtatacggcgtgcggtgtttagcgtcgttttttgagggcgtatgtagtttggtaaagttattttggtgtgttttagcgcggtggggagttggttatttttttagtagagcggtag

SEQ ID NO: 34762 - DNA, 1116 bp, Artificial Sequence
  chemically treated genomic DNA (Homo sapiens) CpG-island No: 34762
ctaccgctctactaaaaaaataaccaactccccaccgcgctaaaacacaccaaaataactttaccaaactacatacgccctcaaaaaacgacgctaaacaccgcacgccgtatacaacaacaaaataaacaccaacaaactaaacaccgcgcaataacgataatcaaatacacgttaacatccaccaactcgatctctaaaccgcaatacccaacgatacccgcgacgacgcctttaatacctaaccgctttcaccaacgacaccaacacgataactataactatcaacgaaaactccccgaatccttcacaaacaccaaaaaacgataacgcgatacgtccgtctcatcaaaactcgtatcgtactaatctcaccaatatacaaccccacgcgaaacgaatactcgcaccgaccgccaccgattacaactcatacgaaaaccacgcgtataacctaaatcaacgtcaactacacgtaccttcgccaccacataaccgcgcccacaaaccgcgacacaaactctctcactacgccaccaataccaccacccgaaacgccaacaataccgacgcgttatcgttctcgtccaacacgacacctacaacgtcacgttactacccaaaaacgacacgcccgcatcgcgacgctcacctaaaactacaacaactccaactcctcgtaatccaacgactcaacgcgtacaccttaccgctctccgcgtacactaacacgtaactcgacgcgcgcgctcgcccacccgcaactccaccaacgaataaaacaccaacgcttcttctacgcgtccgcgtcccccgccgacacaataaaaatataacaaccgacgaattattctccttcacgaacaccgtatactcgaactacgcgaacccgaaacgttatcgttcacgtcgaccacctccacgaacacgctaacaatacccacaaaaaaaacgaacccccgtcccgcgcgataaccaccaactcataacgaacacactctcgcgatccaaaacgctatccaacaccaataaataaaattcttaaaaataaacaccaacttaaaaaaaacgcgaaacgtcaaaaacaaataacctatccgttaactccaaaatctc

SEQ ID NO: 34763 - DNA, 1116 bp, Artificial Sequence
  chemically treated genomic DNA (Homo sapiens) CpG-island No: 34763
ttgtcgttttgttgggagaatgattagttttttatcgcgttggagtatattagagtggttttattaaattatatgcgtttttagaggacggcgttgagtatcgtacgtcgtgtatagtagtagggtaagtattaatagattggatatcgcgtagtggcgatgattaggtatacgttgatatttattagttcggtttttgggtcgtaatgtttaacgatgttcgcgacgacgtttttggtgtttggtcgtttttattagcgatattagtacggtggttgtggttgttagcgagggtttttcgggttttttataagtattagaaggcggtggcgcggtgcgttcgttttattagggttcgtgtcgtgttgattttattagtgtatagttttacgcggaacggatgttcgtatcggtcgttatcggttgtaatttatacgaaagttacgcgtgtagtttgagttagcgttaattgtacgtattttcgttattatatggtcgcgtttatagatcgcggtataagtttttttattgcgttattagtgttattattcgaggcgttagtagtgtcggcgcgttgtcgttttcgtttagtacgatatttgtagcgttacgttgttgtttagaggcggtacgttcgtatcgcggcgtttatttggaattgtaatagttttagtttttcgtggtttaacggtttagcgcgtatattttgtcgtttttcgcgtgtattgatacgtagttcgacgcgcgcgttcgtttattcgtagttttattagcgagtaggatattagcgttttttttgcgcgttcgcgtttttcgtcgatatagtgaagatgtggtagtcggcgggttgtttttttttacgaatatcgtatattcgggttgcgcgaattcggggcgttgtcgtttacgtcggttatttttacggatacgttagtagtgtttatagagaaggcgagttttcgtttcgcgcggtaattattagtttatggcggatatattttcgcggtttagagcgttgtttagtattaatgaatagaatttttgaaggtggatattaatttgaagggaacgcggggcgttagggataggtaatttgttcgttgattttaaaatttt

SEQ ID NO: 34764 - DNA, 1116 bp, Artificial Sequence
  chemically treated genomic DNA (Homo sapiens) CpG-island No: 34764
aaaattttaaaatcaacgaacaaattacctatccctaacgccccgcgttcccttcaaattaatatccaccttcaaaaattctattcattaatactaaacaacgctctaaaccgcgaaaatatatccgccataaactaataattaccgcgcgaaacgaaaactcgccttctctataaacactactaacgtatccgtaaaaataaccgacgtaaacgacaacgccccgaattcgcgcaacccgaatatacgatattcgtaaaaaaaaacaacccgccgactaccacatcttcactatatcgacgaaaaacgcgaacgcgcaaaaaaaacgctaatatcctactcgctaataaaactacgaataaacgaacgcgcgcgtcgaactacgtatcaatacacgcgaaaaacgacaaaatatacgcgctaaaccgttaaaccacgaaaaactaaaactattacaattccaaataaacgccgcgatacgaacgtaccgcctctaaacaacaacgtaacgctacaaatatcgtactaaacgaaaacgacaacgcgccgacactactaacgcctcgaataataacactaataacgcaataaaaaaacttataccgcgatctataaacgcgaccatataataacgaaaatacgtacaattaacgctaactcaaactacacgcgtaactttcgtataaattacaaccgataacgaccgatacgaacatccgttccgcgtaaaactatacactaataaaatcaacacgacacgaaccctaataaaacgaacgcaccgcgccaccgccttctaatacttataaaaaacccgaaaaaccctcgctaacaaccacaaccaccgtactaatatcgctaataaaaacgaccaaacaccaaaaacgtcgtcgcgaacatcgttaaacattacgacccaaaaaccgaactaataaatatcaacgtatacctaatcatcgccactacgcgatatccaatctattaatacttaccctactactatacacgacgtacgatactcaacgccgtcctctaaaaacgcatataatttaataaaaccactctaatatactccaacgcgataaaaaactaatcattctcccaacaaaacgacaa

SEQ ID NO: 34765 - DNA, 558 bp, Artificial Sequence
  chemically treated genomic DNA (Homo sapiens) CpG-island No: 34765
gttatcgcgttttgttttgatttttgttagttcgcgtttcgttttttttcgcgttttgtttttgttcgcgttttgtatttgttcgcgtttcgtttttacgcgtgcgtcgtttttattcgtgtttcgtttttagttaagttcggttcgtgtttatttttattcgtcgttttgcgttgtttttttcggtttttcgttagtagtcggtattcgtttagtttaatagtgatagagtagggcgcgtagtcgttgagtgttttggagtttttgtttcgaggtgttacgtttacgtcggttttattcgggtaggtatggggcggtcgggtttagcgtcgtatttcgtcggttagagttattgtttttttagacgcggttttagcgtttattggggatggtaaagacgatattcggtgcgtcgaggttgtttataaaagtaagttttgttggttgtaggcgttcgtatcggttagtgtaaaggtggtttagagtgttaagcggcggagtcgaggttttgagaagtatttttttgtttgcgttgggtagcgggttgcgtgtgattgg

SEQ ID NO: 34766 - DNA, 558 bp, Artificial Sequence
  chemically treated genomic DNA (Homo sapiens) CpG-island No: 34766
ccaatcacacgcaacccgctacccaacgcaaacaaaaaaatacttctcaaaacctcgactccgccgcttaacactctaaaccacctttacactaaccgatacgaacgcctacaaccaacaaaacttacttttataaacaacctcgacgcaccgaatatcgtctttaccatccccaataaacgctaaaaccgcgtctaaaaaaacaataactctaaccgacgaaatacgacgctaaacccgaccgccccatacctacccgaataaaaccgacgtaaacgtaacacctcgaaacaaaaactccaaaacactcaacgactacgcgccctactctatcactattaaactaaacgaataccgactactaacgaaaaaccgaaaaaaacaacgcaaaacgacgaataaaaataaacacgaaccgaacttaactaaaaacgaaacacgaataaaaacgacgcacgcgtaaaaacgaaacgcgaacaaatacaaaacgcgaacaaaaacaaaacgcgaaaaaaaacgaaacgcgaactaacaaaaatcaaaacaaaacgcgataac

SEQ ID NO: 34767 - DNA, 558 bp, Artificial Sequence
  chemically treated genomic DNA (Homo sapiens) CpG-island No: 34767
ttagttatacgtagttcgttgtttagcgtaagtagaaaggtgttttttaaagtttcggtttcgtcgtttggtattttgggttatttttgtattggtcgatgcgggcgtttgtagttagtaagatttatttttgtgagtagtttcggcgtatcggatgtcgtttttgttatttttagtgggcgttggggtcgcgtttggagagatagtggttttggtcggcggggtgcggcgttaagttcgatcgttttatgtttgttcgggtgaggtcgacgtgggcgtggtatttcggggtagggattttagagtatttagcggttgcgcgttttgttttgttattgttgggttaggcgggtgtcggttgttggcgaggagtcggaaggggtagcgtaaggcggcgggtgggagtgggtacgggtcgggtttagttaggagcggggtacggataggagcggcgtacgcgtaggagcggggcgcgggtaggtatagaacgcgggtaggagtaggacgcggaggggagcggggcgcgggttggtagaggttagaataggacgcggtagt

SEQ ID NO: 34768 - DNA, 558 bp, Artificial Sequence
  chemically treated genomic DNA (Homo sapiens) CpG-island No: 34768
actaccgcgtcctattctaacctctaccaacccgcgccccgctcccctccgcgtcctactcctacccgcgttctatacctacccgcgccccgctcctacgcgtacgccgctcctatccgtaccccgctcctaactaaacccgacccgtacccactcccacccgccgccttacgctaccccttccgactcctcgccaacaaccgacacccgcctaacccaacaataacaaaacaaaacgcgcaaccgctaaatactctaaaatccctaccccgaaataccacgcccacgtcgacctcacccgaacaaacataaaacgatcgaacttaacgccgcaccccgccgaccaaaaccactatctctccaaacgcgaccccaacgcccactaaaaataacaaaaacgacatccgatacgccgaaactactcacaaaaataaatcttactaactacaaacgcccgcatcgaccaatacaaaaataacccaaaataccaaacgacgaaaccgaaactttaaaaaacacctttctacttacgctaaacaacgaactacgtataactaa

SEQ ID NO: 34769 - DNA, 642 bp, Artificial Sequence
  chemically treated genomic DNA (Homo sapiens) CpG-island No: 34769
  unsure (270, 376, 421)
cgtcgattgattcgcgaggatcgttagtagaattatatatagtatatcggttaagggtaaaaaaatcgttagcgtattgttcggtaataaaggcgtggtaggtttgcgaacgttatttacgcggggaatagtgcgtttttagttgcgttatagtagatagtttattaaaacgtaggcggttagtaatagtattaatagtaggttggtaagcgcgttttttgtttgtaggttaatgtcgttttgggttaattattgttagttaattatcgntagcgttcggggattatttggttcgagaataattgttatatttacgatcgatagcgattaggtaataatcggtagtatcgttattgttagcgtaggcgcgacgganggtaatagtagttagttagcggtttatttgtatattaatcgtttnttatagacgacgaattttacggttattgttttcggttagagttacgttgtattattggttgattttttcgtcgtcgttgaatttgatggttttaaaagttgtcggattattttttaattgtacgttacgatttaaattacgtagtttcgcgtcgttaatttgattaaatatacgtacggtatatttacgtttaattttacggtttgggtgtattaaacggt

SEQ ID NO: 34770 - DNA, 642 bp, Artificial Sequence
  chemically treated genomic DNA (Homo sapiens) CpG-island No: 34770
  unsure (222, 267, 373)
accgtttaatacacccaaaccgtaaaattaaacgtaaatataccgtacgtatatttaatcaaattaacgacgcgaaactacgtaatttaaatcgtaacgtacaattaaaaaataatccgacaacttttaaaaccatcaaattcaacgacgacgaaaaaatcaaccaataatacaacgtaactctaaccgaaaacaataaccgtaaaattcgtcgtctataanaaacgattaatatacaaataaaccgctaactaactactattaccntccgtcgcgcctacgctaacaataacgatactaccgattattacctaatcgctatcgatcgtaaatataacaattattctcgaaccaaataatccccgaacgctancgataattaactaacaataattaacccaaaacgacattaacctacaaacaaaaaacgcgcttaccaacctactattaatactattactaaccgcctacgttttaataaactatctactataacgcaactaaaaacgcactattccccgcgtaaataacgttcgcaaacctaccacgcctttattaccgaacaatacgctaacgatttttttacccttaaccgatatactatatataattctactaacgatcctcgcgaatcaatcgacg

SEQ ID NO: 34771 - DNA, 642 bp, Artificial Sequence
  chemically treated genomic DNA (Homo sapiens) CpG-island No: 34771
  unsure (222, 267, 373)
atcgtttaatgtatttaagtcgtgaagttgaacgtgaatatgtcgtgcgtgtatttggttaggttgacgacgcgaaattgcgtgatttgagtcgtggcgtgtagttggaagatggttcggtagtttttaaaattattaagtttagcggcggcgaagggattaattagtggtataacgtgattttgatcgaaggtagtaatcgtgaagttcgtcgtttgtggnaagcggttggtgtgtaggtgagtcgttaattggttgttgttgttnttcgtcgcgtttgcgttggtaatggcgatgttgtcgattgttgtttggtcgttgtcggtcgtgaatgtggtaattattttcgggttaggtaattttcggacgttgncggtaattagttggtagtggttaatttagggcgatattgatttataaataaaaggcgcgtttgttagtttgttgttgatgttgttattggtcgtttacgttttgatgagttatttgttatggcgtagttgaaggcgtattatttttcgcgtagatggcgttcgtaagtttgttacgtttttattgtcgggtaatacgttggcgatttttttatttttaatcggtgtgttgtgtgtggttttgttggcgattttcgcggattagtcgacg

SEQ ID NO: 34772 - DNA, 642 bp, Artificial Sequence
  chemically treated genomic DNA (Homo sapiens) CpG-island No: 34772
  unsure (270, 376, 421)
cgtcgactaatccgcgaaaatcgccaacaaaaccacacacaacacaccgattaaaaataaaaaaatcgccaacgtattacccgacaataaaaacgtaacaaacttacgaacgccatctacgcgaaaaataatacgccttcaactacgccataacaaataactcatcaaaacgtaaacgaccaataacaacatcaacaacaaactaacaaacgcgccttttatttataaatcaatatcgccctaaattaaccactaccaactaattaccgncaacgtccgaaaattacctaacccgaaaataattaccacattcacgaccgacaacgaccaaacaacaatcgacaacatcgccattaccaacgcaaacgcgacgaanaacaacaacaaccaattaacgactcacctacacaccaaccgcttnccacaaacgacgaacttcacgattactaccttcgatcaaaatcacgttataccactaattaatcccttcgccgccgctaaacttaataattttaaaaactaccgaaccatcttccaactacacgccacgactcaaatcacgcaatttcgcgtcgtcaacctaaccaaatacacgcacgacatattcacgttcaacttcacgacttaaatacattaaacgat

SEQ ID NO: 34773 - DNA, 607 bp, Artificial Sequence
  chemically treated genomic DNA (Homo sapiens) CpG-island No: 34773
gggtttttgttttttatattttttttgtcgtttttttcgatttttagcgttgtttcgtttttgatttcgaataatttgttggttttttttcgggttttgtttttcgggggttatcgtttcggggacgtcgggtagtcgtttcggttttcgtgggttttgtatttgatatttttttcggttttcgttttttattcgttcggagataggggttaaaggtagttcgcgttacgtggtcgtcgagtagtatcgaatcggtcgggagggtcgagggagaattcgggtggaagtcgagaaatttagtttcgatagtagcgttcggtttcgtttcggttttcgtttcggggcgtttatcgtacgttcgtcggtcgtttcggttttcggagtttttttttggtcggtatttacgcggtattacgggatcgaatttcgtttttagcggtcgcgattcggggaggtaggcgttgggtcgaggaggtaaggggagacgggtttgggggttttcggcgtacgggtacgtttttttgggttagggggcgaggtagcgcgttttaatttttagtttttagggagattttttttcgttgcgggacgagggggaggttgcgag

SEQ ID NO: 34774 - DNA, 607 bp, Artificial Sequence
  chemically treated genomic DNA (Homo sapiens) CpG-island No: 34774
ctcgcaacctccccctcgtcccgcaacgaaaaaaaatctccctaaaaactaaaaattaaaacgcgctacctcgccccctaacccaaaaaaacgtacccgtacgccgaaaacccccaaacccgtctccccttacctcctcgacccaacgcctacctccccgaatcgcgaccgctaaaaacgaaattcgatcccgtaataccgcgtaaataccgaccaaaaaaaaactccgaaaaccgaaacgaccgacgaacgtacgataaacgccccgaaacgaaaaccgaaacgaaaccgaacgctactatcgaaactaaatttctcgacttccacccgaattctccctcgaccctcccgaccgattcgatactactcgacgaccacgtaacgcgaactacctttaacccctatctccgaacgaataaaaaacgaaaaccgaaaaaaatatcaaatacaaaacccacgaaaaccgaaacgactacccgacgtccccgaaacgataacccccgaaaaacaaaacccgaaaaaaaaccaacaaattattcgaaatcaaaaacgaaacaacgctaaaaatcgaaaaaaacgacaaaaaaaatataaaaaacaaaaaccc

SEQ ID NO: 34775 - DNA, 607 bp, Artificial Sequence
  chemically treated genomic DNA (Homo sapiens) CpG-island No: 34775
ttcgtagtttttttttcgtttcgtagcggggaggggtttttttggagattgaaggttggggcgcgttgtttcgttttttagtttagaggggcgtattcgtgcgtcgagagtttttaagttcgtttttttttattttttcggtttagcgtttattttttcgaatcgcggtcgttgggagcggggttcgatttcgtgatgtcgcgtgggtgtcggttagagaagagtttcggaggtcggggcggtcggcgggcgtgcggtgagcgtttcggggcgggggtcggggcgggatcgagcgttgttatcggggttggatttttcgatttttattcggattttttttcggttttttcggtcgattcggtgttgttcggcgattacgtgacgcgggttgtttttgatttttattttcgagcgggtagggggcgggggtcggagggggtgttagatgtaggatttacgagggtcggggcggttgttcggcgttttcgaggcggtgattttcgggaaataaagttcggggggaaattaataagttattcggggttagagacgaaatagcgttgggggtcgggagaggcggtagagagaatgtgggagataaagattt

SEQ ID NO: 34776 - DNA, 607 bp, Artificial Sequence
  chemically treated genomic DNA (Homo sapiens) CpG-island No: 34776
aaatctttatctcccacattctctctaccgcctctcccgacccccaacgctatttcgtctctaaccccgaataacttattaatttccccccgaactttatttcccgaaaatcaccgcctcgaaaacgccgaacaaccgccccgaccctcgtaaatcctacatctaacaccccctccgacccccgccccctacccgctcgaaaataaaaatcaaaaacaacccgcgtcacgtaatcgccgaacaacaccgaatcgaccgaaaaaaccgaaaaaaaatccgaataaaaatcgaaaaatccaaccccgataacaacgctcgatcccgccccgacccccgccccgaaacgctcaccgcacgcccgccgaccgccccgacctccgaaactcttctctaaccgacacccacgcgacatcacgaaatcgaaccccgctcccaacgaccgcgattcgaaaaaataaacgctaaaccgaaaaaataaaaaaaaacgaacttaaaaactctcgacgcacgaatacgcccctctaaactaaaaaacgaaacaacgcgccccaaccttcaatctccaaaaaaacccctccccgctacgaaacgaaaaaaaaactacgaa

SEQ ID NO: 34777 - DNA, 588 bp, Artificial Sequence
  chemically treated genomic DNA (Homo sapiens) CpG-island No: 34777
gtcggagcgttaatttttatgatatgataattcgtcgataggttagtaatatattatcgggagtattttttattattatatatttttgcggcgtaagtttagtagttgcgcgtttaatagatacgtattaggttttggtttttcgcgtttattcgtttagcggttataaatatttttggtgcgggaagtttagttatttatggcgcgttcgcgttatcggtatggagttagaagttataatggttacggaatatttgttttatttaaatgattgagtaaggcgattgttttcggagcgcggtaatattttcggttttcgtggtttcgatgtgttttagacgcgaaattcggcggtaatattagtttcggatttgttcgttataaaatggcgcgagaggtgatcgtttgtttatcgtgaatgaaagttagtatttttttcgggttaatttatgacgtttggtttatttgttttacgttcgttttatcgtacgttagggaatttattagcgttttattaagattaaatagaaaatttttgttcgtacgcgggtttttttaggtagtgataatttgataatttcgttgcga

SEQ ID NO: 34778 - DNA, 588 bp, Artificial Sequence
  chemically treated genomic DNA (Homo sapiens) CpG-island No: 34778
tcgcaacgaaattatcaaattatcactacctaaaaaaacccgcgtacgaacaaaaattttctatttaatcttaataaaacgctaataaattccctaacgtacgataaaacgaacgtaaaacaaataaaccaaacgtcataaattaacccgaaaaaaatactaactttcattcacgataaacaaacgatcacctctcgcgccattttataacgaacaaatccgaaactaatattaccgccgaatttcgcgtctaaaacacatcgaaaccacgaaaaccgaaaatattaccgcgctccgaaaacaatcgccttactcaatcatttaaataaaacaaatattccgtaaccattataacttctaactccataccgataacgcgaacgcgccataaataactaaacttcccgcaccaaaaatatttataaccgctaaacgaataaacgcgaaaaaccaaaacctaatacgtatctattaaacgcgcaactactaaacttacgccgcaaaaatatataataataaaaaatactcccgataatatattactaacctatcgacgaattatcatatcataaaaattaacgctccgac

SEQ ID NO: 34779 - DNA, 588 bp, Artificial Sequence
  chemically treated genomic DNA (Homo sapiens) CpG-island No: 34779
tcgtaacgaaattattaaattattattgtttgaggaggttcgcgtgcgggtaaaggttttttgtttgattttgatggaacgttggtggattttttggcgtgcggtagaacgggcgtggagtaagtgggttagacgttatgggttagttcggaagaggtgttggtttttatttacggtaaataggcgattatttttcgcgttattttatggcgggtaaattcgaggttgatattgtcgtcgagtttcgcgtttggagtatatcgaggttacggaaatcgaaggtattatcgcgtttcgggggtaatcgttttatttagttatttgaataaagtaggtatttcgtggttattgtgatttttggttttatgtcggtagcgcgagcgcgttataaatagttgggtttttcgtattagaggtgtttgtaatcgttgagcgagtgaacgcggaaaattagaatttgatgcgtatttgttaggcgcgtagttgttgggtttgcgtcgtaggagtgtgtggtggtggaagatgttttcggtggtgtgttattggtttgtcggcgggttgttatgttatgggggttaacgtttcggt

SEQ ID NO: 34780 - DNA, 588 bp, Artificial Sequence
  chemically treated genomic DNA (Homo sapiens) CpG-island No: 34780
accgaaacgttaacccccataacataacaacccgccgacaaaccaataacacaccaccgaaaacatcttccaccaccacacactcctacgacgcaaacccaacaactacgcgcctaacaaatacgcatcaaattctaattttccgcgttcactcgctcaacgattacaaacacctctaatacgaaaaacccaactatttataacgcgctcgcgctaccgacataaaaccaaaaatcacaataaccacgaaatacctactttattcaaataactaaataaaacgattacccccgaaacgcgataataccttcgatttccgtaacctcgatatactccaaacgcgaaactcgacgacaatatcaacctcgaatttacccgccataaaataacgcgaaaaataatcgcctatttaccgtaaataaaaaccaacacctcttccgaactaacccataacgtctaacccacttactccacgcccgttctaccgcacgccaaaaaatccaccaacgttccatcaaaatcaaacaaaaaacctttacccgcacgcgaacctcctcaaacaataataatttaataatttcgttacga

SEQ ID NO: 34781 - DNA, 540 bp, Artificial Sequence
  chemically treated genomic DNA (Homo sapiens) CpG-island No: 34781
tttcgggtcgtagggtcgcggggacgggtgtgatgtaatcgcgttatagtcgttgcgttaaggggcggtttcgggatgcgggtattgcggtagagtcggttttgttttcgtcgttcgtcgttcgtcgttcgttttcgttgttaaattcgcggataatcgtcgggacgattatttagagttattagagttttttgatattcgtttcgaggtatcggtaatttacggtattcgtttcggtgcgtgttatgaagtcggtcgcgagttttttcgggggcggtgggggtagacgtaggggtcgcggttggggtattttgggcggggggcgaagcggcggttgtggttcgggtaaggcggggggggtaatagtggcggttaagggggtaagggtcggtttttgggtttcggtcgcgcggtttttgtggggggtcgtcggtgttcgtgggttcggtcgtcggtaacggtatggattttgggtgggggggaataatggatatgtatacgtattatgttttgtgttttaaaatagggattatttaggtt

SEQ ID NO: 34782 - DNA, 540 bp, Artificial Sequence
  chemically treated genomic DNA (Homo sapiens) CpG-island No: 34782
aacctaaataatccctattttaaaacacaaaacataatacgtatacatatccattattcccccccacccaaaatccataccgttaccgacgaccgaacccacgaacaccgacgaccccccacaaaaaccgcgcgaccgaaacccaaaaaccgacccttacccccttaaccgccactattaccccccccgccttacccgaaccacaaccgccgcttcgccccccgcccaaaataccccaaccgcgacccctacgtctacccccaccgcccccgaaaaaactcgcgaccgacttcataacacgcaccgaaacgaataccgtaaattaccgatacctcgaaacgaatatcaaaaaactctaataactctaaataatcgtcccgacgattatccgcgaatttaacaacgaaaacgaacgacgaacgacgaacgacgaaaacaaaaccgactctaccgcaatacccgcatcccgaaaccgccccttaacgcaacgactataacgcgattacatcacacccgtccccgcgaccctacgacccgaaa

SEQ ID NO: 34783 - DNA, 540 bp, Artificial Sequence
  chemically treated genomic DNA (Homo sapiens) CpG-island No: 34783
aatttggatgatttttattttagagtatagggtatgatacgtatatatatttattgtttttttttatttagaatttatatcgttatcggcgatcgggtttacgggtatcggcggttttttataaaaatcgcgcggtcggagtttaaaaatcggtttttgtttttttggtcgttattgttgtttttttcgttttgttcgggttatagtcgtcgtttcgtttttcgtttaaggtgttttagtcgcggtttttgcgtttgtttttatcgttttcgggagagttcgcggtcgattttatggtacgtatcggggcgggtgtcgtgggttatcggtgtttcggggcgggtgttagggggttttggtggttttgggtggtcgtttcggcggttgttcgcgggtttagtagcgaaggcgggcggcgggcggcgggcggcgggggtaggatcggttttatcgtagtgttcgtatttcggagtcgttttttgacgtagcggttgtggcgcgattgtattatattcgttttcgcgattttgcggttcggaa

SEQ ID NO: 34784 - DNA, 540 bp, Artificial Sequence
  chemically treated genomic DNA (Homo sapiens) CpG-island No: 34784
ttccgaaccgcaaaatcgcgaaaacgaatataatacaatcgcgccacaaccgctacgtcaaaaaacgactccgaaatacgaacactacgataaaaccgatcctacccccgccgcccgccgcccgccgcccgccttcgctactaaacccgcgaacaaccgccgaaacgaccacccaaaaccaccaaaaccccctaacacccgccccgaaacaccgataacccacgacacccgccccgatacgtaccataaaatcgaccgcgaactctcccgaaaacgataaaaacaaacgcaaaaaccgcgactaaaacaccttaaacgaaaaacgaaacgacgactataacccgaacaaaacgaaaaaaacaacaataacgaccaaaaaaacaaaaaccgatttttaaactccgaccgcgcgatttttataaaaaaccgccgatacccgtaaacccgatcgccgataacgatataaattctaaataaaaaaaaacaataaatatatatacgtatcataccctatactctaaaataaaaatcatccaaatt

SEQ ID NO: 34785 - DNA, 781 bp, Artificial Sequence
  chemically treated genomic DNA (Homo sapiens) CpG-island No: 34785
gtaggaaggtgtgggcgtttagggttacgatgcgggattggttcggttgggttacgtcggcgaagattacgtttattatttcgatgagtatgcggtatttgagcgggtgtcgcgcgttttttaggatcggaatgatgttggtgcgttttttggttacgttgattagatcgcggtcggcgcggtgggagaattcgacggcgtagattaggtcgtttgggttaatgatgtcggagatatgggagacggtggtgttcgacgcggcgtttaggtatagtattttggatttgggtttgatgtggatttggtttatttcgtttaggatggtcgcggttagtttagagcggaacgggttttacgtgcggtatttttgttttacgtcgttttcggttatcgtgacgcgtttttcgtcgtatatagattggttcggtattatgtttagcgtgattagcgcgtttttcgtttcgcggtagatgaagacgttttcgtgtcggtgcggttttatcgatattattatgggttttattttgcggcgggttttgtttttggttacgtcggttatatcgatgtttatcgttttttgagatttttgtttgaagtcggcgaacgtgttattgggttcgggtcgaatttaacggaaaattttacgcgggaagtaagttaagatagtttttttttgtcgaatggtttgtcgtttatttttaacgtgggagatgtatgttaagttttttcgcgttgggggttgggggtagttaaaaggaagttgatttatgatttattgttt

SEQ ID NO: 34786 - DNA, 781 bp, Artificial Sequence
  chemically treated genomic DNA (Homo sapiens) CpG-island No: 34786
aaacaataaatcataaatcaacttccttttaactacccccaacccccaacgcgaaaaaacttaacatacatctcccacgttaaaaataaacgacaaaccattcgacaaaaaaaaactatcttaacttacttcccgcgtaaaattttccgttaaattcgacccgaacccaataacacgttcgccgacttcaaacaaaaatctcaaaaaacgataaacatcgatataaccgacgtaaccaaaaacaaaacccgccgcaaaataaaacccataataatatcgataaaaccgcaccgacacgaaaacgtcttcatctaccgcgaaacgaaaaacgcgctaatcacgctaaacataataccgaaccaatctatatacgacgaaaaacgcgtcacgataaccgaaaacgacgtaaaacaaaaataccgcacgtaaaacccgttccgctctaaactaaccgcgaccatcctaaacgaaataaaccaaatccacatcaaacccaaatccaaaatactatacctaaacgccgcgtcgaacaccaccgtctcccatatctccgacatcattaacccaaacgacctaatctacgccgtcgaattctcccaccgcgccgaccgcgatctaatcaacgtaaccaaaaaacgcaccaacatcattccgatcctaaaaaacgcgcgacacccgctcaaataccgcatactcatcgaaataataaacgtaatcttcgccgacgtaacccaaccgaaccaatcccgcatcgtaaccctaaacgcccacaccttcctac

SEQ ID NO: 34787 - DNA, 781 bp, Artificial Sequence
  chemically treated genomic DNA (Homo sapiens) CpG-island No: 34787
aaataataaattatgggttagtttttttttggttatttttaatttttaacgcggaggggtttaatatatattttttacgttaaggataagcggtaggttattcggtaaaaaaaagttgttttagtttgtttttcgcgtggagtttttcgttgggttcgattcgagtttagtggtacgttcgtcggttttaggtaaggattttaggaggcggtagatatcgatgtggtcggcgtggttaagagtaagattcgtcgtagaatggggtttatggtggtgtcggtggagtcgtatcggtacgagggcgtttttatttatcgcggggcggaggacgcgttggttacgttgaatatggtgtcgggttagtttgtgtacggcgagaggcgcgttacggtgatcgagggcggcgtgaagtaggagtatcgtacgtggaattcgtttcgttttaagttggtcgcggttattttgggcggggtggattagatttatattaagtttaagtttaaggtgttgtatttgggcgtcgcgtcgggtattatcgttttttatgttttcgatattattggtttagacggtttggtttacgtcgtcgagtttttttatcgcgtcggtcgcgatttggttaacgtggttaagaagcgtattaatattatttcggttttggaggacgcgcggtattcgtttaagtatcgtatgtttatcgggatggtggacgtgattttcgtcgacgtggtttagtcggattagtttcgtatcgtggttttgaacgtttatatttttttgt

SEQ ID NO: 34788 - DNA, 781 bp, Artificial Sequence
  chemically treated genomic DNA (Homo sapiens) CpG-island No: 34788
acaaaaaaatataaacgttcaaaaccacgatacgaaactaatccgactaaaccacgtcgacgaaaatcacgtccaccatcccgataaacatacgatacttaaacgaataccgcgcgtcctccaaaaccgaaataatattaatacgcttcttaaccacgttaaccaaatcgcgaccgacgcgataaaaaaactcgacgacgtaaaccaaaccgtctaaaccaataatatcgaaaacataaaaaacgataatacccgacgcgacgcccaaatacaacaccttaaacttaaacttaatataaatctaatccaccccgcccaaaataaccgcgaccaacttaaaacgaaacgaattccacgtacgatactcctacttcacgccgccctcgatcaccgtaacgcgcctctcgccgtacacaaactaacccgacaccatattcaacgtaaccaacgcgtcctccgccccgcgataaataaaaacgccctcgtaccgatacgactccaccgacaccaccataaaccccattctacgacgaatcttactcttaaccacgccgaccacatcgatatctaccgcctcctaaaatccttacctaaaaccgacgaacgtaccactaaactcgaatcgaacccaacgaaaaactccacgcgaaaaacaaactaaaacaacttttttttaccgaataacctaccgcttatccttaacgtaaaaaatatatattaaacccctccgcgttaaaaattaaaaataaccaaaaaaaaactaacccataatttattattt

SEQ ID NO: 34789 - DNA, 771 bp, Artificial Sequence
  chemically treated genomic DNA (Homo sapiens) CpG-island No: 34789
tttcgatattggatagttttgcgacgtattcgtttaattttcgcggagtttgggtttaattttttttcgtttcgattttttttcggcgataggggaatatttatagtgattatttttgtgtgttcggcgggcgcggttcgtgttgaggggggtttcgggggtggtgtatttttaggggggcgttcgatgtttacgttggggtttcgttcgggcggtttttggtgcggtcgttgtagatgtggcgatgaaagcggcggttttttcgagggttagggacgggttcgaattcggggatgcgcgcgcggatggtcgggtttcggggtggtttgcgggcggtaggggatggaaagagggagcgggcgcggggttgaggacgttttttgcgcggtttcgcggggttcggggaggttgcgtttatcgatagagatcgcggcgttttgtttttcgtcgtcggttttcggtcggtttaagatcggtttcgtgtgtttaagtttttttttatggtttatttttttttttttttttcggttcgcgttgcgcgtttcgcgttttggatcgcgtcgtcgtcgtttttagttttttatagtagtagttgttagcgtcggcgtcgtttattggttgcggcgatcgagtttcgttttttcgcggttttcgacggcgcggtaggtggaagtgagcgcgtattggtcgggattttgaattttttaaaagcgtattttaggtgttcgggttgttagatttgggttttttttttttcgaggtttttgtttt

SEQ ID NO: 34790 - DNA, 771 bp, Artificial Sequence
  chemically treated genomic DNA (Homo sapiens) CpG-island No: 34790
aaaacaaaaacctcgaaaaaaaaaaaacccaaatctaacaacccgaacacctaaaatacgcttttaaaaaattcaaaatcccgaccaatacgcgctcacttccacctaccgcgccgtcgaaaaccgcgaaaaaacgaaactcgatcgccgcaaccaataaacgacgccgacgctaacaactactactataaaaaactaaaaacgacgacgacgcgatccaaaacgcgaaacgcgcaacgcgaaccgaaaaaaaaaaaaaaaaataaaccataaaaaaaaacttaaacacacgaaaccgatcttaaaccgaccgaaaaccgacgacgaaaaacaaaacgccgcgatctctatcgataaacgcaacctccccgaaccccgcgaaaccgcgcaaaaaacgtcctcaaccccgcgcccgctccctctttccatcccctaccgcccgcaaaccaccccgaaacccgaccatccgcgcgcgcatccccgaattcgaacccgtccctaaccctcgaaaaaaccgccgctttcatcgccacatctacaacgaccgcaccaaaaaccgcccgaacgaaaccccaacgtaaacatcgaacgcccccctaaaaatacaccacccccgaaacccccctcaacacgaaccgcgcccgccgaacacacaaaaataatcactataaatattcccctatcgccgaaaaaaaatcgaaacgaaaaaaaattaaacccaaactccgcgaaaattaaacgaatacgtcgcaaaactatccaatatcgaaa

SEQ ID NO: 34791 - DNA, 771 bp, Artificial Sequence
  chemically treated genomic DNA (Homo sapiens) CpG-island No: 34791
gaagtaagggtttcgagggaaggagggtttaaatttggtaattcgagtatttaggatgcgtttttgggggatttagagtttcgattagtgcgcgtttatttttatttgtcgcgtcgtcgggagtcgcgaggaggcggagttcggtcgtcgtagttaatgagcgacgtcggcgttggtagttgttgttataaagggttgggggcggcggcggcgcggtttagagcgcggagcgcgtagcgcgggtcggagggagggagggagggtgggttatgggaaaagatttgaatatacgggatcggttttggatcgatcgagggtcggcggcgaaaggtagagcgtcgcgatttttgtcggtaagcgtaattttttcgggtttcgcggggtcgcgtagggggcgtttttaatttcgcgttcgttttttttttttattttttgtcgttcgtaggttatttcggggttcggttattcgcgcgcgtattttcgggttcgggttcgtttttggttttcgagggagtcgtcgtttttatcgttatatttgtagcggtcgtattagaggtcgttcgggcgggattttagcgtgagtatcgggcgtttttttaggagtgtattattttcggagttttttttaatacggatcgcgttcgtcgggtatataagaatggttattgtaggtatttttttgtcgtcgaaagggaatcgggacggggaggagttgggtttaggtttcgcggagattgggcgggtgcgtcgtagggttatttagtatcggag

SEQ ID NO: 34792 - DNA, 771 bp, Artificial Sequence
  chemically treated genomic DNA (Homo sapiens) CpG-island No: 34792
ctccgatactaaataaccctacgacgcacccgcccaatctccgcgaaacctaaacccaactcctccccgtcccgattccctttcgacgacaaaaaaatacctacaataaccattcttatatacccgacgaacgcgatccgtattaaaaaaaactccgaaaataatacactcctaaaaaaacgcccgatactcacgctaaaatcccgcccgaacgacctctaatacgaccgctacaaatataacgataaaaacgacgactccctcgaaaaccaaaaacgaacccgaacccgaaaatacgcgcgcgaataaccgaaccccgaaataacctacgaacgacaaaaaataaaaaaaaaaaacgaacgcgaaattaaaaacgccccctacgcgaccccgcgaaacccgaaaaaattacgcttaccgacaaaaatcgcgacgctctacctttcgccgccgaccctcgatcgatccaaaaccgatcccgtatattcaaatcttttcccataacccaccctccctccctccctccgacccgcgctacgcgctccgcgctctaaaccgcgccgccgccgcccccaaccctttataacaacaactaccaacgccgacgtcgctcattaactacgacgaccgaactccgcctcctcgcgactcccgacgacgcgacaaataaaaataaacgcgcactaatcgaaactctaaatcccccaaaaacgcatcctaaatactcgaattaccaaatttaaaccctccttccctcgaaacccttacttc

SEQ ID NO: 34793 - DNA, 1929 bp, Artificial Sequence
  chemically treated genomic DNA (Homo sapiens) CpG-island No: 34793
  unsure (465, 1733)
tataagaatatatacgaatttcgtttcggatcgagagtaggggcgaatacgtaaatttatttagaatttattatttattatgcgtaggatacgtggtatttattgggtagatgtaattttatttatacggtgcgtattaaagtatcgggggcgttaatatgggacgcgggtaggtgacgatattggggtaggagtaaatcggtcgttttagcggtaattgtaatttggggaatattacggagtaggggtgagtattatttcgtcgtacgaggttaggggtcgaaattcggagtcgatacgtcgtttaacgtaggggagtaatttagcgggagaatacgaacgttttcgtcgagtataatacgatatcgtacgattttataacgttgggggacggcgatagtattatagcgggatattgtacgataagcgtagttattatatatataaggttttagcgggggtttnattatagggggcgatttacgataatacgatacgatatatgtatcgagcgcgtcgacgggtacgttaggttattgggggcgagggcgttatcgtagtatttatcgacgtatatatacgtttagttcgtagcgttcgataataaatcgaagttcgtatagcgcggtaatttgggtgggggtgattatatacgtacgtatagattagttagtacgtcgcgttgataatatagaacgtttagcgagatagcgtacggtatagataaaagatagacgacgacgagcgagagacgtaattaagtagtagtagtacgtacgaatagggacgcgatagatagtgatgaatattaagagcggttacgtaattaagttcggcgatataacggggcgaaacgtgtataatcggcgtatttaatattttacgagaataatcgatgatgtttatatcgaggggggttttatattaattgggcggtaaagcggtattaattattagtatagatcgaattagtatagaattcgataatcgaagcgattatacggggtggagaggacgttagatattacgtagtatagatcgtataagtggagcgagtaagtataattttataattaatcggtaatacgaacgttattagaggagggggtaaatattacgtacgtatttaagatattagttggggcgtcgttaacgtacggcgtttataatataagaacgttcgttagacgagtgatgttattaagaattataagagcggacgttcgggggttattttaatatatcgcggtttttaggttgggtagatttttacgatattatttatgagtggttgtcgcgcgtagcgggtacgtagtggttggcgttttatttataattatttaattacgagttaacgtgagagatgttatatataaggatggacgtattatttaatacgatatcggtaattgatagatttttttaaagggcggtacgttcgtcgacggcgaattattagtaaggatgtcgaattttatcgacgtaaacgtcgacgatagcgttagatatagtaaatattataagcgagtatagaggttgtacgacgtatttaagataaataagtgggtgatatcgggagggattacgtatacgaagtaagtaggtatgacgttaaattagatattgcgagagcggggcgaggtaattcgatttacgtattttagtgagcgagtttcgtagataatacgcgaagagggttttagacgttcgtagtacggagttatcgtcgatanatatcggagatagtagtatattcgattcgtttcgagatatttacgttttattcgcgtattatttttatagcgtatattttagaattagagtttttataggattcgtgtataatatcgttttagcgagatatttgcgtattataggtttattagtttttttttggcgtcgtgcgtttaaataaaagtaaggtaaagt

SEQ ID NO: 34794 - DNA, 1929 bp, Artificial Sequence
  chemically treated genomic DNA (Homo sapiens) CpG-island No: 34794
  unsure (197, 1465)
actttaccttacttttatttaaacgcacgacgccaaaaaaaaactaataaacctataatacgcaaatatctcgctaaaacgatattatacacgaatcctataaaaactctaattctaaaatatacgctataaaaataatacgcgaataaaacgtaaatatctcgaaacgaatcgaatatactactatctccgatatntatcgacgataactccgtactacgaacgtctaaaaccctcttcgcgtattatctacgaaactcgctcactaaaatacgtaaatcgaattacctcgccccgctctcgcaatatctaatttaacgtcatacctacttacttcgtatacgtaatccctcccgatatcacccacttatttatcttaaatacgtcgtacaacctctatactcgcttataatatttactatatctaacgctatcgtcgacgtttacgtcgataaaattcgacatccttactaataattcgccgtcgacgaacgtaccgccctttaaaaaaatctatcaattaccgatatcgtattaaataatacgtccatccttatatataacatctctcacgttaactcgtaattaaataattataaataaaacgccaaccactacgtacccgctacgcgcgacaaccactcataaataatatcgtaaaaatctacccaacctaaaaaccgcgatatattaaaataacccccgaacgtccgctcttataattcttaataacatcactcgtctaacgaacgttcttatattataaacgccgtacgttaacgacgccccaactaatatcttaaatacgtacgtaatatttaccccctcctctaataacgttcgtattaccgattaattataaaattatacttactcgctccacttatacgatctatactacgtaatatctaacgtcctctccaccccgtataatcgcttcgattatcgaattctatactaattcgatctatactaataattaataccgctttaccgcccaattaatataaaacccccctcgatataaacatcatcgattattctcgtaaaatattaaatacgccgattatacacgtttcgccccgttatatcgccgaacttaattacgtaaccgctcttaatattcatcactatctatcgcgtccctattcgtacgtactactactacttaattacgtctctcgctcgtcgtcgtctatcttttatctataccgtacgctatctcgctaaacgttctatattatcaacgcgacgtactaactaatctatacgtacgtatataatcacccccacccaaattaccgcgctatacgaacttcgatttattatcgaacgctacgaactaaacgtatatatacgtcgataaatactacgataacgccctcgcccccaataacctaacgtacccgtcgacgcgctcgatacatatatcgtatcgtattatcgtaaatcgccccctataatnaaacccccgctaaaaccttatatatataataactacgcttatcgtacaatatcccgctataatactatcgccgtcccccaacgttataaaatcgtacgatatcgtattatactcgacgaaaacgttcgtattctcccgctaaattactcccctacgttaaacgacgtatcgactccgaatttcgacccctaacctcgtacgacgaaataatactcacccctactccgtaatattccccaaattacaattaccgctaaaacgaccgatttactcctaccccaatatcgtcacctacccgcgtcccatattaacgcccccgatactttaatacgcaccgtataaataaaattacatctacccaataaataccacgtatcctacgcataataaataataaattctaaataaatttacgtattcgcccctactctcgatccgaaacgaaattcgtatatattcttata

SEQ ID NO: 34795 - DNA, 1929 bp, Artificial Sequence
  chemically treated genomic DNA (Homo sapiens) CpG-island No: 34795
  unsure (197, 1465)
attttgttttgtttttgtttaaacgtacgacgttaggagaaaattggtgagtttgtgatacgtaggtgtttcgttgagacgatgttgtatacgagttttgtggagattttgattttggagtgtgcgttgtaaaaatggtacgcgggtaagacgtgggtatttcgaagcgggtcgagtgtgttgttgttttcggtgtntgtcggcggtggtttcgtattgcgagcgtttgaggtttttttcgcgtgttgtttacgaggttcgtttattgagatgcgtgggtcgggttgtttcgtttcgttttcgtaatgtttggtttggcgttatatttgtttgtttcgtatgcgtagtttttttcgatgttatttatttgtttgttttgggtacgtcgtgtaatttttgtgttcgtttgtggtgtttgttgtgtttggcgttgtcgtcggcgtttgcgtcggtggagttcgatatttttgttggtaattcgtcgtcggcgggcgtgtcgttttttggggggatttattagttgtcggtgtcgtattaggtggtgcgtttatttttgtgtgtggtattttttacgttagttcgtagttgggtggttgtgggtgaggcgttagttattgcgtattcgttgcgcgcggtagttatttatgggtggtgtcgtgggggtttatttaatttgggagtcgcggtgtgttggggtaattttcggacgttcgtttttgtggtttttggtggtattattcgtttggcgggcgtttttgtgttgtagacgtcgtgcgttgacggcgttttagttggtgttttaggtgcgtgcgtggtgtttgtttttttttttagtggcgttcgtgttgtcggttggttgtggagttgtgtttgttcgttttatttgtgcggtttgtgttgcgtggtgtttggcgttttttttatttcgtgtagtcgtttcggttgtcgggttttgtgttagttcggtttgtgttggtggttggtgtcgttttgtcgtttagttagtgtggggtttttttcggtgtgggtattatcggttgttttcgtggggtgttgggtgcgtcggttgtgtacgtttcgtttcgttgtgtcgtcgggtttggttgcgtagtcgtttttggtgtttattattgtttgtcgcgtttttgttcgtgcgtgttgttgttgtttggttgcgtttttcgttcgtcgtcgtttattttttgtttgtgtcgtgcgttgtttcgttgaacgttttgtgttgttagcgcggcgtgttggttggtttgtgcgtgcgtgtatggttatttttatttaggttgtcgcgttgtgcgggtttcggtttgttatcggacgttgcgggttgggcgtgtatgtacgtcggtgggtgttacggtggcgttttcgtttttaatgatttggcgtgttcgtcggcgcgttcggtgtatatgtcgtgtcgtgttgtcgtgggtcgttttttatggtngggttttcgttgggattttgtgtgtgtagtggttgcgtttgtcgtgtagtatttcgttgtggtgttgtcgtcgttttttagcgttgtggggtcgtgcgatatcgtgttgtgttcggcgggagcgttcgtgttttttcgttggattgtttttttgcgttaaacggcgtgtcggtttcgagtttcggtttttggtttcgtgcggcggggtagtgtttatttttgtttcgtggtgttttttaagttgtagttgtcgttgaagcggtcggtttgtttttgttttagtgtcgttatttgttcgcgttttatgttggcgttttcgatattttagtgcgtatcgtgtgggtggggttatatttgtttagtgggtattacgtgttttgcgtatggtgagtgatagattttgggtggatttgcgtgttcgtttttgttttcggttcgggacgggattcgtgtatgtttttata

SEQ ID NO: 34796 - DNA, 1929 bp, Artificial Sequence
  chemically treated genomic DNA (Homo sapiens) CpG-island No: 34796
  unsure (465, 1733)
tataaaaacatacacgaatcccgtcccgaaccgaaaacaaaaacgaacacgcaaatccacccaaaatctatcactcaccatacgcaaaacacgtaatacccactaaacaaatataaccccacccacacgatacgcactaaaatatcgaaaacgccaacataaaacgcgaacaaataacgacactaaaacaaaaacaaaccgaccgcttcaacgacaactacaacttaaaaaacaccacgaaacaaaaataaacactaccccgccgcacgaaaccaaaaaccgaaactcgaaaccgacacgccgtttaacgcaaaaaaacaatccaacgaaaaaacacgaacgctcccgccgaacacaacacgatatcgcacgaccccacaacgctaaaaaacgacgacaacaccacaacgaaatactacacgacaaacgcaaccactacacacacaaaatcccaacgaaaacccnaccataaaaaacgacccacgacaacacgacacgacatatacaccgaacgcgccgacgaacacgccaaatcattaaaaacgaaaacgccaccgtaacacccaccgacgtacatacacgcccaacccgcaacgtccgataacaaaccgaaacccgcacaacgcgacaacctaaataaaaataaccatacacgcacgcacaaaccaaccaacacgccgcgctaacaacacaaaacgttcaacgaaacaacgcacgacacaaacaaaaaataaacgacgacgaacgaaaaacgcaaccaaacaacaacaacacgcacgaacaaaaacgcgacaaacaataataaacaccaaaaacgactacgcaaccaaacccgacgacacaacgaaacgaaacgtacacaaccgacgcacccaacaccccacgaaaacaaccgataatacccacaccgaaaaaaaccccacactaactaaacgacaaaacgacaccaaccaccaacacaaaccgaactaacacaaaacccgacaaccgaaacgactacacgaaataaaaaaaacgccaaacaccacgcaacacaaaccgcacaaataaaacgaacaaacacaactccacaaccaaccgacaacacgaacgccactaaaaaaaaaaacaaacaccacgcacgcacctaaaacaccaactaaaacgccgtcaacgcacgacgtctacaacacaaaaacgcccgccaaacgaataataccaccaaaaaccacaaaaacgaacgtccgaaaattaccccaacacaccgcgactcccaaattaaataaacccccacgacaccacccataaataactaccgcgcgcaacgaatacgcaataactaacgcctcacccacaaccacccaactacgaactaacgtaaaaaataccacacacaaaaataaacgcaccacctaatacgacaccgacaactaataaatccccccaaaaaacgacacgcccgccgacgacgaattaccaacaaaaatatcgaactccaccgacgcaaacgccgacgacaacgccaaacacaacaaacaccacaaacgaacacaaaaattacacgacgtacccaaaacaaacaaataaataacatcgaaaaaaactacgcatacgaaacaaacaaatataacgccaaaccaaacattacgaaaacgaaacgaaacaacccgacccacgcatctcaataaacgaacctcgtaaacaacacgcgaaaaaaacctcaaacgctcgcaatacgaaaccaccgccgacanacaccgaaaacaacaacacactcgacccgcttcgaaatacccacgtcttacccgcgtaccatttttacaacgcacactccaaaatcaaaatctccacaaaactcgtatacaacatcgtctcaacgaaacacctacgtatcacaaactcaccaattttctcctaacgtcgtacgtttaaacaaaaacaaaacaaaat

SEQ ID NO: 34797 - DNA, 579 bp, Artificial Sequence
  chemically treated genomic DNA (Homo sapiens) CpG-island No: 34797
ttgtgttttttcggaattttttttcggtgcgttttttttggttgcgaatttgggcggtttttcggataattgtttcggttatgttttttttcgggtagcggtggggcgtcgttttatttcgggttttgttattttagttcgcgttaggtttatcgggtgtagttgtcgtgttttttagttttcggtatattcgtagatatcgttatcggattatgtttgtttgattcgggttattacgtattttttcgggggtttcgttatacgtagtttttagtgttgggtggtaatttttttcgtattttttcgcgtgggttttttttatacgacgatataatagtatacgatataatataaagggggataaataatcgtaaaaagataattcgtaggtgggagacgcggtaagatatttattatattaataattattatatatatacgatacgaggcgtaattttttttattaattattcgtggggtgggtgaggaatatacgcgtttagaaaataaagtcgttcgatataataatattgttttttttatattgggtgtggtgcgtatatattatatttgttttta

SEQ ID NO: 34798 - DNA, 579 bp, Artificial Sequence
  chemically treated genomic DNA (Homo sapiens) CpG-island No: 34798
taaaaacaaatataatatatacgcaccacacccaatataaaaaaaacaatattattatatcgaacgactttattttctaaacgcgtatattcctcacccaccccacgaataattaataaaaaaaattacgcctcgtatcgtatatatataataattattaatataataaatatcttaccgcgtctcccacctacgaattatctttttacgattatttatccccctttatattatatcgtatactattatatcgtcgtataaaaaaaacccacgcgaaaaaatacgaaaaaaattaccacccaacactaaaaactacgtataacgaaacccccgaaaaaatacgtaataacccgaatcaaacaaacataatccgataacgatatctacgaatataccgaaaactaaaaaacacgacaactacacccgataaacctaacgcgaactaaaataacaaaacccgaaataaaacgacgccccaccgctacccgaaaaaaaacataaccgaaacaattatccgaaaaaccgcccaaattcgcaaccaaaaaaaacgcaccgaaaaaaaattccgaaaaaacacaa

SEQ ID NO: 34799 - DNA, 579 bp, Artificial Sequence
  chemically treated genomic DNA (Homo sapiens) CpG-island No: 34799
taagaatagatgtggtgtgtgcgtattatatttagtatagaaagaatagtgttgttgtgtcgggcggttttattttttgggcgcgtgtgttttttatttattttacgagtggttggtaagagaagttgcgtttcgtgtcgtgtgtgtgtggtggttgttggtgtgataggtgttttgtcgcgttttttatttgcgggttgtttttttgcggttgtttgtttttttttgtattgtatcgtgtgttgttgtgtcgtcgtgtggggaaaatttacgcgagagagtgcgggggggattattatttagtattaggggttgcgtgtgacggggttttcgagaaagtacgtggtaattcgggttaagtaggtatagttcgatagcggtatttgcgggtatatcgagggttaggaaatacgatagttgtattcggtgggtttaacgcgggttgagataataaagttcgggataaggcgacgttttatcgttgttcgagaggggatatagtcgggatagttattcggaagatcgtttaggttcgtaattaggaggagcgtatcgaggaggaatttcgagggggtataa

SEQ ID NO: 34800 - DNA, 579 bp, Artificial Sequence
  chemically treated genomic DNA (Homo sapiens) CpG-island No: 34800
ttataccccctcgaaattcctcctcgatacgctcctcctaattacgaacctaaacgatcttccgaataactatcccgactatatcccctctcgaacaacgataaaacgtcgccttatcccgaactttattatctcaacccgcgttaaacccaccgaatacaactatcgtatttcctaaccctcgatatacccgcaaataccgctatcgaactatacctacttaacccgaattaccacgtactttctcgaaaaccccgtcacacgcaacccctaatactaaataataatcccccccgcactctctcgcgtaaattttccccacacgacgacacaacaacacacgatacaatacaaaaaaaaacaaacaaccgcaaaaaaacaacccgcaaataaaaaacgcgacaaaacacctatcacaccaacaaccaccacacacacacgacacgaaacgcaacttctcttaccaaccactcgtaaaataaataaaaaacacacgcgcccaaaaaataaaaccgcccgacacaacaacactattctttctatactaaatataatacgcacacaccacatctattctta

SEQ ID NO: 34801 - DNA, 546 bp, Artificial Sequence
  chemically treated genomic DNA (Homo sapiens) CpG-island No: 34801
ttcgcggttgttttattattagttaattgttcggtgttgcgatcgatatttatcgttataaattcggtggcggcgttagcggttgtttcggtatatttttaagaacggttttatataagcgttttatgtaggttgggtatttttggtatcgttttcgtatttgagatttgatttttaatcgtttcggaagtcgttgtatgatcgagatacgacggtgattattaaagttaatttagatcgaggttataacgttcggacgtaattcgagaattacgtatttttcgaattgttagtggtttcggtttttcgtcgatatcgcgacgttgtaaattacgatttgtacgttaggtagtatttggtagtttgggttagtaaagatttaggtggtttaaggtattttaatcgggatgttacgggacgttatgattttcgggcgtaaatttgaggttagtttttatataagttggatgtcggtttatttatttttatcgtttattatttcgtagtattatttgttggtagaagtgtcgtgttggataataacgg

SEQ ID NO: 34802 - DNA, 546 bp, Artificial Sequence
  chemically treated genomic DNA (Homo sapiens) CpG-island No: 34802
ccgttattatccaacacgacacttctaccaacaaataatactacgaaataataaacgataaaaataaataaaccgacatccaacttatataaaaactaacctcaaatttacgcccgaaaatcataacgtcccgtaacatcccgattaaaataccttaaaccacctaaatctttactaacccaaactaccaaatactacctaacgtacaaatcgtaatttacaacgtcgcgatatcgacgaaaaaccgaaaccactaacaattcgaaaaatacgtaattctcgaattacgtccgaacgttataacctcgatctaaattaactttaataatcaccgtcgtatctcgatcatacaacgacttccgaaacgattaaaaatcaaatctcaaatacgaaaacgataccaaaaatacccaacctacataaaacgcttatataaaaccgttcttaaaaatataccgaaacaaccgctaacgccgccaccgaatttataacgataaatatcgatcgcaacaccgaacaattaactaataataaaacaaccgcgaa

SEQ ID NO: 34803 - DNA, 546 bp, Artificial Sequence
  chemically treated genomic DNA (Homo sapiens) CpG-island No: 34803
tcgttattatttagtacggtatttttgttagtaggtagtattgcggaataatgaacgatggaggtgagtgaatcggtatttagtttatgtggaaattggttttaggtttacgttcgaaggttataacgtttcgtggtatttcgattaagatgttttgaattatttaaatttttgttgatttagattgttaggtattgtttggcgtgtaggtcgtgatttgtagcgtcgcgatatcggcggaaaatcgggattattaatagttcgaaagatgcgtggttttcgggttacgttcgggcgttgtgatttcggtttggattggttttgatgattatcgtcgtatttcggttatataacggttttcggagcgattaaagattagattttaggtacgaaggcggtgttaagagtgtttagtttgtatgggacgtttatatgaagtcgtttttgaaggtgtgtcggagtagtcgttgacgtcgttatcgggtttgtgacggtgaatatcgatcgtagtatcgggtagttagttaatggtggaatagtcgcgaa

SEQ ID NO: 34804 - DNA, 546 bp, Artificial Sequence
  chemically treated genomic DNA (Homo sapiens) CpG-island No: 34804
ttcgcgactattccaccattaactaactacccgatactacgatcgatattcaccgtcacaaacccgataacgacgtcaacgactactccgacacaccttcaaaaacgacttcatataaacgtcccatacaaactaaacactcttaacaccgccttcgtacctaaaatctaatctttaatcgctccgaaaaccgttatataaccgaaatacgacgataatcatcaaaaccaatccaaaccgaaatcacaacgcccgaacgtaacccgaaaaccacgcatctttcgaactattaataatcccgattttccgccgatatcgcgacgctacaaatcacgacctacacgccaaacaatacctaacaatctaaatcaacaaaaatttaaataattcaaaacatcttaatcgaaataccacgaaacgttataaccttcgaacgtaaacctaaaaccaatttccacataaactaaataccgattcactcacctccatcgttcattattccgcaatactacctactaacaaaaataccgtactaaataataacga

SEQ ID NO: 34805 - DNA, 679 bp, Artificial Sequence
  chemically treated genomic DNA (Homo sapiens) CpG-island No: 34805
  unsure (344)
gcgcggttatcgtcgttttttttagagtaaatttgtttttgttagtatttgttttatttcgcgatagttttgtaatattttattgcgttgtttttcgggttatatagtattggaagtacgttgtttacggttgtgtgttttcgtttgtcgttttttttggtcgtgtttcggttttcgtttcgttgcgtgtgtgtcgttttgtatcgcgtgtgggcgcgtgtcgttttcgtggtttttcgcgggttttttattttacgatttttttttcgtttggtttgcgttacgtgttggtttcgcgtatgtgtcgtcgcgttgttggcgttttttttcgttgcgtttttttntcgtgcgttttttgtcgagtttggttggttgttgttttgttttttgcgtttttttttgtcgtcgcgtttttttttttgtttttttgtttttttttgttttcgacgtttttggttagtcggcgttgttttttttttggcgcgttgtttttattttttttttcgtttttttatttgtttcgtagttttcgtttagcgcgtttttttttgtgtcggtttcgcgtttttgttgtgttttgttttgcgcgtttttttttcgtttttgttgtttttattttttgttgtgattgtatatcgggttgtgttttcgtgtttttattttttgggttttttttggg

SEQ ID NO: 34806 - DNA, 679 bp, Artificial Sequence
  chemically treated genomic DNA (Homo sapiens) CpG-island No: 34806
  unsure (336)
cccaaaaaaaacccaaaaaataaaaacacgaaaacacaacccgatatacaatcacaacaaaaaataaaaacaacaaaaacgaaaaaaaaacgcgcaaaacaaaacacaacaaaaacgcgaaaccgacacaaaaaaaaacgcgctaaacgaaaactacgaaacaaataaaaaaacgaaaaaaaaaataaaaacaacgcgccaaaaaaaaaacaacgccgactaaccaaaaacgtcgaaaacaaaaaaaaacaaaaaaacaaaaaaaaaaacgcgacgacaaaaaaaaacgcaaaaaacaaaacaacaaccaaccaaactcgacaaaaaacgcacganaaaaaaacgcaacgaaaaaaaacgccaacaacgcgacgacacatacgcgaaaccaacacgtaacgcaaaccaaacgaaaaaaaaatcgtaaaataaaaaacccgcgaaaaaccacgaaaacgacacgcgcccacacgcgatacaaaacgacacacacgcaacgaaacgaaaaccgaaacacgaccaaaaaaaacgacaaacgaaaacacacaaccgtaaacaacgtacttccaatactatataacccgaaaaacaacgcaataaaatattacaaaactatcgcgaaataaaacaaatactaacaaaaacaaatttactctaaaaaaaacgacgataaccgcgc

SEQ ID NO: 34807 - DNA, 679 bp, Artificial Sequence
  chemically treated genomic DNA (Homo sapiens) CpG-island No: 34807
  unsure (336)
tttaggaaaaatttaaagaatgagaatacgaagatatagttcgatgtgtagttataatagaaggtaggagtagtagaggcgggggaggagcgcgtaaggtaagatatagtagagacgcggagtcgatatagaagagggcgcgttgagcgaggattgcgaaatagatagaggggcgagaggagaagtgagaataacgcgttagaagaggagtagcgtcggttagttagagacgtcgaaagtaggagagagtagggagatagggaggaaggcgcgacgataaggaggaacgtagagagtagaatagtagttagttaggttcgatagagagcgtacgangaagagacgtagcggaaaagagcgttagtagcgcggcggtatatgcgcggaattagtacgtagcgtaggttagacgaggaagggatcgtgagatgaaggattcgcgagaagttacgaaaacgatacgcgtttatacgcgatgtagaacgatatatacgtagcgagacgagagtcgaagtacgattagagaaggcggtagacgagagtatatagtcgtaagtagcgtgtttttaatgttgtatggttcggaaggtagcgtaatgaagtgttgtagggttatcgcgaaatggggtagatgttggtaaagatagatttattttgaaggaagcggcgatgatcgcgt

SEQ ID NO: 34808 - DNA, 679 bp, Artificial Sequence
  chemically treated genomic DNA (Homo sapiens) CpG-island No: 34808
  unsure (344)
acgcgatcatcgccgcttccttcaaaataaatctatctttaccaacatctaccccatttcgcgataaccctacaacacttcattacgctaccttccgaaccatacaacattaaaaacacgctacttacgactatatactctcgtctaccgccttctctaatcgtacttcgactctcgtctcgctacgtatatatcgttctacatcgcgtataaacgcgtatcgttttcgtaacttctcgcgaatccttcatctcacgatcccttcctcgtctaacctacgctacgtactaattccgcgcatataccgccgcgctactaacgctcttttccgctacgtctcttcntcgtacgctctctatcgaacctaactaactactattctactctctacgttcctccttatcgtcgcgccttcctccctatctccctactctctcctactttcgacgtctctaactaaccgacgctactcctcttctaacgcgttattctcacttctcctctcgcccctctatctatttcgcaatcctcgctcaacgcgccctcttctatatcgactccgcgtctctactatatcttaccttacgcgctcctcccccgcctctactactcctaccttctattataactacacatcgaactatatcttcgtattctcattctttaaatttttcctaaa

SEQ ID NO: 34809 - DNA, 699 bp, Artificial Sequence
  chemically treated genomic DNA (Homo sapiens) CpG-island No: 34809
  unsure (7, 61, 123, 127, 153, 265, 324, 335, 354, 463, 478, 490, 499)
  unsure (526, 632)
cgttagngagtgtcgggtttttagatcggtagtttggagggttcgattttttttattcgtntatatttttgtcggttttgtacgtttttttatttttggttcgcgcgtttttcgcgttagttntcgngcggggatatagttttggtcgcgatngcgcgtagatttcgagttatttttatattgtaatatagcgggcgcgttaaaacggcgcgcgtgtgtgatagttagagaacgggattttcgggcggttgatattgggcggcgnatttgttataacgcgaatttattcgttttgtacgtttataatatttggattttatcgtntatagataggncgtttcgaagttgtagatntcggtgatttatgattgtggtacggacggttgttggttatttcgaaggcgttttattttttttaattaaggggtcgtgtttagatttattcgcgttttgattcgtagtnaagtataatttacgnggcgtattgaancggtttcgngggtacgaaaatagttgtggagagtanaatacgcgcgttaggtagttaatgtgtcgagtgatattcgggtagataatacggcgcgtgggtatggttgcggcgtttttgttcgtatttgggttgttcggtttanttttttgagcgaagttatttcgaataatttcggaacggttttagtttttttatggttgggaaaaatt

SEQ ID NO: 34810 - DNA, 699 bp, Artificial Sequence
  chemically treated genomic DNA (Homo sapiens) CpG-island No: 34810
  unsure (68, 174, 201, 210, 222, 237, 346, 365, 376, 435, 547, 573)
  unsure (577, 639, 693)
aatttttcccaaccataaaaaaactaaaaccgttccgaaattattcgaaataacttcgctcaaaaaantaaaccgaacaacccaaatacgaacaaaaacgccgcaaccatacccacgcgccgtattatctacccgaatatcactcgacacattaactacctaacgcgcgtattntactctccacaactattttcgtacccncgaaaccgnttcaatacgccncgtaaattatacttnactacgaatcaaaacgcgaataaatctaaacacgaccccttaattaaaaaaaataaaacgccttcgaaataaccaacaaccgtccgtaccacaatcataaatcaccganatctacaacttcgaaacgncctatctatanacgataaaatccaaatattataaacgtacaaaacgaataaattcgcgttataacaaatncgccgcccaatatcaaccgcccgaaaatcccgttctctaactatcacacacgcgcgccgttttaacgcgcccgctatattacaatataaaaataactcgaaatctacgcgcnatcgcgaccaaaactatatccccgcncganaactaacgcgaaaaacgcgcgaaccaaaaataaaaaaacgtacaaaaccgacaaaaatatanacgaataaaaaaaatcgaaccctccaaactaccgatctaaaaacccgacactcnctaacg

SEQ ID NO: 34811 - DNA, 699 bp, Artificial Sequence
  chemically treated genomic DNA (Homo sapiens) CpG-island No: 34811
  unsure (68, 174, 201, 210, 222, 237, 346, 365, 376, 435, 547, 573)
  unsure (577, 639, 693)
ggttttttttaattatggggaaattaggatcgtttcgaagttattcggggtgatttcgtttaaggggntgggtcggatagtttagatgcggataaagacgtcgtagttatatttacgcgtcgtattatttattcgggtgttattcggtatattagttgtttggcgcgcgtgttntgttttttataattgttttcgtatttncgaggtcgntttagtacgttncgtggattgtatttngttgcgaattaaagcgcgggtgagtttgagtacggttttttaattggggaagatggaacgttttcgaaatgattaatagtcgttcgtgttatagttataggttatcganatttgtagtttcgggacgntttgtttatgngcggtagggtttagatgttgtaggcgtgtaaggcgaataggttcgcgttatagtaagtncgtcgtttaatattaatcgttcgaaaatttcgttttttggttattatatacgcgcgtcgttttagcgcgttcgttatgttgtaatgtgaaaatggttcgagatttgcgcgtnatcgcgattaaggttatgttttcgtncganagttagcgcgaagagcgcgcgagttagagatgggagagcgtgtaagatcggtagagatatanacgggtagagagagtcgagttttttaaattatcgatttaagggttcgatatttnttagcg

SEQ ID NO: 34812 - DNA, 699 bp, Artificial Sequence
  chemically treated genomic DNA (Homo sapiens) CpG-island No: 34812
  unsure (7, 61, 123, 127, 153, 265, 324, 335, 354, 463, 478, 490, 499)
  unsure (526, 632)
cgctaanaaatatcgaacccttaaatcgataatttaaaaaactcgactctctctacccgtntatatctctaccgatcttacacgctctcccatctctaactcgcgcgctcttcgcgctaactntcgnacgaaaacataaccttaatcgcgatnacgcgcaaatctcgaaccattttcacattacaacataacgaacgcgctaaaacgacgcgcgtatataataaccaaaaaacgaaattttcgaacgattaatattaaacgacgnacttactataacgcgaacctattcgccttacacgcctacaacatctaaaccctaccgcncataaacaaancgtcccgaaactacaaatntcgataacctataactataacacgaacgactattaatcatttcgaaaacgttccatcttccccaattaaaaaaccgtactcaaactcacccgcgctttaattcgcaacnaaatacaatccacgnaacgtactaaancgacctcgnaaatacgaaaacaattataaaaaacanaacacgcgcgccaaacaactaatataccgaataacacccgaataaataatacgacgcgtaaatataactacgacgtctttatccgcatctaaactatccgacccanccccttaaacgaaatcaccccgaataacttcgaaacgatcctaatttccccataattaaaaaaaacc

SEQ ID NO: 34813 - DNA, 513 bp, Artificial Sequence
  chemically treated genomic DNA (Homo sapiens) CpG-island No: 34813
aggttttcgggtcgcgagatcgtcgttagagtaaagttaggttattatcgtaggtattaagatagtggtatcgttcgcgttttcggaataggaaatcgagggaattaaaaagtaaatttgagaaagttgggttaagggagggaaaattttttagtttatcgtagggttttgtgcgcggtgattggcgcgttaacgaaagcgatggacgtttagattaatcgttagtaaaagattttttggagttcgcgttttttttttttacgttttttaattcgaaaacgtaatcgggtgagggagcgttttcgttcggagagagttggtcgggatgaggcgtcggttttttcgggttttttttagttgttatcgttttattgtaaaattgacgggcgtaaaaatatgagtgatttcgcgggagggcgcgttggttttcggcgttattttaagtttttagtgtgggtggtggaggattattaggaggtgagcggacggtaatagggttttggggtagaatta

SEQ ID NO: 34814 - DNA, 513 bp, Artificial Sequence
  chemically treated genomic DNA (Homo sapiens) CpG-island No: 34814
taattctaccccaaaaccctattaccgtccgctcacctcctaataatcctccaccacccacactaaaaacttaaaataacgccgaaaaccaacgcgccctcccgcgaaatcactcatatttttacgcccgtcaattttacaataaaacgataacaactaaaaaaaacccgaaaaaaccgacgcctcatcccgaccaactctctccgaacgaaaacgctccctcacccgattacgttttcgaattaaaaaacgtaaaaaaaaaaaacgcgaactccaaaaaatcttttactaacgattaatctaaacgtccatcgctttcgttaacgcgccaatcaccgcgcacaaaaccctacgataaactaaaaaattttccctcccttaacccaactttctcaaatttactttttaattccctcgatttcctattccgaaaacgcgaacgataccactatcttaatacctacgataataacctaactttactctaacgacgatctcgcgacccgaaaacct

SEQ ID NO: 34815 - DNA, 513 bp, Artificial Sequence
  chemically treated genomic DNA (Homo sapiens) CpG-island No: 34815
tgattttgttttagagttttgttgtcgttcgtttattttttgatgattttttattatttatattgggagtttggggtaacgtcggagattagcgcgttttttcgcggagttatttatgtttttgcgttcgttagttttgtagtaaagcggtggtagttggagaagattcgggaaagtcggcgttttatttcggttagtttttttcgggcggaagcgtttttttattcggttgcgttttcggattggaggacgtagggggagggggcgcgggttttaaagggttttttgttgacgattggtttagacgtttatcgttttcgttgacgcgttaattatcgcgtataaggttttgcggtgggttgaagagtttttttttttttggtttagtttttttaggtttgttttttaattttttcggttttttgtttcggaggcgcgggcggtgttattgttttggtatttgcggtagtagtttggttttgttttgacggcgatttcgcggttcgagagttt

SEQ ID NO: 34816 - DNA, 513 bp, Artificial Sequence
  chemically treated genomic DNA (Homo sapiens) CpG-island No: 34816
aaactctcgaaccgcgaaatcgccgtcaaaacaaaaccaaactactaccgcaaataccaaaacaataacaccgcccgcgcctccgaaacaaaaaaccgaaaaaattaaaaaacaaacctaaaaaaactaaaccaaaaaaaaaaaaactcttcaacccaccgcaaaaccttatacgcgataattaacgcgtcaacgaaaacgataaacgtctaaaccaatcgtcaacaaaaaaccctttaaaacccgcgccccctccccctacgtcctccaatccgaaaacgcaaccgaataaaaaaacgcttccgcccgaaaaaaactaaccgaaataaaacgccgactttcccgaatcttctccaactaccaccgctttactacaaaactaacgaacgcaaaaacataaataactccgcgaaaaaacgcgctaatctccgacgttaccccaaactcccaatataaataataaaaaatcatcaaaaaataaacgaacgacaacaaaactctaaaacaaaatca

SEQ ID NO: 34817 - DNA, 694 bp, Artificial Sequence
  chemically treated genomic DNA (Homo sapiens) CpG-island No: 34817
ttagttgcgggtagcgttgtattaatttattaatatcgattagtagcgttagtaaaattcgcgtattcggcgaggcgttgttttgtttttaataacggtgcgattaattattcgtggcggtttagcgcgtcgttggtatcgagtatcgtttttatgtcgtttgttagttgatagcgtttattttgtttacggcgacgagtaatgcgatcggtaaacgtttcggtaagtagcggcgcgataagcgaattgtttgttttatcgttacgtacgtttaagcgttttaatagttgttgattacgttgttgttaggttggttgattgcgcgaaaacgttacgtttaggttattattgtttattcgtggcggtttttcgagaatggcggtaatttttgtcgcggtagtagtttcgtcgtcgtttttcgcgttaattagtattgtcgttaaacgcggatcgttatttagcgttgttattttttgtttttgcgtattaagtcgtttattttttagtgtttttagtatttgtaatagacgtttcgcggttagtagatttattattggcggttgttttagttagtttatttgcgtcggatcgttgtatttttattgtagtaattttattagtaaatcggaaagatcgttttgtaagattttcggtttattttgcgtcgcggcgcgttttgtttgttttttggcga

SEQ ID NO: 34818 - DNA, 694 bp, Artificial Sequence
  chemically treated genomic DNA (Homo sapiens) CpG-island No: 34818
tcgccaaaaaacaaacaaaacgcgccgcgacgcaaaataaaccgaaaatcttacaaaacgatctttccgatttactaataaaattactacaataaaaatacaacgatccgacgcaaataaactaactaaaacaaccgccaataataaatctactaaccgcgaaacgtctattacaaatactaaaaacactaaaaaataaacgacttaatacgcaaaaacaaaaaataacaacgctaaataacgatccgcgtttaacgacaatactaattaacgcgaaaaacgacgacgaaactactaccgcgacaaaaattaccgccattctcgaaaaaccgccacgaataaacaataataacctaaacgtaacgttttcgcgcaatcaaccaacctaacaacaacgtaatcaacaactattaaaacgcttaaacgtacgtaacgataaaacaaacaattcgcttatcgcgccgctacttaccgaaacgtttaccgatcgcattactcgtcgccgtaaacaaaataaacgctatcaactaacaaacgacataaaaacgatactcgataccaacgacgcgctaaaccgccacgaataattaatcgcaccgttattaaaaacaaaacaacgcctcgccgaatacgcgaattttactaacgctactaatcgatattaataaattaatacaacgctacccgcaactaa

SEQ ID NO: 34819 - DNA, 694 bp, Artificial Sequence
  chemically treated genomic DNA (Homo sapiens) CpG-island No: 34819
tcgttaaagaataagtagaacgcgtcgcggcgtaaagtgaatcggagattttataaagcgattttttcggtttgttgatggaattattgtaatggggatgtagcgattcggcgtagatgagttggttggaataatcgttagtagtgaatttattggtcgcgaaacgtttgttataaatgttgggggtattggagggtgaacggtttagtgcgtaagggtaaaaaatggtagcgttgggtaacgattcgcgtttagcggtaatgttggttagcgcgaagaacgacgacgaagttgttatcgcggtaaaaattgtcgttattttcgaagagtcgttacggatgggtaatagtgatttgggcgtggcgttttcgcgtaattaattagtttggtagtaacgtagttagtaattgttaaaacgtttaaacgtacgtggcggtgaggtagatagttcgtttatcgcgtcgttatttgtcggggcgtttgtcgatcgtattgttcgtcgtcgtgggtaagatggacgttattaattggtaaacggtatgggagcgatgttcgatgttaacgacgcgttaagtcgttacgaatggttgatcgtatcgttattaaagataaggtagcgtttcgtcggatgcgcggattttattggcgttgttggtcgatattgatgagttagtataacgttgttcgtagttgg

SEQ ID NO: 34820 - DNA, 694 bp, Artificial Sequence
  chemically treated genomic DNA (Homo sapiens) CpG-island No: 34820
ccaactacgaacaacgttatactaactcatcaatatcgaccaacaacgccaataaaatccgcgcatccgacgaaacgctaccttatctttaataacgatacgatcaaccattcgtaacgacttaacgcgtcgttaacatcgaacatcgctcccataccgtttaccaattaataacgtccatcttacccacgacgacgaacaatacgatcgacaaacgccccgacaaataacgacgcgataaacgaactatctacctcaccgccacgtacgtttaaacgttttaacaattactaactacgttactaccaaactaattaattacgcgaaaacgccacgcccaaatcactattacccatccgtaacgactcttcgaaaataacgacaatttttaccgcgataacaacttcgtcgtcgttcttcgcgctaaccaacattaccgctaaacgcgaatcgttacccaacgctaccattttttacccttacgcactaaaccgttcaccctccaatacccccaacatttataacaaacgtttcgcgaccaataaattcactactaacgattattccaaccaactcatctacgccgaatcgctacatccccattacaataattccatcaacaaaccgaaaaaatcgctttataaaatctccgattcactttacgccgcgacgcgttctacttattctttaacga

SEQ ID NO: 34821 - DNA, 815 bp, Artificial Sequence
  chemically treated genomic DNA (Homo sapiens) CpG-island No: 34821
  unsure (646)
gggttacgagaaatcggtcgagtagttcgggttaagtttttcggaattttcggtcgtcgtaattttcgacgttagggttgaagcgtcgggtattgtcgtttttttcggtcgttcgttcgtacgttcggagcggggaagtacgtcgtttttttacgtattagtatggtatttcgtataagtagcgtcgttaaagtttttttacgagggggttgagggataaaagtttttttcgaaattcgttcgaatttcgagggttttcgatttgtacggttttacgtttaggcggcggtttcgagcgtcgggggttcgtacgggtatatgtagttttttgttttttgtttagtcgggcgttgtttacgtgtagtattagggatgtcggagcgtttcgtaggggtcggatattggacgattattttgggtaggggttcggatttcgcgtttcgaagagttcggagtttggtttttcgatttttttttcgggagtaggtttatttaattaaagtttgtagtgtttttgatgagaaacgttcggagtattcgtttcgtacgggcggagagttggcgaattttattttgttttttaaattggtaagacgttattattagtaaattatattggttttgtcggtcggatttgttcgacggngggcgtattttaggtttacgcggggttgaatatttcgatagggatagggttcgtattcgagtacgtgggttgttacgtaaagtataaaaggtaggttttgggggattaattgatttcggggggtaaaaaaggcggcggtttatttttagttaaggtggtttttttgtta

SEQ ID NO: 34822 - DNA, 815 bp, Artificial Sequence
  chemically treated genomic DNA (Homo sapiens) CpG-island No: 34822
  unsure (170)
taacaaaaaaaccaccttaactaaaaataaaccgccgccttttttaccccccgaaatcaattaatcccccaaaacctaccttttatactttacgtaacaacccacgtactcgaatacgaaccctatccctatcgaaatattcaaccccgcgtaaacctaaaatacgcccnccgtcgaacaaatccgaccgacaaaaccaatataatttactaataataacgtcttaccaatttaaaaaacaaaataaaattcgccaactctccgcccgtacgaaacgaatactccgaacgtttctcatcaaaaacactacaaactttaattaaataaacctactcccgaaaaaaaaatcgaaaaaccaaactccgaactcttcgaaacgcgaaatccgaacccctacccaaaataatcgtccaatatccgacccctacgaaacgctccgacatccctaatactacacgtaaacaacgcccgactaaacaaaaaacaaaaaactacatatacccgtacgaacccccgacgctcgaaaccgccgcctaaacgtaaaaccgtacaaatcgaaaaccctcgaaattcgaacgaatttcgaaaaaaacttttatccctcaaccccctcgtaaaaaaactttaacgacgctacttatacgaaataccatactaatacgtaaaaaaacgacgtacttccccgctccgaacgtacgaacgaacgaccgaaaaaaacgacaatacccgacgcttcaaccctaacgtcgaaaattacgacgaccgaaaattccgaaaaacttaacccgaactactcgaccgatttctcgtaaccc

SEQ ID NO: 34823 - DNA, 815 bp, Artificial Sequence
  chemically treated genomic DNA (Homo sapiens) CpG-island No: 34823
  unsure (170)
tggtagggaaattattttggttgaaaataagtcgtcgttttttttatttttcggagttaattaattttttaaggtttgttttttgtgttttacgtgatagtttacgtgttcgggtgcggattttgtttttgtcgaaatgtttagtttcgcgtaagtttgggatgcgtttntcgtcgggtaggttcggtcggtaggattaatgtggtttgttgatgatggcgttttgttagtttaaaaagtagagtgaagttcgttaatttttcgttcgtgcggggcggatatttcgggcgttttttattaaggatattgtaaattttgattaaatgggtttgttttcgaggggagggtcggggggttaggtttcggatttttcggggcgcggggttcggatttttatttagggtgatcgtttagtgttcggtttttgcgaaacgtttcgatatttttgatgttgtacgtaggtagcgttcggttggatagaaaataaagggttgtatgtgttcgtgcgggttttcggcgttcggggtcgtcgtttgggcgtagggtcgtgtaggtcggaggttttcgaagttcgggcgagtttcgggaggggtttttgttttttagttttttcgtggggaaattttggcggcgttatttgtgcgaggtgttatgttggtgcgtagggaggcggcgtgttttttcgtttcgggcgtgcgggcgggcgatcgagggaggcggtagtgttcggcgttttagttttggcgtcgggggttgcgacggtcgagggtttcggggagtttggttcggattgttcggtcggtttttcgtggttt

SEQ ID NO: 34824 - DNA, 815 bp, Artificial Sequence
  chemically treated genomic DNA (Homo sapiens) CpG-island No: 34824
  unsure (646)
aaaccacgaaaaaccgaccgaacaatccgaaccaaactccccgaaaccctcgaccgtcgcaacccccgacgccaaaactaaaacgccgaacactaccgcctccctcgatcgcccgcccgcacgcccgaaacgaaaaaacacgccgcctccctacgcaccaacataacacctcgcacaaataacgccgccaaaatttccccacgaaaaaactaaaaaacaaaaacccctcccgaaactcgcccgaacttcgaaaacctccgacctacacgaccctacgcccaaacgacgaccccgaacgccgaaaacccgcacgaacacatacaaccctttattttctatccaaccgaacgctacctacgtacaacatcaaaaatatcgaaacgtttcgcaaaaaccgaacactaaacgatcaccctaaataaaaatccgaaccccgcgccccgaaaaatccgaaacctaaccccccgaccctcccctcgaaaacaaacccatttaatcaaaatttacaatatccttaataaaaaacgcccgaaatatccgccccgcacgaacgaaaaattaacgaacttcactctactttttaaactaacaaaacgccatcatcaacaaaccacattaatcctaccgaccgaacctacccgacganaaacgcatcccaaacttacgcgaaactaaacatttcgacaaaaacaaaatccgcacccgaacacgtaaactatcacgtaaaacacaaaaaacaaaccttaaaaaattaattaactccgaaaaataaaaaaaacgacgacttattttcaaccaaaataatttccctacca

SEQ ID NO: 34825 - DNA, 580 bp, Artificial Sequence
  chemically treated genomic DNA (Homo sapiens) CpG-island No: 34825
gcgcgtgtggggcgcgtgtggggcgcgtgtggggcgcgtgtggagcgggtgtggggcgcgtgtggaacgtgtgtggggcgggtgtggggcgggtgtggggcgggtgtggggcgcgtgtggggcgggtgtggggcgcgtgtggggcgggtgtggggcgcgtgtggggcgggtgtggggcgcgtgtggggcgggtgtggggcgcgtgtggggcgggtgtggggcgcgtgtggaacgtgtgtggggcgcgtgtggagcgggtgtggggcgggtgtggggcgcgtgtggggcgggtgtggggcgcgtgtggggcgggtgtggggtacgtgtggaacgtgtgtggaacgtgtgtggggcgcgtgtggggcgggtgtggggcgcgtgtggggcgggtgtggagcgcgtgaggggcgcgtgtggggcgggtgtggggcgggtgtggggcgcgtgtggggcggatgtggggcgcgtgttgggaatagcgttcgggatgtatagagtatagcgcggtggggaggcggtaggggcggtttttattttttttagtattttaattttatcgtttgggttttttgtgaaaaat

SEQ ID NO: 34826 - DNA, 580 bp, Artificial Sequence
  chemically treated genomic DNA (Homo sapiens) CpG-island No: 34826
atttttcacaaaaaacccaaacgataaaattaaaatactaaaaaaaataaaaaccgcccctaccgcctccccaccgcgctatactctatacatcccgaacgctattcccaacacgcgccccacatccgccccacacgcgccccacacccgccccacacccgccccacacgcgcccctcacgcgctccacacccgccccacacgcgccccacacccgccccacacgcgccccacacacgttccacacacgttccacacgtaccccacacccgccccacacgcgccccacacccgccccacacgcgccccacacccgccccacacccgctccacacgcgccccacacacgttccacacgcgccccacacccgccccacacgcgccccacacccgccccacacgcgccccacacccgccccacacgcgccccacacccgccccacacgcgccccacacccgccccacacgcgccccacacccgccccacacccgccccacacccgccccacacacgttccacacgcgccccacacccgctccacacgcgccccacacgcgccccacacgcgccccacacgcgc

SEQ ID NO: 34827 - DNA, 580 bp, Artificial Sequence
  chemically treated genomic DNA (Homo sapiens) CpG-island No: 34827
gttttttataagaaatttagacggtgggattgggatgttggaggaagtggaagtcgtttttgtcgtttttttatcgcgttgtgttttgtgtatttcggacgttgtttttaatacgcgttttatattcgttttatacgcgttttatattcgttttatattcgttttatacgcgttttttacgcgttttatattcgttttatacgcgttttatattcgttttatacgcgttttatatacgttttatatacgttttatacgtgttttatattcgttttatacgcgttttatattcgttttatacgcgttttatattcgttttatattcgttttatacgcgttttatatacgttttatacgcgttttatattcgttttatacgcgttttatattcgttttatacgcgttttatattcgttttatacgcgttttatattcgttttatacgcgttttatattcgttttatacgcgttttatattcgttttatattcgttttatattcgttttatatacgttttatacgcgttttatattcgttttatacgcgttttatacgcgttttatacgcgttttatacgcgt

SEQ ID NO: 34828 - DNA, 580 bp, Artificial Sequence
  chemically treated genomic DNA (Homo sapiens) CpG-island No: 34828
acgcgtataaaacgcgtataaaacgcgtataaaacgcgtataaaacgaatataaaacgcgtataaaacgtatataaaacgaatataaaacgaatataaaacgaatataaaacgcgtataaaacgaatataaaacgcgtataaaacgaatataaaacgcgtataaaacgaatataaaacgcgtataaaacgaatataaaacgcgtataaaacgaatataaaacgcgtataaaacgtatataaaacgcgtataaaacgaatataaaacgaatataaaacgcgtataaaacgaatataaaacgcgtataaaacgaatataaaacacgtataaaacgtatataaaacgtatataaaacgcgtataaaacgaatataaaacgcgtataaaacgaatataaaacgcgtaaaaaacgcgtataaaacgaatataaaacgaatataaaacgcgtataaaacgaatataaaacgcgtattaaaaacaacgtccgaaatacacaaaacacaacgcgataaaaaaacgacaaaaacgacttccacttcctccaacatcccaatcccaccgtctaaatttcttataaaaaac

SEQ ID NO: 34829 - DNA, 716 bp, Artificial Sequence
  chemically treated genomic DNA (Homo sapiens) CpG-island No: 34829
ttcgaggtcgtatttattgttggcgatgtcgttttttattttatatttggttacgattaggtttttagcgatagtttgtttttgttgttcgttttcgttcgatatttttttattattattattgtagtttcgttttttttgagtcgtcgtcgtttttgtttttttttttagttataggttgtggttagagttttttcgattttcgaggagagggcgagcgaaagcgcgagtaagtaagggagcgggtaggtaggcgagagcgagaagttgcgagcgcgcgggttgaggcgtagggtacgttgggataattagttttttcggtcgttagattttagtcgttttcgagggttttcgaattataatttttagtttgtttttcgcgtttttaagttaggttttggggttttgttttttaagggtttcgtacgtcggaatcgtcgggtattttgggaagggttaggtttcggcgggaaggcggagtcgttggggagtttgaggggaagcgtggtttttttcggaaaaattatttttatcgagaacgttgagcgagagttagtaatagagaggggcgggttgaggggagaggggcggagttacggcggggaaataggtttaaagtcgaataggtaggggtggagtagagtggagtcgtagcgggtgggtagtgtttatatttaggtcggggaggttgggtgcgttttttttcggatttttgg

SEQ ID NO: 34830 - DNA, 716 bp, Artificial Sequence
  chemically treated genomic DNA (Homo sapiens) CpG-island No: 34830
ccaaaaatccgaaaaaaaacgcacccaacctccccgacctaaatataaacactacccacccgctacgactccactctactccacccctacctattcgactttaaacctatttccccgccgtaactccgcccctctcccctcaacccgcccctctctattactaactctcgctcaacgttctcgataaaaataatttttccgaaaaaaaccacgcttcccctcaaactccccaacgactccgccttcccgccgaaacctaacccttcccaaaatacccgacgattccgacgtacgaaacccttaaaaaacaaaaccccaaaacctaacttaaaaacgcgaaaaacaaactaaaaattataattcgaaaaccctcgaaaacgactaaaatctaacgaccgaaaaaactaattatcccaacgtaccctacgcctcaacccgcgcgctcgcaacttctcgctctcgcctacctacccgctcccttacttactcgcgctttcgctcgccctctcctcgaaaatcgaaaaaactctaaccacaacctataactaaaaaaaaaaacaaaaacgacgacgactcaaaaaaaacgaaactacaataataataataaaaaaatatcgaacgaaaacgaacaacaaaaacaaactatcgctaaaaacctaatcgtaaccaaatataaaataaaaaacgacatcgccaacaataaatacgacctcgaa

SEQ ID NO: 34831 - DNA, 716 bp, Artificial Sequence
  chemically treated genomic DNA (Homo sapiens) CpG-island No: 34831
ttagggattcgaagaagggcgtatttagttttttcgatttaggtgtagatattgtttattcgttgcggttttattttattttatttttgtttgttcgattttaaatttattttttcgtcgtagtttcgtttttttttttttagttcgtttttttttgttattggttttcgtttagcgttttcggtggaagtggttttttcgggagagattacgtttttttttaagttttttaacggtttcgttttttcgtcggagtttgattttttttagagtgttcggcgatttcggcgtgcgaggtttttggagggtaaggttttagggtttggtttaagagcgcgagaggtaggttgggaattgtagttcgaaggttttcgagagcggttagagtttggcggtcgagaggattagttgttttagcgtgttttgcgttttagttcgcgcgttcgtagtttttcgttttcgtttgtttgttcgtttttttgtttgttcgcgttttcgttcgtttttttttcgaggatcgaggggattttgattatagtttgtggttgggaagggagatagaggcggcggcggtttaggggaaacgaggttgtagtggtggtagtaggaagatgtcgggcgaggacgagtaataggagtaaattatcgttgaggatttggtcgtgattaagtataagatggggggcgatatcgttaatagtgagtgcggtttcggg

SEQ ID NO: 34832 - DNA, 716 bp, Artificial Sequence
  chemically treated genomic DNA (Homo sapiens) CpG-island No: 34832
cccgaaaccgcactcactattaacgatatcgccccccatcttatacttaatcacgaccaaatcctcaacgataatttactcctattactcgtcctcgcccgacatcttcctactaccaccactacaacctcgtttcccctaaaccgccgccgcctctatctcccttcccaaccacaaactataatcaaaatcccctcgatcctcgaaaaaaaaacgaacgaaaacgcgaacaaacaaaaaaacgaacaaacaaacgaaaacgaaaaactacgaacgcgcgaactaaaacgcaaaacacgctaaaacaactaatcctctcgaccgccaaactctaaccgctctcgaaaaccttcgaactacaattcccaacctacctctcgcgctcttaaaccaaaccctaaaaccttaccctccaaaaacctcgcacgccgaaatcgccgaacactctaaaaaaaatcaaactccgacgaaaaaacgaaaccgttaaaaaacttaaaaaaaaacgtaatctctcccgaaaaaaccacttccaccgaaaacgctaaacgaaaaccaataacaaaaaaaaacgaactaaaaaaaaaaaaacgaaactacgacgaaaaaataaatttaaaatcgaacaaacaaaaataaaataaaataaaaccgcaacgaataaacaatatctacacctaaatcgaaaaaactaaatacgcccttcttcgaatccctaa

SEQ ID NO: 34833 - DNA, 805 bp, Artificial Sequence
  chemically treated genomic DNA (Homo sapiens) CpG-island No: 34833
gttattgtattttttttcgatttttcgttttttattttcgtcgtcgaggaacggtggtttattttttcgttttatattggtttttgtttggttcgggttagcgttaattcggttttcgtggaagtcgtggcgaaaggcgagaggggtaaaaagttgagaaataggcgagcgggagagataagtaggaaggttcgggtgggttcgggtaaggaagaagaagagagggtcgggttgcgcgttacgtttcgcgtcgcgcgttatttttcgcggggttttcgtaaaagtggtcgtcgttgagggtcgggtcgggttcgaggttttgtaggtatttggcgggcggtttggtcggttttgggaggtagggttttaggggttcgtaggtcggaaagcgggttagtcgcgggtcgcggggcggcgcggggtgtaggtgaggcgtaacggcgggggttttttgcgggttcggaggttcgtttttcgaggttatataggggtcgggtgtaggttttacgcggaaaggcgcgtagtgttcggggtttatgtcggtttagggcgtataggttttcggggtttcggggttcgcgttgttcgcgtcgtttgtgagcgttcgttaagggggagggatttgggcgcgggggcgcggagttttcgggagcggcgcgcgtcgcggggggcggggggcggggggtaggggaaggggtcgcgtttttgatttaatgttggaattatttacgttacgtgtggtttcgtgcgggttaatttttcggagttcgggaattttttttttttatttatttagagtttagtt

SEQ ID NO: 34834 - DNA, 805 bp, Artificial Sequence
  chemically treated genomic DNA (Homo sapiens) CpG-island No: 34834
aactaaactctaaataaataaaaaaaaaaaattcccgaactccgaaaaattaacccgcacgaaaccacacgtaacgtaaataattccaacattaaatcaaaaacgcgaccccttcccctaccccccgccccccgccccccgcgacgcgcgccgctcccgaaaactccgcgcccccgcgcccaaatccctcccccttaacgaacgctcacaaacgacgcgaacaacgcgaaccccgaaaccccgaaaacctatacgccctaaaccgacataaaccccgaacactacgcgcctttccgcgtaaaacctacacccgacccctatataacctcgaaaaacgaacctccgaacccgcaaaaaacccccgccgttacgcctcacctacaccccgcgccgccccgcgacccgcgactaacccgctttccgacctacgaacccctaaaaccctacctcccaaaaccgaccaaaccgcccgccaaatacctacaaaacctcgaacccgacccgaccctcaacgacgaccacttttacgaaaaccccgcgaaaaataacgcgcgacgcgaaacgtaacgcgcaacccgaccctctcttcttcttccttacccgaacccacccgaaccttcctacttatctctcccgctcgcctatttctcaactttttacccctctcgcctttcgccacgacttccacgaaaaccgaattaacgctaacccgaaccaaacaaaaaccaatataaaacgaaaaaataaaccaccgttcctcgacgacgaaaataaaaaacgaaaaatcgaaaaaaaatacaataac

SEQ ID NO: 34835 - DNA, 805 bp, Artificial Sequence
  chemically treated genomic DNA (Homo sapiens) CpG-island No: 34835
gattgggttttgggtgaatggggggagggggttttcgggtttcgaggggttaattcgtacggggttatacgtgacgtggatggttttagtattaagttagaggcgcggtttttttttttgtttttcgtttttcgtttttcgcggcgcgcgtcgttttcgggggtttcgcgttttcgcgtttaggttttttttttttggcgggcgtttataggcggcgcgggtagcgcgagtttcggagtttcggaggtttgtgcgttttgagtcggtatggatttcgagtattgcgcgttttttcgcgtggggtttgtattcggtttttatgtggtttcgggggacgagttttcgggttcgtagggaattttcgtcgttgcgttttatttgtatttcgcgtcgtttcgcggttcgcggttgattcgtttttcggtttgcgggtttttggagttttattttttagagtcggttaagtcgttcgttaagtatttgtaggatttcgggttcggttcggtttttaacggcggttatttttacgagggtttcgcggaaggtaacgcgcggcgcggggcgtagcgcgtagttcgatttttttttttttttttttattcgggtttattcgggtttttttgtttatttttttcgttcgtttattttttaattttttgtttttttcgtttttcgttacggtttttacggaagtcgggttggcgttggttcgggttaggtaaaggttagtgtggggcgggagggtgaattatcgtttttcggcggcgggaatgggaggcgggaggtcgagggaaggtgtagtggt

SEQ ID NO: 34836 - DNA, 805 bp, Artificial Sequence
  chemically treated genomic DNA (Homo sapiens) CpG-island No: 34836
accactacaccttccctcgacctcccgcctcccattcccgccgccgaaaaacgataattcaccctcccgccccacactaacctttacctaacccgaaccaacgccaacccgacttccgtaaaaaccgtaacgaaaaacgaaaaaaacaaaaaattaaaaaataaacgaacgaaaaaaataaacaaaaaaacccgaataaacccgaataaaaaaaaaaaaaaaaaaatcgaactacgcgctacgccccgcgccgcgcgttaccttccgcgaaaccctcgtaaaaataaccgccgttaaaaaccgaaccgaacccgaaatcctacaaatacttaacgaacgacttaaccgactctaaaaaataaaactccaaaaacccgcaaaccgaaaaacgaatcaaccgcgaaccgcgaaacgacgcgaaatacaaataaaacgcaacgacgaaaattccctacgaacccgaaaactcgtcccccgaaaccacataaaaaccgaatacaaaccccacgcgaaaaaacgcgcaatactcgaaatccataccgactcaaaacgcacaaacctccgaaactccgaaactcgcgctacccgcgccgcctataaacgcccgccaaaaaaaaaaaacctaaacgcgaaaacgcgaaacccccgaaaacgacgcgcgccgcgaaaaacgaaaaacgaaaaacaaaaaaaaaaaccgcgcctctaacttaatactaaaaccatccacgtcacgtataaccccgtacgaattaacccctcgaaacccgaaaaccccctccccccattcacccaaaacccaatc

SEQ ID NO: 34837 - DNA, 568 bp, Artificial Sequence
  chemically treated genomic DNA (Homo sapiens) CpG-island No: 34837
gttacgcgtgggtagtcgcgtagattcggttcgtgtatttcggtcgagtagttgcggttttcgacgggtcgcggacgtatagtttttttttcgggttataggttttcggttggggttggggcgattcggagttgcgcgtcggcgtacgcgatttcgttcgttttttattttttgttttattattagttttaatttggttttcgttcgtcgcgcgttcggggtttaggggagcggcgcgggaatttaggttttacggcggagagagcgcgcgggattgcgaagattggggtcgagtgtcgttttttttgcgttttggtagcgtcggttttgcggagtagaacggagttgggcggagcgttgcgcgtattgttttttcgtttttcgaaaggttattttggcggcggggcgtcgtgacgtaggtttgatttacgcgcgggtcggcgttaatgcgaggttttcgggtagcgagcgaggttttgatggtcgacgtaggcggaaagggtgggcgtggggcgggaaagggagttgtaagggggtttagttttttgaggtttttggttaggggatg

SEQ ID NO: 34838 - DNA, 568 bp, Artificial Sequence
  chemically treated genomic DNA (Homo sapiens) CpG-island No: 34838
catcccctaaccaaaaacctcaaaaaactaaacccccttacaactccctttcccgccccacgcccaccctttccgcctacgtcgaccatcaaaacctcgctcgctacccgaaaacctcgcattaacgccgacccgcgcgtaaatcaaacctacgtcacgacgccccgccgccaaaataacctttcgaaaaacgaaaaaacaatacgcgcaacgctccgcccaactccgttctactccgcaaaaccgacgctaccaaaacgcaaaaaaaacgacactcgaccccaatcttcgcaatcccgcgcgctctctccgccgtaaaacctaaattcccgcgccgctcccctaaaccccgaacgcgcgacgaacgaaaaccaaattaaaactaataataaaacaaaaaataaaaaacgaacgaaatcgcgtacgccgacgcgcaactccgaatcgccccaaccccaaccgaaaacctataacccgaaaaaaaaactatacgtccgcgacccgtcgaaaaccgcaactactcgaccgaaatacacgaaccgaatctacgcgactacccacgcgtaac

SEQ ID NO: 34839 - DNA, 568 bp, Artificial Sequence
  chemically treated genomic DNA (Homo sapiens) CpG-island No: 34839
tattttttgattaggggttttaagaagttaagtttttttgtaattttttttttcgttttacgtttatttttttcgtttacgtcggttattagagtttcgttcgttgttcgagagtttcgtattgacgtcggttcgcgcgtgagttaagtttgcgttacggcgtttcgtcgttagggtggtttttcggaaagcgagggaatagtgcgcgtagcgtttcgtttagtttcgttttgtttcgtaaagtcggcgttgttagggcgtagggagggcggtattcggttttagttttcgtaatttcgcgcgtttttttcgtcgtgggatttgggttttcgcgtcgtttttttgagtttcgagcgcgcggcgggcgggagttaggttgggattggtggtgaggtagggagtgaggagcgagcggagtcgcgtgcgtcggcgcgtagtttcgggtcgttttagttttagtcgggggtttgtggttcgggggaggagttgtgcgttcgcgattcgtcggggatcgtagttgttcggtcggagtgtacgggtcgagtttgcgcgattatttacgcgtgat

SEQ ID NO: 34840 - DNA, 568 bp, Artificial Sequence
  chemically treated genomic DNA (Homo sapiens) CpG-island No: 34840
atcacgcgtaaataatcgcgcaaactcgacccgtacactccgaccgaacaactacgatccccgacgaatcgcgaacgcacaactcctcccccgaaccacaaacccccgactaaaactaaaacgacccgaaactacgcgccgacgcacgcgactccgctcgctcctcactccctacctcaccaccaatcccaacctaactcccgcccgccgcgcgctcgaaactcaaaaaaacgacgcgaaaacccaaatcccacgacgaaaaaaacgcgcgaaattacgaaaactaaaaccgaataccgccctccctacgccctaacaacgccgactttacgaaacaaaacgaaactaaacgaaacgctacgcgcactattccctcgctttccgaaaaaccaccctaacgacgaaacgccgtaacgcaaacttaactcacgcgcgaaccgacgtcaatacgaaactctcgaacaacgaacgaaactctaataaccgacgtaaacgaaaaaaataaacgtaaaacgaaaaaaaaaattacaaaaaaacttaacttcttaaaacccctaatcaaaaaata

SEQ ID NO: 34841 - DNA, 827 bp, Artificial Sequence
  chemically treated genomic DNA (Homo sapiens) CpG-island No: 34841
gcggcgtttaggtcgtttaacgcgcgtttttcgttcggcgtttcgaagcggtttcgaggggcgggagtcgaggcgagcggtaaggtcgggtcgggggcgtatagcgtttttagaagtgcgggttttttttattttcggtagcgattttatttttcgttttcgttgcgtgcgcgcgtgtgttcgtttgtttgtatgttttttcgacgttagtgggaatttttagttaggaagtgagagagtgagcgagatagaaagagagagaagtgtattagcgagtcggggtaggaagaggaggtttcgttatcggagcggttcggcgacgcgttgatagttttttttgtttttttcgtcggtcgggtcgttagtcgtcgtagttttcggtttgtacgtagttatcggtttcgttttcggagtttagcgtcgtcgaggtcgtagtcgttcggttagtaaggcggcgtcgtcgttcggttatcgcgcgttttgcgttttttttcgttcgcgttgcggttatggcgcggcgttgattggtttggttcggtttcgtcgcgttttcgttcgtttcgattcgtattcgggttcgttcgggtttcggtttgtcgtcgttttttttttttttagtcggtaggttcgcgtcgtttaggagggagagtttattcgcgttaggaggtcgaacgcggattcgttattcgggtaagttaaattcgggcgagtgggggttcggtaggggacgcgtggtttaagttttgtcgtttagtttttcgtattttttttagttttattcggatttttttatttttgcgttaatcgttgggttagatcgtgggagg

SEQ ID NO: 34842 - DNA, 827 bp, Artificial Sequence
  chemically treated genomic DNA (Homo sapiens) CpG-island No: 34842
cctcccacgatctaacccaacgattaacgcaaaaataaaaaaatccgaataaaactaaaaaaaatacgaaaaactaaacgacaaaacttaaaccacgcgtcccctaccgaacccccactcgcccgaatttaacttacccgaataacgaatccgcgttcgacctcctaacgcgaataaactctccctcctaaacgacgcgaacctaccgactaaaaaaaaaaaaaacgacgacaaaccgaaacccgaacgaacccgaatacgaatcgaaacgaacgaaaacgcgacgaaaccgaaccaaaccaatcaacgccgcgccataaccgcaacgcgaacgaaaaaaaacgcaaaacgcgcgataaccgaacgacgacgccgccttactaaccgaacgactacgacctcgacgacgctaaactccgaaaacgaaaccgataactacgtacaaaccgaaaactacgacgactaacgacccgaccgacgaaaaaaacaaaaaaaactatcaacgcgtcgccgaaccgctccgataacgaaacctcctcttcctaccccgactcgctaatacacttctctctctttctatctcgctcactctctcacttcctaactaaaaattcccactaacgtcgaaaaaacatacaaacaaacgaacacacgcgcgcacgcaacgaaaacgaaaaataaaatcgctaccgaaaataaaaaaaacccgcacttctaaaaacgctatacgcccccgacccgaccttaccgctcgcctcgactcccgcccctcgaaaccgcttcgaaacgccgaacgaaaaacgcgcgttaaacgacctaaacgccgc

SEQ ID NO: 34843 - DNA, 827 bp, Artificial Sequence
  chemically treated genomic DNA (Homo sapiens) CpG-island No: 34843
ttttttacggtttagtttagcggttagcgtaggaatgaggaagttcgagtggggttggagggggtgcggagggttgggcggtaggatttgggttacgcgttttttgtcgggtttttattcgttcgagtttggtttattcgggtggcgagttcgcgttcggttttttggcgcgggtgggtttttttttttaagcggcgcgggtttgtcggttggagaaggaagaggcggcggtaggtcggagttcgggcgggttcgagtgcgggtcggggcgagcgggagcgcggcggggtcgggttaggttagttagcgtcgcgttatggtcgtagcgcgggcggagggaagcgtagggcgcgcggtggtcgggcggcggcgtcgttttattggtcgggcggttgcggtttcggcggcgttgggtttcgggagcggggtcggtggttgcgtgtaggtcgagggttgcggcggttggcggttcgatcgacgggaagggtaggggaagttgttagcgcgtcgtcgggtcgtttcggtggcgaaattttttttttttgtttcggttcgttggtgtatttttttttttttttgtttcgtttatttttttattttttggttggaaatttttattgacgtcgagagagtatatagatagacggatatacgcgcgtacgtagcgggggcgggaggtagggtcgttgtcgggggtgggggaagttcgtatttttaggggcgttgtgcgttttcggttcggttttgtcgttcgtttcggttttcgtttttcggggtcgtttcggggcgtcgggcgaggggcgcgcgttaggcggtttggacgtcgt

SEQ ID NO: 34844 - DNA, 827 bp, Artificial Sequence
  chemically treated genomic DNA (Homo sapiens) CpG-island No: 34844
acgacgtccaaaccgcctaacgcgcgcccctcgcccgacgccccgaaacgaccccgaaaaacgaaaaccgaaacgaacgacaaaaccgaaccgaaaacgcacaacgcccctaaaaatacgaacttcccccacccccgacaacgaccctacctcccgcccccgctacgtacgcgcgtatatccgtctatctatatactctctcgacgtcaataaaaatttccaaccaaaaaataaaaaaataaacgaaacaaaaaaaaaaaaaaatacaccaacgaaccgaaacaaaaaaaaaaaatttcgccaccgaaacgacccgacgacgcgctaacaacttcccctacccttcccgtcgatcgaaccgccaaccgccgcaaccctcgacctacacgcaaccaccgaccccgctcccgaaacccaacgccgccgaaaccgcaaccgcccgaccaataaaacgacgccgccgcccgaccaccgcgcgccctacgcttccctccgcccgcgctacgaccataacgcgacgctaactaacctaacccgaccccgccgcgctcccgctcgccccgacccgcactcgaacccgcccgaactccgacctaccgccgcctcttccttctccaaccgacaaacccgcgccgcttaaaaaaaaaaacccacccgcgccaaaaaaccgaacgcgaactcgccacccgaataaaccaaactcgaacgaataaaaacccgacaaaaaacgcgtaacccaaatcctaccgcccaaccctccgcaccccctccaaccccactcgaacttcctcattcctacgctaaccgctaaactaaaccgtaaaaaa

SEQ ID NO: 34845 - DNA, 504 bp, Artificial Sequence
  chemically treated genomic DNA (Homo sapiens) CpG-island No: 34845
agcgtttgttttcgagtttttatcgtcggtttatcggtgggtacgggtagttcgggtgcggtttcgttgataatttttcgtatcgttcgtagcgttattttgttttttttgtttcgattggtttagtagcgacgtcgcgtacgcgtagatatattaaggcggttcgcggttcgaggtttcgtttatgcgcgttgcggcgtttcggtttcgtttcgtttttttcgtcgtcggtcgtttttagtttcgtgatttcgcgtcgttggggttagatttgtttgcgagtaagaggagttgattagcgtgttgggaggcgcgcgcgggcgtagagggaagggaagcgaaagaggggagatggaaggagagaggaaagttagtcgaaagagaggcgtataagcggagtgaggggaggaaggtaaacgcgtgtaggttaacgttagttgatatttatttcgaatgggttttcgtgacgttgaatggagagaatttaagttgtgaaaatcgttt

SEQ ID NO: 34846 - DNA, 504 bp, Artificial Sequence
  chemically treated genomic DNA (Homo sapiens) CpG-island No: 34846
aaacgattttcacaacttaaattctctccattcaacgtcacgaaaacccattcgaaataaatatcaactaacgttaacctacacgcgtttaccttcctcccctcactccgcttatacgcctctctttcgactaactttcctctctccttccatctcccctctttcgcttcccttccctctacgcccgcgcgcgcctcccaacacgctaatcaactcctcttactcgcaaacaaatctaaccccaacgacgcgaaatcacgaaactaaaaacgaccgacgacgaaaaaaacgaaacgaaaccgaaacgccgcaacgcgcataaacgaaacctcgaaccgcgaaccgccttaatatatctacgcgtacgcgacgtcgctactaaaccaatcgaaacaaaaaaaacaaaataacgctacgaacgatacgaaaaattatcaacgaaaccgcacccgaactacccgtacccaccgataaaccgacgataaaaactcgaaaacaaacgct

SEQ ID NO: 34847 - DNA, 504 bp, Artificial Sequence
  chemically treated genomic DNA (Homo sapiens) CpG-island No: 34847
aagcggtttttatagtttgagttttttttatttagcgttacgaaagtttattcgaaatggatattagttgacgttggtttgtacgcgtttgtttttttttttttatttcgtttgtgcgtttttttttcggttggtttttttttttttttttattttttttttttcgttttttttttttttgcgttcgcgcgcgttttttagtacgttggttagttttttttgttcgtaagtaggtttggttttagcggcgcgaagttacgaggttgggggcggtcggcggcgaagggggcggggcgaggtcggggcgtcgtagcgcgtataggcggagtttcgggtcgcgggtcgttttggtatatttgcgcgtgcgcggcgtcgttgttgggttagtcgggatagaggagataagatggcgttgcgggcgatgcgggggattgttaacggggtcgtattcgagttattcgtgtttatcggtgggtcggcggtgggagttcgggagtaggcgtt

SEQ ID NO: 34848 - DNA, 504 bp, Artificial Sequence
  chemically treated genomic DNA (Homo sapiens) CpG-island No: 34848
aacgcctactcccgaactcccaccgccgacccaccgataaacacgaataactcgaatacgaccccgttaacaatcccccgcatcgcccgcaacgccatcttatctcctctatcccgactaacccaacaacgacgccgcgcacgcgcaaatataccaaaacgacccgcgacccgaaactccgcctatacgcgctacgacgccccgacctcgccccgcccccttcgccgccgaccgcccccaacctcgtaacttcgcgccgctaaaaccaaacctacttacgaacaaaaaaaactaaccaacgtactaaaaaacgcgcgcgaacgcaaaaaaaaaaaaaacgaaaaaaaaaaaataaaaaaaaaaaaaaaaaccaaccgaaaaaaaaacgcacaaacgaaataaaaaaaaaaaaacaaacgcgtacaaaccaacgtcaactaatatccatttcgaataaactttcgtaacgctaaataaaaaaaactcaaactataaaaaccgctt

SEQ ID NO: 34849 - DNA, 634 bp, Artificial Sequence
  chemically treated genomic DNA (Homo sapiens) CpG-island No: 34849
ttcgtcggcgggatggtttggggtagcggcgtgttgtttataggtcggggttttggtggttgtatacgacgttcgtattttcgtcgtgttcgtagttgtgggtgtttacgtcgttgtgttggtattttagtaggtttcgtttttagttcgcgtagcgtatatcgtttagtagaatgggtagcgagtcgttttggtcgaattcggtttttttgacggcgcgtacggcgtaggtaaattttagttggcgatatacgacggcggcgtcgttgatgttttaggagtcgtcgtatacggtgttttagcgttcgtttacgaatatttttacgcgttcgttgttagagtttaggttcgcgggtcgtattaggcgtatttcgttatttcggaacgttcggttcgtcgagtttagtcgttttcgtcgtcgttcgtcgttttttcggttttttggttgttgggtgggtcgcgttggtcgcggggttggcgcggggggagcggtcgtggggcgttttcggcgggcgttcgcgtgggcgttcgcgttgtaggtcgcggggtgtttcgtgttttcgggatgaattttgcgtagaggaagagtatgtcgttagagggatttaggcgtttttgtttagttttgttgttt

SEQ ID NO: 34850 - DNA, 634 bp, Artificial Sequence
  chemically treated genomic DNA (Homo sapiens) CpG-island No: 34850
aaacaacaaaactaaacaaaaacgcctaaatccctctaacgacatactcttcctctacgcaaaattcatcccgaaaacacgaaacaccccgcgacctacaacgcgaacgcccacgcgaacgcccgccgaaaacgccccacgaccgctccccccgcgccaaccccgcgaccaacgcgacccacccaacaaccaaaaaaccgaaaaaacgacgaacgacgacgaaaacgactaaactcgacgaaccgaacgttccgaaataacgaaatacgcctaatacgacccgcgaacctaaactctaacaacgaacgcgtaaaaatattcgtaaacgaacgctaaaacaccgtatacgacgactcctaaaacatcaacgacgccgccgtcgtatatcgccaactaaaatttacctacgccgtacgcgccgtcaaaaaaaccgaattcgaccaaaacgactcgctacccattctactaaacgatatacgctacgcgaactaaaaacgaaacctactaaaataccaacacaacgacgtaaacacccacaactacgaacacgacgaaaatacgaacgtcgtatacaaccaccaaaaccccgacctataaacaacacgccgctaccccaaaccatcccgccgacgaa

SEQ ID NO: 34851 - DNA, 634 bp, Artificial Sequence
  chemically treated genomic DNA (Homo sapiens) CpG-island No: 34851
gggtagtagggttggataggggcgtttgggtttttttgacggtatattttttttttgcgtagagtttatttcgaagatacggagtatttcgcggtttatagcgcgggcgtttacgcgggcgttcgtcgagggcgttttacggtcgtttttttcgcgttaatttcgcggttagcgcggtttatttagtagttagggagtcggaggggcggcgggcggcggcgggggcggttgaattcggcgagtcgggcgtttcgggatggcgaggtgcgtttggtgcggttcgcgggtttgagttttggtagcgggcgcgtggaggtgttcgtgggcggacgttggggtatcgtgtgcgacgatttttggaatattagcggcgtcgtcgtcgtgtgtcgttagttggggtttgtttacgtcgtgcgcgtcgttaagagagtcgagttcggttagggcggttcgttgtttattttgttggacgatgtgcgttgcgcgggttgggagcggaatttgttggagtgttagtataacggcgtgggtatttataattgcgagtacgacgaggatgcgggcgtcgtgtgtagttattagaatttcgatttgtaggtaatacgtcgttgttttaggttatttcgtcggcggg

SEQ ID NO: 34852 - DNA, 634 bp, Artificial Sequence
  chemically treated genomic DNA (Homo sapiens) CpG-island No: 34852
cccgccgacgaaataacctaaaacaacgacgtattacctacaaatcgaaattctaataactacacacgacgcccgcatcctcgtcgtactcgcaattataaatacccacgccgttatactaacactccaacaaattccgctcccaacccgcgcaacgcacatcgtccaacaaaataaacaacgaaccgccctaaccgaactcgactctcttaacgacgcgcacgacgtaaacaaaccccaactaacgacacacgacgacgacgccgctaatattccaaaaatcgtcgcacacgataccccaacgtccgcccacgaacacctccacgcgcccgctaccaaaactcaaacccgcgaaccgcaccaaacgcacctcgccatcccgaaacgcccgactcgccgaattcaaccgcccccgccgccgcccgccgcccctccgactccctaactactaaataaaccgcgctaaccgcgaaattaacgcgaaaaaaacgaccgtaaaacgccctcgacgaacgcccgcgtaaacgcccgcgctataaaccgcgaaatactccgtatcttcgaaataaactctacgcaaaaaaaaaatataccgtcaaaaaaacccaaacgcccctatccaaccctactaccc

SEQ ID NO: 34853 - DNA, 510 bp, Artificial Sequence
  chemically treated genomic DNA (Homo sapiens) CpG-island No: 34853
atagcgttcgcgtttttagtcggggtaagcggaagaaaataaaggttcggttttattagggtattaatttcgttcgtcggtttttttttcggtttttaatgagtttttagagtgttattacgttagttttttttcgcgattgattggtcggggtttttttagtgtgagcggttttggttaattagcgttcgttagtttattttacgaggtcgtagttagtttcgttggcggtcgaggtcggttgaagtgggcggagcggcgggcggggcgtcgtcgtattaggtttgttttttgttcggttagtttttcgaagtatttattttataggtttagtcggtcggtgagcgtttggggatcgtagaggtgagagtcgcgttcgggagttcgtcgtttgcgttaggatggagttcgtgaaatgttttggttatttcgaagagttttataatttggtgcgttttcggatcgggggtaagcggaaggtgatgtttaagatggattaggtgggtcgag

SEQ ID NO: 34854 - DNA, 510 bp, Artificial Sequence
  chemically treated genomic DNA (Homo sapiens) CpG-island No: 34854
ctcgacccacctaatccatcttaaacatcaccttccgcttacccccgatccgaaaacgcaccaaattataaaactcttcgaaataaccaaaacatttcacgaactccatcctaacgcaaacgacgaactcccgaacgcgactctcacctctacgatccccaaacgctcaccgaccgactaaacctataaaataaatacttcgaaaaactaaccgaacaaaaaacaaacctaatacgacgacgccccgcccgccgctccgcccacttcaaccgacctcgaccgccaacgaaactaactacgacctcgtaaaataaactaacgaacgctaattaaccaaaaccgctcacactaaaaaaaccccgaccaatcaatcgcgaaaaaaaactaacgtaataacactctaaaaactcattaaaaaccgaaaaaaaaaccgacgaacgaaattaataccctaataaaaccgaacctttattttcttccgcttaccccgactaaaaacgcgaacgctat

SEQ ID NO: 34855 - DNA, 510 bp, Artificial Sequence
  chemically treated genomic DNA (Homo sapiens) CpG-island No: 34855
ttcggtttatttggtttattttgggtattatttttcgtttgttttcgattcggaagcgtattaggttgtagaatttttcggggtggttaaggtattttacgaattttattttggcgtaggcggcggattttcgggcgcgatttttatttttgcggtttttaggcgtttatcggtcggttggatttgtggagtaggtgtttcgaggggttggtcggatagggggtaggtttagtacggcgacgtttcgttcgtcgtttcgtttattttaatcggtttcggtcgttagcggggttagttgcggtttcgtggggtgggttgacgggcgttgattggttagggtcgtttatattaggaagatttcggttaattagtcgcggaaggagattggcgtgataatattttagaagtttattggaggtcgagaaagaggtcgacgagcgggattggtgttttgatggagtcgggtttttgttttttttcgtttatttcggttgggagcgcgaacgttgt

SEQ ID NO: 34856 - DNA, 510 bp, Artificial Sequence
  chemically treated genomic DNA (Homo sapiens) CpG-island No: 34856
acaacgttcgcgctcccaaccgaaataaacgaaaaaaaacaaaaacccgactccatcaaaacaccaatcccgctcgtcgacctctttctcgacctccaataaacttctaaaatattatcacgccaatctccttccgcgactaattaaccgaaatcttcctaatataaacgaccctaaccaatcaacgcccgtcaacccaccccacgaaaccgcaactaaccccgctaacgaccgaaaccgattaaaataaacgaaacgacgaacgaaacgtcgccgtactaaacctaccccctatccgaccaacccctcgaaacacctactccacaaatccaaccgaccgataaacgcctaaaaaccgcaaaaataaaaatcgcgcccgaaaatccgccgcctacgccaaaataaaattcgtaaaataccttaaccaccccgaaaaattctacaacctaatacgcttccgaatcgaaaacaaacgaaaaataatacccaaaataaaccaaataaaccgaa

SEQ ID NO: 34857 - DNA, 833 bp, Artificial Sequence
  chemically treated genomic DNA (Homo sapiens) CpG-island No: 34857
tcggtagtttggttcggagatatcgaggtttaggcgttgggagcgcggttttaggtagtagttttcggattcggtcgagttttttttcgtaggcgtttttttcggcggttttggtcgcgttttcgtttcgagggtcggggttcggcgtatagttcggggaggggagcggagggtagagggttggcgggcggagttgttttttgtttttttcgtcgacgtttcggagcgcgcggatttttattttagttcgttcgttagggatagtttcgagggtttcggtttttcgtcggtttttagggacgtcgcggggtcgcgtttgggttcgattgagggcgtagaggaattcgtttcggcggtcgggtagtatcgttttcgttaaggttatttacgttgcggtggtttcgggtttttagtatttatttagcgttgtagtcgagagtttgtagtttagtttgcgcgtagcggagcggttggcgttgtcggagcggttgtcggagttttgtagtcgtcgtagtttgggttagtttcggttttaagtattttttcggtttcgttttacgtgattatcgcgtagtttcgttcgggttttttcgtcgttcgcgtacggtgttttttagtttttattttttttcgttatttttcgtcgttcgcgtttttcgtttttcggtttcgtatatttttcgttttttttcgttcggggttcggggttatcgtcgggggcgggcgggggtttgagcgcgcgggttggggaagaagggtttggagttttgcgggttttgggtggcgaaacgttgcgaattggggttaggggatggggaaaaagtttttaaagg

SEQ ID NO: 34858 - DNA, 833 bp, Artificial Sequence
  chemically treated genomic DNA (Homo sapiens) CpG-island No: 34858
cctttaaaaactttttccccatcccctaaccccaattcgcaacgtttcgccacccaaaacccgcaaaactccaaacccttcttccccaacccgcgcgctcaaacccccgcccgcccccgacgataaccccgaaccccgaacgaaaaaaaacgaaaaatatacgaaaccgaaaaacgaaaaacgcgaacgacgaaaaataacgaaaaaaaataaaaactaaaaaacaccgtacgcgaacgacgaaaaaacccgaacgaaactacgcgataatcacgtaaaacgaaaccgaaaaaatacttaaaaccgaaactaacccaaactacgacgactacaaaactccgacaaccgctccgacaacgccaaccgctccgctacgcgcaaactaaactacaaactctcgactacaacgctaaataaatactaaaaacccgaaaccaccgcaacgtaaataaccttaacgaaaacgatactacccgaccgccgaaacgaattcctctacgccctcaatcgaacccaaacgcgaccccgcgacgtccctaaaaaccgacgaaaaaccgaaaccctcgaaactatccctaacgaacgaactaaaataaaaatccgcgcgctccgaaacgtcgacgaaaaaaacaaaaaacaactccgcccgccaaccctctaccctccgctcccctccccgaactatacgccgaaccccgaccctcgaaacgaaaacgcgaccaaaaccgccgaaaaaaacgcctacgaaaaaaaactcgaccgaatccgaaaactactacctaaaaccgcgctcccaacgcctaaacctcgatatctccgaaccaaactaccga

SEQ ID NO: 34859 - DNA, 833 bp, Artificial Sequence
  chemically treated genomic DNA (Homo sapiens) CpG-island No: 34859
tttttaggggttttttttttattttttggttttaattcgtagcgtttcgttatttagggttcgtagggttttaagttttttttttttagttcgcgcgtttaggttttcgttcgttttcggcggtggtttcggatttcgagcggaagggggcggggggtgtgcggggtcgggaagcggggagcgcgggcggcggaaggtggcgggagggggtgggggttgggaagtatcgtgcgcgggcggcgggagggttcgggcggggttgcgcggtggttacgtggggcggggtcgggagggtatttagggtcggggttggtttaggttacggcggttgtagggtttcggtaatcgtttcggtaacgttaatcgtttcgttgcgcgtaggttgggttgtaggttttcggttgtagcgttgggtgagtgttggggattcggggttatcgtagcgtaagtgattttggcggggacggtgttattcggtcgtcgagacgggtttttttgcgtttttagtcgggtttaggcgcggtttcgcggcgtttttgggggtcggcggggagtcgggattttcgggattgtttttgacgggcgggttggggtgggagttcgcgcgtttcgaagcgtcggcgagaaaagtagaaaatagtttcgttcgttagttttttgtttttcgttttttttttcgggttgtgcgtcggatttcggttttcggagcggggacgcggttaggatcgtcgagggaggcgtttgcgaggaagagttcggtcgggttcggagattgttgtttgggatcgcgtttttagcgtttgggtttcggtgttttcgggttaaattgtcga

SEQ ID NO: 34860 - DNA, 833 bp, Artificial Sequence
  chemically treated genomic DNA (Homo sapiens) CpG-island No: 34860
tcgacaatttaacccgaaaacaccgaaacccaaacgctaaaaacgcgatcccaaacaacaatctccgaacccgaccgaactcttcctcgcaaacgcctccctcgacgatcctaaccgcgtccccgctccgaaaaccgaaatccgacgcacaacccgaaaaaaaaaacgaaaaacaaaaaactaacgaacgaaactattttctacttttctcgccgacgcttcgaaacgcgcgaactcccaccccaacccgcccgtcaaaaacaatcccgaaaatcccgactccccgccgacccccaaaaacgccgcgaaaccgcgcctaaacccgactaaaaacgcaaaaaaacccgtctcgacgaccgaataacaccgtccccgccaaaatcacttacgctacgataaccccgaatccccaacactcacccaacgctacaaccgaaaacctacaacccaacctacgcgcaacgaaacgattaacgttaccgaaacgattaccgaaaccctacaaccgccgtaacctaaaccaaccccgaccctaaataccctcccgaccccgccccacgtaaccaccgcgcaaccccgcccgaaccctcccgccgcccgcgcacgatacttcccaacccccaccccctcccgccaccttccgccgcccgcgctccccgcttcccgaccccgcacaccccccgcccccttccgctcgaaatccgaaaccaccgccgaaaacgaacgaaaacctaaacgcgcgaactaaaaaaaaaaaacttaaaaccctacgaaccctaaataacgaaacgctacgaattaaaaccaaaaaataaaaaaaaaacccctaaaaa

SEQ ID NO: 34861 - DNA, 648 bp, Artificial Sequence
  chemically treated genomic DNA (Homo sapiens) CpG-island No: 34861
agcgaagcgattcgagggttagcgaataagcgttggattttcgtaggtttcggcgattttagattcggtttttcggcgaagataggaaaacgtgtgtcgagagtcgttggagggaatcgttcgtaaatcgaagaagaaattaaattagtagcgaatatttgtaaattagtgttaagttgtgagtttttcgagattaatacgataagcgatgcgacgattttacggaggatcgagggaggaggttttattcgttttaggaagagttttttgtttttttttattaaatcgttgaggagagacgagcgtttcgtttcggattttttcgcgttatcggggcgtaaacggatagtgtttagcgaggtgttcgagcggttttcgagttttttttaaattttagagtcgggtagcgttttttttcgagagaaggagtttttaggtagtcgggaggaggtaggtttcgttggttttgcgttttagacgcggtttttagcgtagtcgtgcgtttcgaggcgcgttcgtttttaatcgtgatttcggttagtcggttttcgtaatttaagtgtttcggaaatcgggggtcggatcggggcgagtattggttttatttaacgggttaattttagttcgggtggttgtagtagtgggttt

SEQ ID NO: 34862 - DNA, 648 bp, Artificial Sequence
  chemically treated genomic DNA (Homo sapiens) CpG-island No: 34862
aaacccactactacaaccacccgaactaaaattaacccgttaaataaaaccaatactcgccccgatccgacccccgatttccgaaacacttaaattacgaaaaccgactaaccgaaatcacgattaaaaacgaacgcgcctcgaaacgcacgactacgctaaaaaccgcgtctaaaacgcaaaaccaacgaaacctacctcctcccgactacctaaaaactccttctctcgaaaaaaaacgctacccgactctaaaatttaaaaaaaactcgaaaaccgctcgaacacctcgctaaacactatccgtttacgccccgataacgcgaaaaaatccgaaacgaaacgctcgtctctcctcaacgatttaataaaaaaaaacaaaaaactcttcctaaaacgaataaaacctcctccctcgatcctccgtaaaatcgtcgcatcgcttatcgtattaatctcgaaaaactcacaacttaacactaatttacaaatattcgctactaatttaatttcttcttcgatttacgaacgattccctccaacgactctcgacacacgttttcctatcttcgccgaaaaaccgaatctaaaatcgccgaaacctacgaaaatccaacgcttattcgctaaccctcgaatcgcttcgct

SEQ ID NO: 34863 - DNA, 648 bp, Artificial Sequence
  chemically treated genomic DNA (Homo sapiens) CpG-island No: 34863
aaatttattgttgtagttattcgggttggagttggttcgttgggtggagttagtgttcgtttcggttcgattttcggttttcgggatatttgggttgcggaggtcggttggtcggagttacggttggggacgggcgcgtttcggagcgtacggttgcgttggaagtcgcgtttggggcgtaggattaacgggatttattttttttcggttatttaaagattttttttttcgggaaagagcgttgttcggttttgggatttgggaggagttcggaggtcgttcgggtatttcgttggatattattcgtttgcgtttcggtggcgcgggagggttcggagcggagcgttcgtttttttttagcggtttagtggagaaaagtagagagttttttttggggcgaatgggattttttttttcggtttttcgtggagtcgtcgtatcgtttgtcgtgttggtttcgaggggtttatagtttggtattaatttgtaggtgttcgttgttgatttggtttttttttcgatttgcggacggttttttttagcgattttcgatatacgtttttttgttttcgtcggagggtcgggtttggggtcgtcggagtttgcgggaatttagcgtttattcgttgattttcgagtcgtttcgtt

SEQ ID NO: 34864 - DNA, 648 bp, Artificial Sequence
  chemically treated genomic DNA (Homo sapiens) CpG-island No: 34864
aacgaaacgactcgaaaatcaacgaataaacgctaaattcccgcaaactccgacgaccccaaacccgaccctccgacgaaaacaaaaaaacgtatatcgaaaatcgctaaaaaaaaccgtccgcaaatcgaaaaaaaaaccaaatcaacaacgaacacctacaaattaataccaaactataaacccctcgaaaccaacacgacaaacgatacgacgactccacgaaaaaccgaaaaaaaaaatcccattcgccccaaaaaaaactctctacttttctccactaaaccgctaaaaaaaaacgaacgctccgctccgaaccctcccgcgccaccgaaacgcaaacgaataatatccaacgaaatacccgaacgacctccgaactcctcccaaatcccaaaaccgaacaacgctctttcccgaaaaaaaaaatctttaaataaccgaaaaaaaataaatcccgttaatcctacgccccaaacgcgacttccaacgcaaccgtacgctccgaaacgcgcccgtccccaaccgtaactccgaccaaccgacctccgcaacccaaatatcccgaaaaccgaaaatcgaaccgaaacgaacactaactccacccaacgaaccaactccaacccgaataactacaacaataaattt

SEQ ID NO: 34865 - DNA, 711 bp, Artificial Sequence
  chemically treated genomic DNA (Homo sapiens) CpG-island No: 34865
gcgtgttcgttacgtgggtcgttattgagcgagcgcgttttcgacgtttttttaaaagtttttttcgttttttttttcgttcgcgtatacgtgcgcgcgtattttcgttttacgtgggggtttcgtcgtcgtagtcgtcgtagtcgtcgtttttagtttattttttttcggtatttggttttaaattcgggttttaagtcgatcgttttttatttttattttttttttttttattttttttttttcgtgtttggtttttattacgtgtttcgagtttttgtttattttttacgcggggtcggacgtaacgggttatttggggaggcgtcgtcgtcgtggtcgtttttcgttttcgttacggtatttgttcgggtggttatcgttgtaggaagttcgatagcggcgtcgcggcgtttttaggtgggttttcgtttttcgtttttgttatttttcgtagtattagcggtttttttcggttttttttttttttttcgttgggattggcgggcggcggcggcggcggcgatcgttgttgttgttgttgttgttgttgtaggcgcgtttattatatcgtttgttggtaatcgcggttcgtgtagcgttcgcgggtcgggcgtcgtcgaggtttttttcggttagtttttgtttttgggcgaagtttggtttttcgagggcgggttgtagtttattttttgtaatcgtttaatttgg

SEQ ID NO: 34866 - DNA, 711 bp, Artificial Sequence
  chemically treated genomic DNA (Homo sapiens) CpG-island No: 34866
ccaaattaaacgattacaaaaaataaactacaacccgccctcgaaaaaccaaacttcgcccaaaaacaaaaactaaccgaaaaaaacctcgacgacgcccgacccgcgaacgctacacgaaccgcgattaccaacaaacgatataataaacgcgcctacaacaacaacaacaacaacaacaacgatcgccgccgccgccgccgcccgccaatcccaacgaaaaaaaaaaaaaaaaccgaaaaaaaccgctaatactacgaaaaataacaaaaacgaaaaacgaaaacccacctaaaaacgccgcgacgccgctatcgaacttcctacaacgataaccacccgaacaaataccgtaacgaaaacgaaaaacgaccacgacgacgacgcctccccaaataacccgttacgtccgaccccgcgtaaaaaataaacaaaaactcgaaacacgtaataaaaaccaaacacgaaaaaaaaaaaataaaaaaaaaaaaaataaaaataaaaaacgatcgacttaaaacccgaatttaaaaccaaataccgaaaaaaaataaactaaaaacgacgactacgacgactacgacgacgaaacccccacgtaaaacgaaaatacgcgcgcacgtatacgcgaacgaaaaaaaaaacgaaaaaaacttttaaaaaaacgtcgaaaacgcgctcgctcaataacgacccacgtaacgaacacgc

SEQ ID NO: 34867 - DNA, 711 bp, Artificial Sequence
  chemically treated genomic DNA (Homo sapiens) CpG-island No: 34867
ttaggttggacggttgtaagggatggattgtaattcgttttcggaagattaaatttcgtttaggggtagggattggtcggggagggtttcggcggcgttcgattcgcgggcgttgtacgggtcgcggttattagtaggcggtgtagtgagcgcgtttgtagtagtagtaatagtagtagtagcggtcgtcgtcgtcgtcgtcgttcgttagttttaacgaggagaaaggaggggatcggaaggagtcgttggtgttgcgggaagtggtaggagcgggaggcggggatttatttggaagcgtcgcggcgtcgttatcgagttttttgtagcggtggttattcgagtaagtgtcgtggcgggggcggagagcggttacggcggcggcgtttttttaagtggttcgttgcgttcgatttcgcgtgaaaggtgagtaagagttcgggatacgtggtgagggttagatacgggggagggagaatgaagggggagggaatgggggtgggaaacgatcggtttgggattcggatttggagttaagtatcgggagggggtgggttggaggcgacgattgcgacggttgcgacggcgaagtttttacgtggggcgggggtgcgcgcgtacgtgtgcgcgggcgaaagggggggcggggagggtttttgggagggcgtcgggagcgcgttcgtttagtagcggtttacgtgacgggtacgt

SEQ ID NO: 34868 - DNA, 711 bp, Artificial Sequence
  chemically treated genomic DNA (Homo sapiens) CpG-island No: 34868
acgtacccgtcacgtaaaccgctactaaacgaacgcgctcccgacgccctcccaaaaaccctccccgccccccctttcgcccgcgcacacgtacgcgcgcacccccgccccacgtaaaaacttcgccgtcgcaaccgtcgcaatcgtcgcctccaacccaccccctcccgatacttaactccaaatccgaatcccaaaccgatcgtttcccacccccattccctcccccttcattctccctcccccgtatctaaccctcaccacgtatcccgaactcttactcacctttcacgcgaaatcgaacgcaacgaaccacttaaaaaaacgccgccgccgtaaccgctctccgcccccgccacgacacttactcgaataaccaccgctacaaaaaactcgataacgacgccgcgacgcttccaaataaatccccgcctcccgctcctaccacttcccgcaacaccaacgactccttccgatcccctcctttctcctcgttaaaactaacgaacgacgacgacgacgacgaccgctactactactattactactactacaaacgcgctcactacaccgcctactaataaccgcgacccgtacaacgcccgcgaatcgaacgccgccgaaaccctccccgaccaatccctacccctaaacgaaatttaatcttccgaaaacgaattacaatccatcccttacaaccgtccaacctaa

SEQ ID NO: 34869 - DNA, 855 bp, Artificial Sequence
  chemically treated genomic DNA (Homo sapiens) CpG-island No: 34869
  unsure (573, 737)
tttcgttattcgcgtttgtattttatcgatttcgtttattcgattcgagagttcgtagttacgtttttttttttcgttattatttttagttcgttttttaacgttatatatttttttttatcgttacgcgtttaatcgagacgcgcgttcgaatgtttttttaacgttaatttcgttttttttttttacgtttatcgttaattttaatcgtcgtgatattcgtatttaacgtttgtttatttttttttatcgttatttttttgttttatttttttaaatttttttatttttttttttcgtcgtcgttcgttcgcgcgcgttttcgtcgtttcgtttcgttttttttttatttattagtatttagtatttatatttttattatatttttcgtttgtttcgttttttatttcggtttttggcgttttcgttcgtcgtcgtcgttttcgcgtcgtttttttttttatgagttacgttttttttttttttttttttttttttttttttttttcgtttttcgatattttttttacgcgcgtgtttttacgcgtttttcgtgtgttttatatttcgttnttcgaatttttttttttttattcgttttttttgttgtttttttacgattcgttcgtattaatcgcgttatcgtttcgggataatcgttttattcggtttattcgcgcgatagcgttcgagaattattcgtcgcgttgagaatcgtcggtttttagatatcgttntatttattattatatagatagtagtttatttattatttatcgtatttattttcgatttttatttttatttttatcgtcgtatcgacgtattaattatattttttcgttattttttaag

SEQ ID NO: 34870 - DNA, 855 bp, Artificial Sequence
  chemically treated genomic DNA (Homo sapiens) CpG-island No: 34870
  unsure (119, 283)
cttaaaaaataacgaaaaaatataattaatacgtcgatacgacgataaaaataaaaataaaaatcgaaaataaatacgataaataataaataaactactatctatataataataaatanaacgatatctaaaaaccgacgattctcaacgcgacgaataattctcgaacgctatcgcgcgaataaaccgaataaaacgattatcccgaaacgataacgcgattaatacgaacgaatcgtaaaaaaacaacaaaaaaaacgaataaaaaaaaaaaaattcgaanaacgaaatataaaacacacgaaaaacgcgtaaaaacacgcgcgtaaaaaaaatatcgaaaaacgaaaaaaaaaaaaaaaaaaaaaaaaaaaaaaaaaaaacgtaactcataaaaaaaaaaacgacgcgaaaacgacgacgacgaacgaaaacgccaaaaaccgaaataaaaaacgaaacaaacgaaaaatataataaaaatataaatactaaatactaataaataaaaaaaaaacgaaacgaaacgacgaaaacgcgcgcgaacgaacgacgacgaaaaaaaaaaataaaaaaatttaaaaaaataaaacaaaaaaataacgataaaaaaaaataaacaaacgttaaatacgaatatcacgacgattaaaattaacgataaacgtaaaaaaaaaaaacgaaattaacgttaaaaaaacattcgaacgcgcgtctcgattaaacgcgtaacgataaaaaaaaatatataacgttaaaaaacgaactaaaaataataacgaaaaaaaaaaacgtaactacgaactctcgaatcgaataaacgaaatcgataaaatacaaacgcgaataacgaaa

SEQ ID NO: 34871 - DNA, 855 bp, Artificial Sequence
  chemically treated genomic DNA (Homo sapiens) CpG-island No: 34871
  unsure (119, 283)
tttggaaagtagcgaggaagtgtgattagtacgtcggtacgacggtggaggtggagataggggtcggggataagtacggtgagtaatgaatgagttgttgtttgtgtggtagtggatgnggcggtgtttgagagtcgacggtttttaacgcggcgagtggttttcgagcgttgtcgcgcgggtgagtcgggtggggcggttgtttcggggcggtggcgcggttagtgcgggcgggtcgtagaaagatagtaggggaagcggatgagggggaggagattcggangacgaagtgtggggtatacgggagacgcgtgaaaatacgcgcgtggagggggtgtcggggggcggggagagggggggggggggggagaggagggaggagacgtaatttatgggagggggggcggcgcgggggcggcgacggcgggcgggggcgttagggatcggggtggggggcggggtaggcggggggtgtggtgggagtgtgagtattggatgttggtgagtggggagggggcggggcggggcggcgggggcgcgcgcgggcggacggcggcgggaaaggggggtaggggggtttggaaggatggggtaaaaaggtggcgataagggaggatggatagacgttggatacgaatattacgacggttgggattgacgatgggcgtgagagggggggacgggattggcgttgggggggtattcgggcgcgcgtttcgattaagcgcgtggcggtggggagggatatatggcgttagggagcgagttgagggtggtggcggggggggggggcgtgattgcgagttttcgggtcgggtgggcggggtcggtagaatatagacgcgggtggcgggg

SEQ ID NO: 34872 - DNA, 855 bp, Artificial Sequence
  chemically treated genomic DNA (Homo sapiens) CpG-island No: 34872
  unsure (573, 737)
ccccgccacccgcgtctatattctaccgaccccgcccacccgacccgaaaactcgcaatcacgccccccccccccgccaccaccctcaactcgctccctaacgccatatatccctccccaccgccacgcgcttaatcgaaacgcgcgcccgaatacccccccaacgccaatcccgtccccccctctcacgcccatcgtcaatcccaaccgtcgtaatattcgtatccaacgtctatccatcctcccttatcgccacctttttaccccatccttccaaacccccctacccccctttcccgccgccgtccgcccgcgcgcgcccccgccgccccgccccgccccctccccactcaccaacatccaatactcacactcccaccacaccccccgcctaccccgccccccaccccgatccctaacgcccccgcccgccgtcgccgcccccgcgccgccccccctcccataaattacgtctcctccctcctctccccccccccccccctctccccgccccccgacaccccctccacgcgcgtattttcacgcgtctcccgtataccccacacttcgtcntccgaatctcctccccctcatccgcttcccctactatctttctacgacccgcccgcactaaccgcgccaccgccccgaaacaaccgccccacccgactcacccgcgcgacaacgctcgaaaaccactcgccgcgttaaaaaccgtcgactctcaaacaccgccncatccactaccacacaaacaacaactcattcattactcaccgtacttatccccgacccctatctccacctccaccgtcgtaccgacgtactaatcacacttcctcgctactttccaaa

SEQ ID NO: 34873 - DNA, 843 bp, Artificial Sequence
  chemically treated genomic DNA (Homo sapiens) CpG-island No: 34873
gaggaggcggtgcgaggcgcgggttggtcggagtcgcgtattacgtttttcggttcgggtggaacgaggataggtgttgttttttcgcggtcgtttcggcgtagtgtaatttcgcgtcgcggttgcgtagtgtcgttttttggcggtttcgttttttttttttatcggtttcggtttgcgggttttttaaatatggaggagcgggagcggggggcgaggtcggttggcgtcgggagtttcgcgcgttcgtttagttcgcggttggatgttagttttgatagtttcgattcgttgttggttttgtacgcgtttcgtttgttttttattttttattttaatgttttttgttttaataacgtggcggagtacgagagtttttttaggatcggagttcggggcggcgggcgcgggcgcgggcgggttcggggcgcggtcgcgggttttggggttttcgtcgtattcgggttttcgggtaggattcgtcgtcgttcggacgcgttcgtttcggatttcgagcgtatttagcgttttcgtcgttttatggtggttaaagaggaaggggacggggtcgtaggagcgggtcggaggggttcgggtcggagtaggaaggcgttacgtaacgtgtttacgcgaatgttttgtgagttcgcgggtcgggcgggaagcggggtagtcgtcgttcggaagttggttgtcgagggggcgtttgcggggcggcggtggtcgggcgcgggtttgtacgtattgcgggagcgttttggtgaaaatttgcggggattattagtgattatggggtggatttgtttgagtaatgtgggtaatgagggcgtggggagggttatt

SEQ ID NO: 34874 - DNA, 843 bp, Artificial Sequence
  chemically treated genomic DNA (Homo sapiens) CpG-island No: 34874
aataaccctccccacgccctcattacccacattactcaaacaaatccaccccataatcactaataatccccgcaaattttcaccaaaacgctcccgcaatacgtacaaacccgcgcccgaccaccgccgccccgcaaacgccccctcgacaaccaacttccgaacgacgactaccccgcttcccgcccgacccgcgaactcacaaaacattcgcgtaaacacgttacgtaacgccttcctactccgacccgaacccctccgacccgctcctacgaccccgtccccttcctctttaaccaccataaaacgacgaaaacgctaaatacgctcgaaatccgaaacgaacgcgtccgaacgacgacgaatcctacccgaaaacccgaatacgacgaaaaccccaaaacccgcgaccgcgccccgaacccgcccgcgcccgcgcccgccgccccgaactccgatcctaaaaaaactctcgtactccgccacgttattaaaacaaaaaacattaaaataaaaaataaaaaacaaacgaaacgcgtacaaaaccaacaacgaatcgaaactatcaaaactaacatccaaccgcgaactaaacgaacgcgcgaaactcccgacgccaaccgacctcgccccccgctcccgctcctccatatttaaaaaacccgcaaaccgaaaccgataaaaaaaaaaaacgaaaccgccaaaaaacgacactacgcaaccgcgacgcgaaattacactacgccgaaacgaccgcgaaaaaacaacacctatcctcgttccacccgaaccgaaaaacgtaatacgcgactccgaccaacccgcgcctcgcaccgcctcctc

SEQ ID NO: 34875 - DNA, 843 bp, Artificial Sequence
  chemically treated genomic DNA (Homo sapiens) CpG-island No: 34875
ggtgattttttttacgtttttattatttatattatttaagtagatttattttatagttattgatgattttcgtaaatttttattaaggcgttttcgtaatacgtgtagattcgcgttcggttatcgtcgtttcgtagacgttttttcggtagttagttttcggacggcggttgtttcgtttttcgttcggttcgcggatttatagggtattcgcgtgagtacgttgcgtggcgtttttttgtttcgattcggattttttcggttcgtttttgcggtttcgttttttttttttttggttattatgagacggcggaggcgttggatgcgttcggggttcggggcgggcgcgttcgggcggcgacgagttttgttcgagggttcgggtgcggcgggaattttagagttcgcggtcgcgtttcgagttcgttcgcgttcgcgttcgtcgtttcggatttcggttttgaggaagttttcgtatttcgttacgttgttgaagtagggggtattggggtagggaatgggaggtaggcggggcgcgtatagggttagtagcgggtcgaagttgttagagttgatatttagtcgcgggttgggcgggcgcgcggggttttcggcgttagtcgatttcgtttttcgttttcgtttttttatgtttgaaaggttcgtaagtcgaggtcgatgggaagaaggaacgaagtcgttagagggcggtattgcgtagtcgcggcgcggggttgtattgcgtcgaagcggtcgcgggagggtagtatttgttttcgttttattcgggtcggggggcgtggtacgcggtttcgattagttcgcgtttcgtatcgttttttt

SEQ ID NO: 34876 - DNA, 843 bp, Artificial Sequence
  chemically treated genomic DNA (Homo sapiens) CpG-island No: 34876
aaaaaaacgatacgaaacgcgaactaatcgaaaccgcgtaccacgccccccgacccgaataaaacgaaaacaaatactaccctcccgcgaccgcttcgacgcaatacaaccccgcgccgcgactacgcaataccgccctctaacgacttcgttccttcttcccatcgacctcgacttacgaacctttcaaacataaaaaaacgaaaacgaaaaacgaaatcgactaacgccgaaaaccccgcgcgcccgcccaacccgcgactaaatatcaactctaacaacttcgacccgctactaaccctatacgcgccccgcctacctcccattccctaccccaataccccctacttcaacaacgtaacgaaatacgaaaacttcctcaaaaccgaaatccgaaacgacgaacgcgaacgcgaacgaactcgaaacgcgaccgcgaactctaaaattcccgccgcacccgaaccctcgaacaaaactcgtcgccgcccgaacgcgcccgccccgaaccccgaacgcatccaacgcctccgccgtctcataataaccaaaaaaaaaaaaaacgaaaccgcaaaaacgaaccgaaaaaatccgaatcgaaacaaaaaaacgccacgcaacgtactcacgcgaataccctataaatccgcgaaccgaacgaaaaacgaaacaaccgccgtccgaaaactaactaccgaaaaaacgtctacgaaacgacgataaccgaacgcgaatctacacgtattacgaaaacgccttaataaaaatttacgaaaatcatcaataactataaaataaatctacttaaataatataaataataaaaacgtaaaaaaaatcacc

SEQ ID NO: 34877 - DNA, 1198 bp, Artificial Sequence
  chemically treated genomic DNA (Homo sapiens) CpG-island No: 34877
gtcgcgaggagaggcgtaaagggtgatatattaggaaaggtgaacgtagagggagcgggagttcgcggcggggtagggtgggggcggaacggacgaggtatttaaggtgcggagagaggggtaatcgggcggagggtagtttcgaggttgtaggcgggacgggcggggttttcggcgtagttcggatcgtcgtcgttaagtaaagttaatatttatttagtttcgtaattgcgtcgttttcgtaggtcgtttagaggggtcggtcggggcgttggggacgcggcggtattcggagtttcgcggtcgtttagcgttcgttttcgcgtcgtatttttcggtatttttcggcgtttttcgcgtcgcgcgtttcgtatcggttggaggtttcggtttttcggcgtttttttttcgcgtatttttcggttcgcgttaggtgagtgtggacgttattggcgggggtgtcgcggtgcgcgagcgttcggttagcggtagagacgtcgcgggagtcgtttttagcgttaacgtcgtcgcgggcgggaagggcgaggttcggcgaggttgggcgaggagttgggcggtagacgttgagcggggcgcggcgcggggcgtcggacgagcgcgggcgtaggaggagcgcgggcgtaggagtcggcgattcgttcgttttcgcggtcggtgtttttgggttgggggtcgggttgggggtcgggtcgggtcgggtcgggtcgggcggttaggcggtttcgttttttcgtcgggtagcggttgagcgcgcgagaggagcggcgcgggggcgtttttttcggtcgggcgttcgggttttagtcgtcgttttttcgcgtttcgttcgcgtttggttcgttcgtcggcgtcgggagagatttcgtaacggaattgggacgttagcgttgtattgtgggagtttttaaagcggcggggagttcggcgcgattttcgggtttatcgggttacgttcgttcggttcgcgacgttttttcgttgtcgtttggttcgcgacgtatcgaggtttgaggattcgaaagtcgggcgcggggagatgatcggtggttcgtgacggttttacgggtaaaattttttatcgttcggggttgagatttgttaaattgttttttacggttattcggaaagtaggaggttttttttgtagaggggaaaaaaattaaaaagagtcgtttta

SEQ ID NO: 34878 - DNA, 1198 bp, Artificial Sequence
  chemically treated genomic DNA (Homo sapiens) CpG-island No: 34878
taaaacgactctttttaatttttttcccctctacaaaaaaaacctcctactttccgaataaccgtaaaaaacaatttaacaaatctcaaccccgaacgataaaaaattttacccgtaaaaccgtcacgaaccaccgatcatctccccgcgcccgactttcgaatcctcaaacctcgatacgtcgcgaaccaaacgacaacgaaaaaacgtcgcgaaccgaacgaacgtaacccgataaacccgaaaatcgcgccgaactccccgccgctttaaaaactcccacaatacaacgctaacgtcccaattccgttacgaaatctctcccgacgccgacgaacgaaccaaacgcgaacgaaacgcgaaaaaacgacgactaaaacccgaacgcccgaccgaaaaaaacgcccccgcgccgctcctctcgcgcgctcaaccgctacccgacgaaaaaacgaaaccgcctaaccgcccgacccgacccgacccgacccgacccccaacccgacccccaacccaaaaacaccgaccgcgaaaacgaacgaatcgccgactcctacgcccgcgctcctcctacgcccgcgctcgtccgacgccccgcgccgcgccccgctcaacgtctaccgcccaactcctcgcccaacctcgccgaacctcgcccttcccgcccgcgacgacgttaacgctaaaaacgactcccgcgacgtctctaccgctaaccgaacgctcgcgcaccgcgacacccccgccaataacgtccacactcacctaacgcgaaccgaaaaatacgcgaaaaaaaaacgccgaaaaaccgaaacctccaaccgatacgaaacgcgcgacgcgaaaaacgccgaaaaataccgaaaaatacgacgcgaaaacgaacgctaaacgaccgcgaaactccgaataccgccgcgtccccaacgccccgaccgacccctctaaacgacctacgaaaacgacgcaattacgaaactaaataaatattaactttacttaacgacgacgatccgaactacgccgaaaaccccgcccgtcccgcctacaacctcgaaactaccctccgcccgattacccctctctccgcaccttaaatacctcgtccgttccgcccccaccctaccccgccgcgaactcccgctccctctacgttcacctttcctaatatatcaccctttacgcctctcctcgcgac

SEQ ID NO: 34879 - DNA, 1198 bp, Artificial Sequence
  chemically treated genomic DNA (Homo sapiens) CpG-island No: 34879
tggaacggttttttttgattttttttttttttgtagaaaaagttttttatttttcgggtgatcgtagagggtagtttgataagttttagtttcgggcgatggaagattttgttcgtgggatcgttacgagttatcggttattttttcgcgttcggttttcgggtttttaggtttcggtgcgtcgcgggttaggcgatagcgggggggcgtcgcgggtcgggcgagcgtggttcggtgggttcgagggtcgcgtcgagtttttcgtcgttttaaaagtttttataatgtagcgttggcgttttagtttcgttacgaggtttttttcggcgtcggcgagcgggttaggcgcgggcggggcgcggaggagcggcggttgaaattcgagcgttcggtcgaggggggcgttttcgcgtcgtttttttcgcgcgtttagtcgttgttcggcgaaggggcggagtcgtttggtcgttcggttcggttcggttcggttcggtttttagttcggtttttagtttagaggtatcggtcgcgggagcgagcgggtcgtcgatttttacgttcgcgttttttttacgttcgcgttcgttcggcgtttcgcgtcgcgtttcgtttagcgtttgtcgtttagtttttcgtttagtttcgtcgagtttcgtttttttcgttcgcggcggcgttggcgttgggggcggttttcgcggcgtttttgtcgttggtcgagcgttcgcgtatcgcggtattttcgttagtggcgtttatatttatttagcgcgggtcgggaggtgcgcggagagggaacgtcggggggtcggggtttttagtcggtgcggggcgcgcggcgcggggagcgtcggggagtgtcggggagtgcggcgcggggacgggcgttgggcggtcgcggagtttcgggtgtcgtcgcgtttttagcgtttcggtcggtttttttgggcggtttgcgggggcggcgtagttgcgaaattgagtaagtattaattttatttagcggcggcgattcgggttgcgtcggggatttcgttcgtttcgtttgtagtttcggagttgtttttcgttcggttgttttttttttcgtattttgggtatttcgttcgtttcgtttttattttgtttcgtcgcgggttttcgttttttttgcgtttattttttttggtgtgttattttttgcgttttttttcgcggt

SEQ ID NO: 34880 - DNA, 1198 bp, Artificial Sequence
  chemically treated genomic DNA (Homo sapiens) CpG-island No: 34880
accgcgaaaaaaaacgcaaaaaataacacaccaaaaaaaataaacgcaaaaaaaacgaaaacccgcgacgaaacaaaataaaaacgaaacgaacgaaatacccaaaatacgaaaaaaaaaacaaccgaacgaaaaacaactccgaaactacaaacgaaacgaacgaaatccccgacgcaacccgaatcgccgccgctaaataaaattaatacttactcaatttcgcaactacgccgcccccgcaaaccgcccaaaaaaaccgaccgaaacgctaaaaacgcgacgacacccgaaactccgcgaccgcccaacgcccgtccccgcgccgcactccccgacactccccgacgctccccgcgccgcgcgccccgcaccgactaaaaaccccgaccccccgacgttccctctccgcgcacctcccgacccgcgctaaataaatataaacgccactaacgaaaataccgcgatacgcgaacgctcgaccaacgacaaaaacgccgcgaaaaccgcccccaacgccaacgccgccgcgaacgaaaaaaacgaaactcgacgaaactaaacgaaaaactaaacgacaaacgctaaacgaaacgcgacgcgaaacgccgaacgaacgcgaacgtaaaaaaaacgcgaacgtaaaaatcgacgacccgctcgctcccgcgaccgatacctctaaactaaaaaccgaactaaaaaccgaaccgaaccgaaccgaaccgaacgaccaaacgactccgccccttcgccgaacaacgactaaacgcgcgaaaaaaacgacgcgaaaacgcccccctcgaccgaacgctcgaatttcaaccgccgctcctccgcgccccgcccgcgcctaacccgctcgccgacgccgaaaaaaacctcgtaacgaaactaaaacgccaacgctacattataaaaacttttaaaacgacgaaaaactcgacgcgaccctcgaacccaccgaaccacgctcgcccgacccgcgacgcccccccgctatcgcctaacccgcgacgcaccgaaacctaaaaacccgaaaaccgaacgcgaaaaaataaccgataactcgtaacgatcccacgaacaaaatcttccatcgcccgaaactaaaacttatcaaactaccctctacgatcacccgaaaaataaaaaactttttctacaaaaaaaaaaaaaatcaaaaaaaaccgttcca

SEQ ID NO: 34881 - DNA, 659 bp, Artificial Sequence
  chemically treated genomic DNA (Homo sapiens) CpG-island No: 34881
agaaggcgcggagtggtagcggtaagaataacgtggaaaggacggaaaacgcgaagagtggcgttttggcggatttggggcggggtagagtggtaagggttacgttaggacgtattcggttgtgggtcgggggaggagagtacggtgggatagtaacgaatttgttgggggttttcggattcgagtttcgtcgatgaggttagcggagtttaggcgtcgggaggaggttagtagagtttttagatacgagtgtcgggaggttagcggaggggcgggacgggacgggaaatgggacgaagagtaagagttgggggaggagggaagagggggcgtcggcgttgtaagtcggaggcggttcgatagggatcgttttttttcggagaggaggtcggttttggattgaggcgcggacggggggcgtttaagggcgggtgacggggaaatatcgcggttcgcgttttttttcggttggtagcggtgtcgtttgcggtttttttttcgggttagttcggagttcggcggcggggggagcgggaggcgggagtgagggcgggggttcgggaaggagggaggagggagggtttaggcgcgttattgatagggtggtagtttaggagcggacgcgttgtcgtcgtcgttgtttttttttttttttttgt

SEQ ID NO: 34882 - DNA, 659 bp, Artificial Sequence
  chemically treated genomic DNA (Homo sapiens) CpG-island No: 34882
acaaaaaaaaaaaaaaaaacaacgacgacgacaacgcgtccgctcctaaactaccaccctatcaataacgcgcctaaaccctccctcctccctccttcccgaacccccgccctcactcccgcctcccgctccccccgccgccgaactccgaactaacccgaaaaaaaaaccgcaaacgacaccgctaccaaccgaaaaaaaacgcgaaccgcgatatttccccgtcacccgcccttaaacgccccccgtccgcgcctcaatccaaaaccgacctcctctccgaaaaaaaacgatccctatcgaaccgcctccgacttacaacgccgacgccccctcttccctcctcccccaactcttactcttcgtcccatttcccgtcccgtcccgcccctccgctaacctcccgacactcgtatctaaaaactctactaacctcctcccgacgcctaaactccgctaacctcatcgacgaaactcgaatccgaaaacccccaacaaattcgttactatcccaccgtactctcctcccccgacccacaaccgaatacgtcctaacgtaacccttaccactctaccccgccccaaatccgccaaaacgccactcttcgcgttttccgtcctttccacgttattcttaccgctaccactccgcgccttct

SEQ ID NO: 34883 - DNA, 659 bp, Artificial Sequence
  chemically treated genomic DNA (Homo sapiens) CpG-island No: 34883
gtaggaggaggaggaggagtagcggcggcggtaacgcgttcgtttttaggttgttattttgttagtggcgcgtttgggtttttttttttttttttttttcgagttttcgtttttattttcgtttttcgtttttttcgtcgtcgggtttcgagttggttcggaggaggagtcgtaggcggtatcgttgttagtcggagagaagcgcgggtcgcggtattttttcgttattcgtttttggacgtttttcgttcgcgttttagtttagagtcggtttttttttcggaaggaaacgatttttgtcgggtcgttttcggtttgtagcgtcgacgtttttttttttttttttttttagtttttgtttttcgttttatttttcgtttcgtttcgttttttcgttggtttttcgatattcgtgtttgggggttttattggttttttttcggcgtttaggtttcgttgattttatcggcggagttcgggttcgggagtttttagtaagttcgttgttgttttatcgtgtttttttttttcggtttatagtcgggtacgttttggcgtgatttttattattttgtttcgttttaggttcgttagggcgttatttttcgcgtttttcgttttttttacgttgtttttatcgttgttatttcgcgtttttt

SEQ ID NO: 34884 - DNA, 659 bp, Artificial Sequence
  chemically treated genomic DNA (Homo sapiens) CpG-island No: 34884
aaaaaacgcgaaataacaacgataaaaacaacgtaaaaaaaacgaaaaacgcgaaaaataacgccctaacgaacctaaaacgaaacaaaataataaaaatcacgccaaaacgtacccgactataaaccgaaaaaaaaaaacacgataaaacaacaacgaacttactaaaaactcccgaacccgaactccgccgataaaatcaacgaaacctaaacgccgaaaaaaaaccaataaaacccccaaacacgaatatcgaaaaaccaacgaaaaaacgaaacgaaacgaaaaataaaacgaaaaacaaaaactaaaaaaaaaaaaaaaaaaaaacgtcgacgctacaaaccgaaaacgacccgacaaaaatcgtttccttccgaaaaaaaaaccgactctaaactaaaacgcgaacgaaaaacgtccaaaaacgaataacgaaaaaataccgcgacccgcgcttctctccgactaacaacgataccgcctacgactcctcctccgaaccaactcgaaacccgacgacgaaaaaaacgaaaaacgaaaataaaaacgaaaactcgaaaaaaaaaaaaaaaaaaaaacccaaacgcgccactaacaaaataacaacctaaaaacgaacgcgttaccgccgccgctactcctcctcctcctcctac

SEQ ID NO: 34885 - DNA, 1087 bp, Artificial Sequence
  chemically treated genomic DNA (Homo sapiens) CpG-island No: 34885
tttttttagttgtcgttgttgtcgtcgttgtcgttatcgtcgtcgtcgggagaagttttattttcgatttttgttcggagtttcggtttagagttgagcgggagttcggtaggtagttgtagttcgcggtagtcgaggcgttcgcggcgtttcgatttttagtcggtgtcggcgtttaggcggtcggttgcggtcgcggttgggggcgtaaaggcggaggaggggcgggtgtgagtcggggaaatcgcgtgtcgcgtcgcgatagtttagcgagcgttcgcgttcgggatagtcgcgatggttgtgcgttttcgtcgttcgtggatgagcgtggtattagggttggtgttgggttttatcgtcgcgttttggtttatcgtttttagggtggcggagttgagcgagaggaagagacgtggttttagtttttgtttttattacggtcgttttgttgttggttttcgcgtcggcgtttagtagtcgtttttttagttttagtttcgattacggtaggagtagtcgtcgtttttcgcgcgttaggatttttaggggttatcgttgttcgaggtagtattcgggattattagttttcgaagtagtttttggtagtagttattttcgttgtagtagcggcggcgaggacgcgagtttgagggcgcgacggggtttttcggtgttttagcggtcgagggggagttcgaggaggaggacgggggcgcggttgggtagcggagagacggtcggttcgggagtagttataacggtagcggggacgggggcgttgtcgtttcgagcgttcgatttcgggattttttgtacgtgggggtgatgatcgcgtagaagtatttgggtagtcgcgcgttggtcgcgtagcggatttgggcgcgttttatttcgggtcgcgtggagtttttttttagttagtagttttttaacgtcggttagttttcgttatttttgtttgttatcgcgttatcgggtgtggacgatttttattttttttagaaaaagttttttatgatgattaagtatatgtacgattattatttggataagtatgagtggtttatgcgcgtcgacgacgatg

SEQ ID NO: 34886 - DNA, 1087 bp, Artificial Sequence
  chemically treated genomic DNA (Homo sapiens) CpG-island No: 34886
catcgtcgtcgacgcgcataaaccactcatacttatccaaataataatcgtacatatacttaatcatcataaaaaactttttctaaaaaaaataaaaatcgtccacacccgataacgcgataacaaacaaaaataacgaaaactaaccgacgttaaaaaactactaactaaaaaaaaactccacgcgacccgaaataaaacgcgcccaaatccgctacgcgaccaacgcgcgactacccaaatacttctacgcgatcatcacccccacgtacaaaaaatcccgaaatcgaacgctcgaaacgacaacgcccccgtccccgctaccgttataactactcccgaaccgaccgtctctccgctacccaaccgcgcccccgtcctcctcctcgaactccccctcgaccgctaaaacaccgaaaaaccccgtcgcgccctcaaactcgcgtcctcgccgccgctactacaacgaaaataactactaccaaaaactacttcgaaaactaataatcccgaatactacctcgaacaacgataacccctaaaaatcctaacgcgcgaaaaacgacgactactcctaccgtaatcgaaactaaaactaaaaaaacgactactaaacgccgacgcgaaaaccaacaacaaaacgaccgtaataaaaacaaaaactaaaaccacgtctcttcctctcgctcaactccgccaccctaaaaacgataaaccaaaacgcgacgataaaacccaacaccaaccctaataccacgctcatccacgaacgacgaaaacgcacaaccatcgcgactatcccgaacgcgaacgctcgctaaactatcgcgacgcgacacgcgatttccccgactcacacccgcccctcctccgcctttacgcccccaaccgcgaccgcaaccgaccgcctaaacgccgacaccgactaaaaatcgaaacgccgcgaacgcctcgactaccgcgaactacaactacctaccgaactcccgctcaactctaaaccgaaactccgaacaaaaatcgaaaataaaacttctcccgacgacgacgataacgacaacgacgacaacaacgacaactaaaaaaa

SEQ ID NO: 34887 - DNA, 1087 bp, Artificial Sequence
  chemically treated genomic DNA (Homo sapiens) CpG-island No: 34887
tatcgtcgtcggcgcgtatgaattatttatatttgtttaggtagtggtcgtgtatgtatttgattattatgaaggattttttttggggaggataggagtcgtttatattcggtagcgcgatgataggtaggggtggcgggggttggtcggcgttggggggttgttggttggaaaagaattttacgcggttcgggatgaaacgcgtttaggttcgttgcgcggttagcgcgcggttgtttaggtatttttgcgcggttattatttttacgtataggaagtttcggggtcgggcgttcggggcggtagcgttttcgttttcgttgtcgttgtggttattttcgggtcggtcgttttttcgttgtttagtcgcgttttcgttttttttttcgggttttttttcggtcgttggagtatcgggaagtttcgtcgcgtttttaggttcgcgttttcgtcgtcgttgttgtagcggaggtggttgttgttaggggttgtttcgaaaattggtgatttcgggtgttgtttcgggtagcggtggtttttggagattttggcgcgcggggggcggcgattgtttttgtcgtggtcgggattggggttgggggagcggttgttgagcgtcggcgcgggggttagtagtagagcgatcgtagtaggagtagaggttggagttacgtttttttttttcgtttagtttcgttattttgggggcgatgagttaggacgcggcggtgaagtttagtattagttttaatgttacgtttatttacgggcggcgagagcgtatagttatcgcggttgtttcgggcgcggacgttcgttgggttgtcgcggcgcggtacgcggttttttcggtttatattcgtttttttttcgtttttgcgtttttagtcgcggtcgtagtcggtcgtttaggcgtcgatatcggttggaggtcgaagcgtcgcggacgtttcgattgtcgcgggttgtagttgtttgtcgggttttcgtttagttttgggtcggggtttcgagtaagggtcgggagtgaaatttttttcggcggcggcggtggcggtagcggcggtagtagcggtagttagaggag

SEQ ID NO: 34888 - DNA, 1087 bp, Artificial Sequence
  chemically treated genomic DNA (Homo sapiens) CpG-island No: 34888
ctcctctaactaccgctactaccgccgctaccgccaccgccgccgccgaaaaaaatttcactcccgacccttactcgaaaccccgacccaaaactaaacgaaaacccgacaaacaactacaacccgcgacaatcgaaacgtccgcgacgcttcgacctccaaccgatatcgacgcctaaacgaccgactacgaccgcgactaaaaacgcaaaaacgaaaaaaaaacgaatataaaccgaaaaaaccgcgtaccgcgccgcgacaacccaacgaacgtccgcgcccgaaacaaccgcgataactatacgctctcgccgcccgtaaataaacgtaacattaaaactaatactaaacttcaccgccgcgtcctaactcatcgcccccaaaataacgaaactaaacgaaaaaaaaaaacgtaactccaacctctactcctactacgatcgctctactactaacccccgcgccgacgctcaacaaccgctcccccaaccccaatcccgaccacgacaaaaacaatcgccgccccccgcgcgccaaaatctccaaaaaccaccgctacccgaaacaacacccgaaatcaccaattttcgaaacaacccctaacaacaaccacctccgctacaacaacgacgacgaaaacgcgaacctaaaaacgcgacgaaacttcccgatactccaacgaccgaaaaaaaacccgaaaaaaaaaacgaaaacgcgactaaacaacgaaaaaacgaccgacccgaaaataaccacaacgacaacgaaaacgaaaacgctaccgccccgaacgcccgaccccgaaacttcctatacgtaaaaataataaccgcgcaaaaatacctaaacaaccgcgcgctaaccgcgcaacgaacctaaacgcgtttcatcccgaaccgcgtaaaattcttttccaaccaacaaccccccaacgccgaccaacccccgccacccctacctatcatcgcgctaccgaatataaacgactcctatcctccccaaaaaaaatccttcataataatcaaatacatacacgaccactacctaaacaaatataaataattcatacgcgccgacgacgata

SEQ ID NO: 34889 - DNA, 678 bp, Artificial Sequence
  chemically treated genomic DNA (Homo sapiens) CpG-island No: 34889
tatcgttgcggagtcgagttcgaggtttttttttgtttgcggttttttagttttcgcggggttcgacgtagtttggcgtttgcgttttggtttttatcggggttcggtattgttttcgggcgtttcgtatttaagtatatttttagtcgttttcgttacgagggttagttaggatttatttggtcgcggtcgttatcgtcgtcgtagtcgtcgttatattaagttaagttcgtttcgtggttttatcgcggttatcgtcgtcgtagtcgcgggattttcgttttcgtcgtcgttacggtttcgagcggtttggttcgttttcggcggaaatgttcgagcgtattcgagtcgggcggatgaatcgaggtcgaggcggagtttgaggtaagggggtattcgagtgttttcggaagtagtcgaacgtaatttcgcgggattggtggattagagggtgttttcgagatagtcgagcgtttttagaggtagtcgagtgtaatcgggtcggcgagggattcgagattgggttcggttgggtttagagacgttcgagcgttttcggaaatggtcgaatattttttacggtcgtattggtataattgaggttgatttttaagatcgcggagcgtttttggaaataatcgaatgtgtttagtgtttaatggaggttttgggagttta

SEQ ID NO: 34890 - DNA, 678 bp, Artificial Sequence
  chemically treated genomic DNA (Homo sapiens) CpG-island No: 34890
taaactcccaaaacctccattaaacactaaacacattcgattatttccaaaaacgctccgcgatcttaaaaatcaacctcaattataccaatacgaccgtaaaaaatattcgaccatttccgaaaacgctcgaacgtctctaaacccaaccgaacccaatctcgaatccctcgccgacccgattacactcgactacctctaaaaacgctcgactatctcgaaaacaccctctaatccaccaatcccgcgaaattacgttcgactacttccgaaaacactcgaatacccccttacctcaaactccgcctcgacctcgattcatccgcccgactcgaatacgctcgaacatttccgccgaaaacgaaccaaaccgctcgaaaccgtaacgacgacgaaaacgaaaatcccgcgactacgacgacgataaccgcgataaaaccacgaaacgaacttaacttaatataacgacgactacgacgacgataacgaccgcgaccaaataaatcctaactaaccctcgtaacgaaaacgactaaaaatatacttaaatacgaaacgcccgaaaacaataccgaaccccgataaaaaccaaaacgcaaacgccaaactacgtcgaaccccgcgaaaactaaaaaaccgcaaacaaaaaaaaacctcgaactcgactccgcaacgata

SEQ ID NO: 34891 - DNA, 678 bp, Artificial Sequence
  chemically treated genomic DNA (Homo sapiens) CpG-island No: 34891
taaatttttaaggtttttattgggtattgagtatattcggttatttttagaaacgtttcgcggttttggggattagttttagttgtgttagtgcggtcgtagagagtgttcggttattttcgaaagcgttcgggcgtttttaagtttagtcgagtttagtttcggatttttcgtcgattcgattgtattcggttatttttggaaacgttcggttgtttcgggggtattttttagtttattagtttcgcgggattacgttcggttattttcggaaatattcgggtgtttttttattttaggtttcgtttcggtttcggtttattcgttcggttcgaatgcgttcgggtattttcgtcgggggcgggttaggtcgttcggaatcgtggcggcggcggaggcggggatttcgcggttgcggcgacggtggtcgcggtggagttacggggcgggtttggtttggtgtgacggcggttgcggcggcggtggcggtcgcgattaggtgagttttgattggttttcgtggcgggggcggttgggagtgtgtttaaatgcggggcgttcgggggtagtgtcgggtttcggtggaagttagaacgtaagcgttaggttgcgtcgggtttcgcgggaattggggggtcgtaggtaagggggggtttcgggttcggtttcgtagcggtg

SEQ ID NO: 34892 - DNA, 678 bp, Artificial Sequence
  chemically treated genomic DNA (Homo sapiens) CpG-island No: 34892
caccgctacgaaaccgaacccgaaacccccccttacctacgaccccccaattcccgcgaaacccgacgcaacctaacgcttacgttctaacttccaccgaaacccgacactacccccgaacgccccgcatttaaacacactcccaaccgcccccgccacgaaaaccaatcaaaactcacctaatcgcgaccgccaccgccgccgcaaccgccgtcacaccaaaccaaacccgccccgtaactccaccgcgaccaccgtcgccgcaaccgcgaaatccccgcctccgccgccgccacgattccgaacgacctaacccgcccccgacgaaaatacccgaacgcattcgaaccgaacgaataaaccgaaaccgaaacgaaacctaaaataaaaaaacacccgaatatttccgaaaataaccgaacgtaatcccgcgaaactaataaactaaaaaatacccccgaaacaaccgaacgtttccaaaaataaccgaatacaatcgaatcgacgaaaaatccgaaactaaactcgactaaacttaaaaacgcccgaacgctttcgaaaataaccgaacactctctacgaccgcactaacacaactaaaactaatccccaaaaccgcgaaacgtttctaaaaataaccgaatatactcaatacccaataaaaaccttaaaaattta

SEQ ID NO: 34893 - DNA, 505 bp, Artificial Sequence
  chemically treated genomic DNA (Homo sapiens) CpG-island No: 34893
ttttatgtcgaggtagaggtcgtttttgtgcggcggggtatcgacgtttttttgttggttttcggaagttttgatcgtggcgcgagcggatcgacggacggatatacggacgtagggatagacgtttggttggtgcggtagattagacgcgggggttgggtcgttgggggtcgggttggtttcgtttcggggcggggatcgtagtttcgtatttgcgcgtaggttcggttcggtagcgagggtcgcgtagcgggaaaggggagtcgcgggtgtcgttttgtttgtcgtagggacgtcgaggtcgtcggtttgggagttttcgagttgcgtttcggaagggaagggcggttattggtttcgcggttcgcgcgattgttttatggtttgatttcgttttttttcgtttcggttcggtttttgttttcgtttcggttttggggttttttgggagtcgggatttgagcgtagttcgttttaattttttaatttcgtatttcggttagtt

SEQ ID NO: 34894 - DNA, 505 bp, Artificial Sequence
  chemically treated genomic DNA (Homo sapiens) CpG-island No: 34894
aactaaccgaaatacgaaattaaaaaattaaaacgaactacgctcaaatcccgactcccaaaaaaccccaaaaccgaaacgaaaacaaaaaccgaaccgaaacgaaaaaaaacgaaatcaaaccataaaacaatcgcgcgaaccgcgaaaccaataaccgcccttcccttccgaaacgcaactcgaaaactcccaaaccgacgacctcgacgtccctacgacaaacaaaacgacacccgcgactcccctttcccgctacgcgaccctcgctaccgaaccgaacctacgcgcaaatacgaaactacgatccccgccccgaaacgaaaccaacccgacccccaacgacccaacccccgcgtctaatctaccgcaccaaccaaacgtctatccctacgtccgtatatccgtccgtcgatccgctcgcgccacgatcaaaacttccgaaaaccaacaaaaaaacgtcgataccccgccgcacaaaaacgacctctacctcgacataaaa

SEQ ID NO: 34895 - DNA, 505 bp, Artificial Sequence
  chemically treated genomic DNA (Homo sapiens) CpG-island No: 34895
agttggtcgggatgcggggttggggagttggggcggattgcgtttagatttcggtttttagagagttttagggtcggggcgagggtagaggtcgggtcggggcggggagaggcggggttaggttatggagtaatcgcgcggatcgcggagttagtgatcgtttttttttttcggggcgtagttcgggggtttttaagtcggcggtttcggcgtttttgcggtagatagggcggtattcgcggtttttttttttcgttgcgcgattttcgttgtcgggtcgggtttgcgcgtaggtgcggagttgcgattttcgtttcgaggcggagttagttcggtttttagcggtttagttttcgcgtttagtttgtcgtattagttaggcgtttgtttttgcgttcgtgtgttcgttcgtcggttcgttcgcgttacgattagggttttcgggggttaataagggggcgtcggtatttcgtcgtatagaggcggtttttgtttcggtatgaag

SEQ ID NO: 34896 - DNA, 505 bp, Artificial Sequence
  chemically treated genomic DNA (Homo sapiens) CpG-island No: 34896
cttcataccgaaacaaaaaccgcctctatacgacgaaataccgacgcccccttattaacccccgaaaaccctaatcgtaacgcgaacgaaccgacgaacgaacacacgaacgcaaaaacaaacgcctaactaatacgacaaactaaacgcgaaaactaaaccgctaaaaaccgaactaactccgcctcgaaacgaaaatcgcaactccgcacctacgcgcaaacccgacccgacaacgaaaatcgcgcaacgaaaaaaaaaaaccgcgaataccgccctatctaccgcaaaaacgccgaaaccgccgacttaaaaacccccgaactacgccccgaaaaaaaaaaacgatcactaactccgcgatccgcgcgattactccataacctaaccccgcctctccccgccccgacccgacctctaccctcgccccgaccctaaaactctctaaaaaccgaaatctaaacgcaatccgccccaactccccaaccccgcatcccgaccaact

SEQ ID NO: 34897 - DNA, 632 bp, Artificial Sequence
  chemically treated genomic DNA (Homo sapiens) CpG-island No: 34897
tcgttttcgtcgttcgcgatcgtagtaacgttcggttttagtcgttcgtcgtttagtaacgtttcgttttttcgttcgcggttatggtagcgtttcgtttattcgtcggtacgcgggttcgtcggtttcgttttcgcgtcgttcgtttcgtttttcgatagtatttatttttaacgtattcgatttcgtattcgtttgggcggagttttagtcgcgttcgggggcgtcgtttttttttcgtcgtttttttattttcgtagtttcgtgcgtttttttttttgttcggtttcgcggggtttttggggtcgattttatcgtcgaggttttttttttcggtttcggcggttgcggcggtataaagggaagtagtatgttcgattttagttattggacggcggtggcggttttcggttatcggagtcgtttggtaaaaggcgcgttgttgtagcgttttaaagaggtaggggggacggcgtcggcgaaggttcgggggttagtcgagtaaataggagttgttagaagtgtgttcgtggtttggcgcggattacggcgagcgtttgtttgtggtagtagtgggaaggggggaggacgtttgtggatcgaggtgttttttggggtttttggtatttttt

SEQ ID NO: 34898 - DNA, 632 bp, Artificial Sequence
  chemically treated genomic DNA (Homo sapiens) CpG-island No: 34898
aaaaaataccaaaaaccccaaaaaacacctcgatccacaaacgtcctccccccttcccactactaccacaaacaaacgctcgccgtaatccgcgccaaaccacgaacacacttctaacaactcctatttactcgactaacccccgaaccttcgccgacgccgtcccccctacctctttaaaacgctacaacaacgcgccttttaccaaacgactccgataaccgaaaaccgccaccgccgtccaataactaaaatcgaacatactacttccctttataccgccgcaaccgccgaaaccgaaaaaaaaaacctcgacgataaaatcgaccccaaaaaccccgcgaaaccgaacaaaaaaaaaaacgcacgaaactacgaaaataaaaaaacgacgaaaaaaaaacgacgcccccgaacgcgactaaaactccgcccaaacgaatacgaaatcgaatacgttaaaaataaatactatcgaaaaacgaaacgaacgacgcgaaaacgaaaccgacgaacccgcgtaccgacgaataaacgaaacgctaccataaccgcgaacgaaaaaacgaaacgttactaaacgacgaacgactaaaaccgaacgttactacgatcgcgaacgacgaaaacga

SEQ ID NO: 34899 - DNA, 632 bp, Artificial Sequence
  chemically treated genomic DNA (Homo sapiens) CpG-island No: 34899
ggagggtgttagggattttaggggatatttcgatttataggcgtttttttttttttttattgttgttatagatagacgttcgtcgtggttcgcgttaggttacggatatatttttggtaatttttgtttgttcggttggttttcgagttttcgtcggcgtcgttttttttatttttttgggacgttgtagtagcgcgttttttgttaagcggtttcgatggtcgggagtcgttatcgtcgtttagtagttggggtcggatatgttgtttttttttgtgtcgtcgtagtcgtcgaggtcgggaagggaggtttcggcggtgggatcggttttaggagtttcgcggagtcggatagggaggggggcgtacggggttgcggggatgggggggcggcgagaaggaagcggcgttttcgagcgcgattggaatttcgtttaggcgagtgcggggtcgggtacgttgggagtaggtattgtcgggaggcggagcgagcgacgcggaagcgaggtcggcggattcgcgtgtcggcgagtgggcggggcgttgttatggtcgcgggcggagaggcggagcgttgttaggcggcgggcggttgaggtcgggcgttgttacgatcgcgggcggcgggggcgg

SEQ ID NO: 34900 - DNA, 632 bp, Artificial Sequence
  chemically treated genomic DNA (Homo sapiens) CpG-island No: 34900
ccgcccccgccgcccgcgatcgtaacaacgcccgacctcaaccgcccgccgcctaacaacgctccgcctctccgcccgcgaccataacaacgccccgcccactcgccgacacgcgaatccgccgacctcgcttccgcgtcgctcgctccgcctcccgacaatacctactcccaacgtacccgaccccgcactcgcctaaacgaaattccaatcgcgctcgaaaacgccgcttccttctcgccgcccccccatccccgcaaccccgtacgcccccctccctatccgactccgcgaaactcctaaaaccgatcccaccgccgaaacctcccttcccgacctcgacgactacgacgacacaaaaaaaaacaacatatccgaccccaactactaaacgacgataacgactcccgaccatcgaaaccgcttaacaaaaaacgcgctactacaacgtcccaaaaaaataaaaaaaacgacgccgacgaaaactcgaaaaccaaccgaacaaacaaaaattaccaaaaatatatccgtaacctaacgcgaaccacgacgaacgtctatctataacaacaataaaaaaaaaaaaaaacgcctataaatcgaaatatcccctaaaatccctaacaccctcc

SEQ ID NO: 34901 - DNA, 1039 bp, Artificial Sequence
  chemically treated genomic DNA (Homo sapiens) CpG-island No: 34901
tcgtttcgtttcgtcgataaggggaatttcggtttgggagagggcgttttcggggattcgttgtttagtttaggtattgtttagttatcgggcgtcgaggattgcgaagcgtcggggtaggttggtacggtgtttattttttttaaaacgttagttttttaagtttagaagttcgttcggtttaggtcgggagcggtttacgtcggacggtcggatcgttttgtaggatttagttcggtcgttcgttttcgtcgtcggcggtgagggaggtgagcggcgtcgatttgcgggacgagtattatttcgatttagtcgggggtgaggcgggttaggatgtttcggtcgtaggaggaaaaggaggagttggattaaaagttcgaagagaagaaaaggggaaggtcgcgtacggagcgcggtaaaggtcggcggagttagacgtttcgaggtcggagtgaagcgtcgggatcgagtttcgttttttagggagttcggggcgtacggtatcgaggagagcgcgggagttaatttgggcgtattatgcgtagggttcgggacgttgggtcggtttatatcgtcgtttgggttacgtggttcggacgggtcggcggttgtttcggtcggggggcgggggtcgcgtcggggttgcgttggacgacggagagcggcgggttcgtagcggtttggagttttttaattcgcgcgtcgcgttggttttcgagcgtaggagtcgttttttgttttttcgcgtcggtttcgcgttcggtcgttcgttttttatatagcgcgttttagtagggttcgcgttaggtcgttagtttcggagtgggcgcgggatagtgcgcggcgtttcgtagttaggttttcgttttcgtcgtatttatttttttcgtcgtttgcgatttaacgggcgtttttcgtcgcggtagttgtcgtcgggttttcgcggttattatgaagaaggaggtgtgtttcgtggttttttttaaggtcgtgttcgtagagtttttggttatttttattttcgttttttttggtttgg

SEQ ID NO: 34902 - DNA, 1039 bp, Artificial Sequence
  chemically treated genomic DNA (Homo sapiens) CpG-island No: 34902
ccaaaccaaaaaaaacgaaaataaaaataaccaaaaactctacgaacacgaccttaaaaaaaaccacgaaacacacctccttcttcataataaccgcgaaaacccgacgacaactaccgcgacgaaaaacgcccgttaaatcgcaaacgacgaaaaaaataaatacgacgaaaacgaaaacctaactacgaaacgccgcgcactatcccgcgcccactccgaaactaacgacctaacgcgaaccctactaaaacgcgctatataaaaaacgaacgaccgaacgcgaaaccgacgcgaaaaaacaaaaaacgactcctacgctcgaaaaccaacgcgacgcgcgaattaaaaaactccaaaccgctacgaacccgccgctctccgtcgtccaacgcaaccccgacgcgacccccgccccccgaccgaaacaaccgccgacccgtccgaaccacgtaacccaaacgacgatataaaccgacccaacgtcccgaaccctacgcataatacgcccaaattaactcccgcgctctcctcgataccgtacgccccgaactccctaaaaaacgaaactcgatcccgacgcttcactccgacctcgaaacgtctaactccgccgacctttaccgcgctccgtacgcgaccttccccttttcttctcttcgaacttttaatccaactcctccttttcctcctacgaccgaaacatcctaacccgcctcacccccgactaaatcgaaataatactcgtcccgcaaatcgacgccgctcacctccctcaccgccgacgacgaaaacgaacgaccgaactaaatcctacaaaacgatccgaccgtccgacgtaaaccgctcccgacctaaaccgaacgaacttctaaacttaaaaaactaacgttttaaaaaaaataaacaccgtaccaacctaccccgacgcttcgcaatcctcgacgcccgataactaaacaatacctaaactaaacaacgaatccccgaaaacgccctctcccaaaccgaaattccccttatcgacgaaacgaaacga

SEQ ID NO: 34903 - DNA, 1039 bp, Artificial Sequence
  chemically treated genomic DNA (Homo sapiens) CpG-island No: 34903
ttaggttaaagaagacgaagatgagggtggttaagaattttgcgaatacggttttgaggaaggttacggagtatatttttttttttatggtggtcgcgggggttcggcggtagttgtcgcggcggggggcgttcgttgggtcgtaggcggcggaggaggtggatgcggcgggggcgggggtttggttgcggggcgtcgcgtattgtttcgcgtttatttcgaggttggcggtttggcgcgggttttgttggggcgcgttatatagggggcgggcggtcgggcgcggggtcggcgcgggggggtagggggcggtttttacgttcgggggttagcgcggcgcgcgggttgggaggttttaggtcgttgcgggttcgtcgtttttcgtcgtttagcgtaatttcggcgcgattttcgtttttcggtcggggtagtcgtcggttcgttcgggttacgtgatttaggcggcggtgtagatcggtttagcgtttcgggttttgcgtatgatgcgtttaggttggttttcgcgtttttttcggtgtcgtgcgtttcggattttttgggagacggggttcggtttcggcgttttatttcgatttcggggcgtttagtttcgtcggtttttatcgcgtttcgtgcgcggttttttttttttttttttttcgggtttttggtttagtttttttttttttttttgcgatcggagtattttgattcgttttattttcggttgggtcggagtgatgttcgtttcgtaggtcggcgtcgtttattttttttatcgtcggcggcgggggcgggcggtcgggttgggttttgtagggcggttcggtcgttcgacgtgggtcgttttcggtttgggtcgggcgagtttttgggtttggaaggttggcgttttgggaaaagtgggtatcgtgttagtttgtttcgacgtttcgtaattttcgacgttcggtagttgggtagtatttggattaggtaacggattttcggaggcgtttttttttaggtcggggttttttttgtcgacgggacgggacgg

SEQ ID NO: 34904 - DNA, 1039 bp, Artificial Sequence
  chemically treated genomic DNA (Homo sapiens) CpG-island No: 34904
ccgtcccgtcccgtcgacaaaaaaaaccccgacctaaaaaaaaacgcctccgaaaatccgttacctaatccaaatactacccaactaccgaacgtcgaaaattacgaaacgtcgaaacaaactaacacgatacccacttttcccaaaacgccaaccttccaaacccaaaaactcgcccgacccaaaccgaaaacgacccacgtcgaacgaccgaaccgccctacaaaacccaacccgaccgcccgcccccgccgccgacgataaaaaaaataaacgacgccgacctacgaaacgaacatcactccgacccaaccgaaaataaaacgaatcaaaatactccgatcgcaaaaaaaaaaaaaaaaactaaaccaaaaacccgaaaaaaaaaaaaaaaaaaaaccgcgcacgaaacgcgataaaaaccgacgaaactaaacgccccgaaatcgaaataaaacgccgaaaccgaaccccgtctcccaaaaaatccgaaacgcacgacaccgaaaaaaacgcgaaaaccaacctaaacgcatcatacgcaaaacccgaaacgctaaaccgatctacaccgccgcctaaatcacgtaacccgaacgaaccgacgactaccccgaccgaaaaacgaaaatcgcgccgaaattacgctaaacgacgaaaaacgacgaacccgcaacgacctaaaacctcccaacccgcgcgccgcgctaacccccgaacgtaaaaaccgccccctacccccccgcgccgaccccgcgcccgaccgcccgccccctatataacgcgccccaacaaaacccgcgccaaaccgccaacctcgaaataaacgcgaaacaatacgcgacgccccgcaaccaaacccccgcccccgccgcatccacctcctccgccgcctacgacccaacgaacgccccccgccgcgacaactaccgccgaacccccgcgaccaccataaaaaaaaaaatatactccgtaaccttcctcaaaaccgtattcgcaaaattcttaaccaccctcatcttcgtcttctttaacctaa

SEQ ID NO: 34905 - DNA, 511 bp, Artificial Sequence
  chemically treated genomic DNA (Homo sapiens) CpG-island No: 34905
taaacgtcggtggtcgcggacgcgtcggcggtcgggagtattttagcgggcgggtattatagaggcgcggtttttcggcgtttagatttgttatgtggcgcgcgtcggaagcggttttgaggtcggaagtgagtttagagcgtcgcggtttcgagatgaagtcggcggtggacgagatgtttttcgagggcgtcgggttttacgtggatttggacgaggtggtacgggttcggcgggagttttcgagcgtggggagcggggaagggggagcggaagggcggcgttttggtgcgcgggtttcggggaggggaggtcgggcgggtgggcgatgggcgcggtttttaggttttttgtttcgcggagagtaaatttcggttttttcgagtatttggtgaaaggcggcgatcgatcgcggcgggaagcgtgtgttttagttcgggggattaggaggcgtagtttgagggttgagtgtttgttgggtgtttttacggttttcgggaatatattcgtg

SEQ ID NO: 34906 - DNA, 511 bp, Artificial Sequence
  chemically treated genomic DNA (Homo sapiens) CpG-island No: 34906
cacgaatatattcccgaaaaccgtaaaaacacccaacaaacactcaaccctcaaactacgcctcctaatcccccgaactaaaacacacgcttcccgccgcgatcgatcgccgcctttcaccaaatactcgaaaaaaccgaaatttactctccgcgaaacaaaaaacctaaaaaccgcgcccatcgcccacccgcccgacctcccctccccgaaacccgcgcaccaaaacgccgcccttccgctcccccttccccgctccccacgctcgaaaactcccgccgaacccgtaccacctcgtccaaatccacgtaaaacccgacgccctcgaaaaacatctcgtccaccgccgacttcatctcgaaaccgcgacgctctaaactcacttccgacctcaaaaccgcttccgacgcgcgccacataacaaatctaaacgccgaaaaaccgcgcctctataatacccgcccgctaaaatactcccgaccgccgacgcgtccgcgaccaccgacgttta

SEQ ID NO: 34907 - DNA, 511 bp, Artificial Sequence
  chemically treated genomic DNA (Homo sapiens) CpG-island No: 34907
tacgggtgtgttttcgggggtcgtgggggtatttagtaggtatttaatttttaggttgcgttttttggtttttcgggttagggtatacgtttttcgtcgcggtcggtcgtcgttttttattaggtgttcggagaaatcgggatttgtttttcgcggggtagggagtttgggagtcgcgtttatcgtttattcgttcggtttttttttttcgggattcgcgtattaggacgtcgttttttcgttttttttttttcgttttttacgttcggagattttcgtcgggttcgtgttatttcgtttaggtttacgtagggttcggcgttttcggggaatatttcgtttatcgtcggttttatttcggggtcgcggcgttttaggtttattttcggttttagagtcgttttcggcgcgcgttatatggtagatttagacgtcggaggatcgcgtttttgtggtgttcgttcgttggggtgttttcggtcgtcggcgcgttcgcggttatcggcgtttg

SEQ ID NO: 34908 - DNA, 511 bp, Artificial Sequence
  chemically treated genomic DNA (Homo sapiens) CpG-island No: 34908
caaacgccgataaccgcgaacgcgccgacgaccgaaaacaccccaacgaacgaacaccacaaaaacgcgatcctccgacgtctaaatctaccatataacgcgcgccgaaaacgactctaaaaccgaaaataaacctaaaacgccgcgaccccgaaataaaaccgacgataaacgaaatattccccgaaaacgccgaaccctacgtaaacctaaacgaaataacacgaacccgacgaaaatctccgaacgtaaaaaacgaaaaaaaaaaaacgaaaaaacgacgtcctaatacgcgaatcccgaaaaaaaaaaaccgaacgaataaacgataaacgcgactcccaaactccctaccccgcgaaaaacaaatcccgatttctccgaacacctaataaaaaacgacgaccgaccgcgacgaaaaacgtataccctaacccgaaaaaccaaaaaacgcaacctaaaaattaaatacctactaaatacccccacgacccccgaaaacacacccgta

SEQ ID NO: 34909 - DNA, 608 bp, Artificial Sequence
  chemically treated genomic DNA (Homo sapiens) CpG-island No: 34909
tgttttttttttcggtttttgcgcgttttttcggtttttttttttcgtcgcgcgcgcgtttcgtttcgggcggttttggtttcgtttttcgcgtgcgattcgtcgtttttttttgcggcgtcgcgttttcggttttttttcgtttcgcgtttttatcgtgtttttcgtcgttttttcgttttcgggcgcggtcgttgttttttttttttcgttcgtcgtcgtttgttgttttgcgttttttcgtcgtgtttttcgggttttgttttcggtttttttttgtttcgttttgcggcggtttttcgttttttttcggttttttcgtgtcgttttgcgttttcgttttgcggtttcgttttgttgtttttttgtttcgcggttgtgtttttgcgcgcgcggttatttttcgttgttgtttttcgtttgtcggtcgtcgtcgcggtttcggcgtcgcgtcgtcgtcgcgtcgtttcgttcggatcggcgcgcgtgcgcgtggtggttcgttggtcgttttggggcgttcgtgcgagtgttgtttgtcgcgttgcgcggcgtttttcgcgattgttgttttcggtgtcggtcggttatgcgtcggtttttgtgtt

SEQ ID NO: 34910 - DNA, 608 bp, Artificial Sequence
  chemically treated genomic DNA (Homo sapiens) CpG-island No: 34910
aacacaaaaaccgacgcataaccgaccgacaccgaaaacaacaatcgcgaaaaacgccgcgcaacgcgacaaacaacactcgcacgaacgccccaaaacgaccaacgaaccaccacgcgcacgcgcgccgatccgaacgaaacgacgcgacgacgacgcgacgccgaaaccgcgacgacgaccgacaaacgaaaaacaacaacgaaaaataaccgcgcgcgcaaaaacacaaccgcgaaacaaaaaaacaacaaaacgaaaccgcaaaacgaaaacgcaaaacgacacgaaaaaaccgaaaaaaaacgaaaaaccgccgcaaaacgaaacaaaaaaaaaccgaaaacaaaacccgaaaaacacgacgaaaaaacgcaaaacaacaaacgacgacgaacgaaaaaaaaaaaacaacgaccgcgcccgaaaacgaaaaaacgacgaaaaacacgataaaaacgcgaaacgaaaaaaaaccgaaaacgcgacgccgcaaaaaaaaacgacgaatcgcacgcgaaaaacgaaaccaaaaccgcccgaaacgaaacgcgcgcgcgacgaaaaaaaaaaaccgaaaaaacgcgcaaaaaccgaaaaaaaaaaca

SEQ ID NO: 34911 - DNA, 608 bp, Artificial Sequence
  chemically treated genomic DNA (Homo sapiens) CpG-island No: 34911
agtatagaggtcggcgtatggtcggtcgatatcggaggtaatagtcgcgggggacgtcgcgtagcgcggtaagtaatattcgtacgaacgttttagagcgattagcgagttattacgcgtacgcgcgtcgattcgagcggggcgacgcggcggcggcgcggcgtcggagtcgcggcgacggtcggtaggcgaaggatagtagcgaggagtggtcgcgcgcgtagagatatagtcgcggaataggagagtagtagagcgggatcgtaaggcggaagcgtagagcggtacggaagggtcgagaggaggcgaggagtcgtcgtagggcggagtagaggagagtcgaaagtagggttcgaggagtacgacgaggagacgtagggtagtagacggcggcgggcgaggaggggaaggtagcggtcgcgttcggagacgagagagcggcggggggtacggtgggggcgcggggcgaaggggggtcggaagcgcggcgtcgtaggggggagcggcgggtcgtacgcggaggacggggttagggtcgttcgaggcgaagcgcgcgcgcggcggaagaggggggtcgagggggcgcgtagggatcggagaggggggta

SEQ ID NO: 34912 - DNA, 608 bp, Artificial Sequence
  chemically treated genomic DNA (Homo sapiens) CpG-island No: 34912
tacccccctctccgatccctacgcgccccctcgacccccctcttccgccgcgcgcgcgcttcgcctcgaacgaccctaaccccgtcctccgcgtacgacccgccgctcccccctacgacgccgcgcttccgaccccccttcgccccgcgcccccaccgtaccccccgccgctctctcgtctccgaacgcgaccgctaccttcccctcctcgcccgccgccgtctactaccctacgtctcctcgtcgtactcctcgaaccctactttcgactctcctctactccgccctacgacgactcctcgcctcctctcgacccttccgtaccgctctacgcttccgccttacgatcccgctctactactctcctattccgcgactatatctctacgcgcgcgaccactcctcgctactatccttcgcctaccgaccgtcgccgcgactccgacgccgcgccgccgccgcgtcgccccgctcgaatcgacgcgcgtacgcgtaataactcgctaatcgctctaaaacgttcgtacgaatattacttaccgcgctacgcgacgtcccccgcgactattacctccgatatcgaccgaccatacgccgacctctatact

SEQ ID NO: 34913 - DNA, 651 bp, Artificial Sequence
  chemically treated genomic DNA (Homo sapiens) CpG-island No: 34913
cggggtttcgcggcggttgggatttcgcggttgttggggtttcggttcgtttatttttttttgcgcgcgggtgagttttttttgtacgttgttggcgatttttttcgtcgttatttttttattgtttatttttgttatcgcggcgtaggtttcgttcggtggtaggggtcgttttcgcgcggggagattttgcgcgtcgcgtttttagtttttagtttcggtcgcgcgtttagatcggttgtcgttttacgtcgcgtattcgatagcggagttaattgacggaggcggagcgtgcgtcggacgggcgagcgagttagcgagttagttagcgagcgacgcggggatagagggagggagaggggaggggtcgggttttaggtcgcggtcggcgtttttcgttcgtttttttcggataataagttgttttttaaagggttatttcgggcgtcggtatcgttaggttcgcgaggagggaggggcgcgcgcggcgttggggttgcggcgagcgggatttttttgacgttttagttgtatcgtttcggggcggggattaattcgtcggtttggcgttttggtttttttcgtaagtagtaattttttgtaatttaggaaaggagattaggtggaggagaggagtgttttcgaaattaa

SEQ ID NO: 34914 - DNA, 651 bp, Artificial Sequence
  chemically treated genomic DNA (Homo sapiens) CpG-island No: 34914
ttaatttcgaaaacactcctctcctccacctaatctcctttcctaaattacaaaaaattactacttacgaaaaaaaccaaaacgccaaaccgacgaattaatccccgccccgaaacgatacaactaaaacgtcaaaaaaatcccgctcgccgcaaccccaacgccgcgcgcgcccctccctcctcgcgaacctaacgataccgacgcccgaaataaccctttaaaaaacaacttattatccgaaaaaaacgaacgaaaaacgccgaccgcgacctaaaacccgacccctcccctctccctccctctatccccgcgtcgctcgctaactaactcgctaactcgctcgcccgtccgacgcacgctccgcctccgtcaattaactccgctatcgaatacgcgacgtaaaacgacaaccgatctaaacgcgcgaccgaaactaaaaactaaaaacgcgacgcgcaaaatctccccgcgcgaaaacgacccctaccaccgaacgaaacctacgccgcgataacaaaaataaacaataaaaaaataacgacgaaaaaaatcgccaacaacgtacaaaaaaaactcacccgcgcgcaaaaaaaaataaacgaaccgaaaccccaacaaccgcgaaatcccaaccgccgcgaaaccccg

SEQ ID NO: 34915 - DNA, 651 bp, Artificial Sequence
  chemically treated genomic DNA (Homo sapiens) CpG-island No: 34915
ttgatttcgaaagtattttttttttttatttagtttttttttttgggttgtaggagattattgtttgcggggaagattaagacgttaggtcggcggattagttttcgtttcggggcggtgtagttggagcgttaggggagtttcgttcgtcgtagttttagcgtcgcgcgcgttttttttttttcgcggatttggcggtgtcggcgttcggagtggttttttaaaaggtagtttattgttcggagggggcgggcggggggcgtcgatcgcggtttgaggttcggttttttttttttttttttttttgttttcgcgtcgttcgttggttagttcgttggttcgttcgttcgttcggcgtacgtttcgttttcgttagttggtttcgttgtcgggtgcgcggcgtggagcggtagtcggtttggacgcgcggtcggggttgggggttgggagcgcggcgcgtaagattttttcgcgcgagagcggtttttgttatcgggcgaggtttgcgtcgcgatggtagagatgggtagtaaaggggtgacggcgggaaagatcgttagtaacgtgtagaagaagtttattcgcgcgtaggagaaggtgagcgagtcggagttttagtagtcgcggagttttagtcgtcgcggagtttcg

SEQ ID NO: 34916 - DNA, 651 bp, Artificial Sequence
  chemically treated genomic DNA (Homo sapiens) CpG-island No: 34916
cgaaactccgcgacgactaaaactccgcgactactaaaactccgactcgctcaccttctcctacgcgcgaataaacttcttctacacgttactaacgatctttcccgccgtcacccctttactacccatctctaccatcgcgacgcaaacctcgcccgataacaaaaaccgctctcgcgcgaaaaaatcttacgcgccgcgctcccaacccccaaccccgaccgcgcgtccaaaccgactaccgctccacgccgcgcacccgacaacgaaaccaactaacgaaaacgaaacgtacgccgaacgaacgaacgaaccaacgaactaaccaacgaacgacgcgaaaacaaaaaaaaaaaaaaaaaaaaaaccgaacctcaaaccgcgatcgacgccccccgcccgccccctccgaacaataaactaccttttaaaaaaccactccgaacgccgacaccgccaaatccgcgaaaaaaaaaaaacgcgcgcgacgctaaaactacgacgaacgaaactcccctaacgctccaactacaccgccccgaaacgaaaactaatccgccgacctaacgtcttaatcttccccgcaaacaataatctcctacaacccaaaaaaaaaaactaaataaaaaaaaaaaatactttcgaaatcaa

SEQ ID NO: 34917 - DNA, 761 bp, Artificial Sequence
  chemically treated genomic DNA (Homo sapiens) CpG-island No: 34917
gtaggaaatagtaatttaaagagtagttttcgaaataaagttgtttagataaataagtcgatgtagacgagcgttatggttttgttggcgcggattttgagagtcgggttgcggtcggcgttcgagcggggtgggtttttgggcggcggggtttcgcggcggttttaattcgcgggcgtacggttttcggcgggggcgcgggtcgaggataaaggcgtcgggcggtcggggtcgtcgtcgggagggggtcgagtcgagggttttcggagtttcgtcgttatgtcggggtcgaggattttcgttaatttggcggagtttttttgtagggacggttttagtcgtatttacgagatttaggtagcgcgcgtcgtttcgggagggagttagttcgggttgttgtttagaaggttgacggcgcgggcgggagggcgttagggaggggcgcggggttggggagttttagggaggggcggcgggtagggattttcgggtattgggcgtcgcggtgggttgggggagttggattggggttgttcggttaaggttcgtaggaaggggcgttggggagaggacgtcggaaaggcgattcggggtggaggaggtaggaatcgggagcggggcgggggcgttggggaggggttttcgggaagcggatttcggagaggggtagtaggtagagggagttgaggaacggggttagaaaggaacggttgggaagaggcgggggaaatgggtgtttcgggaggtggcggtagggaggg

SEQ ID NO: 34918 - DNA, 761 bp, Artificial Sequence
  chemically treated genomic DNA (Homo sapiens) CpG-island No: 34918
ccctccctaccgccacctcccgaaacacccatttcccccgcctcttcccaaccgttcctttctaaccccgttcctcaactccctctacctactacccctctccgaaatccgcttcccgaaaacccctccccaacgcccccgccccgctcccgattcctacctcctccaccccgaatcgcctttccgacgtcctctccccaacgccccttcctacgaaccttaaccgaacaaccccaatccaactcccccaacccaccgcgacgcccaatacccgaaaatccctacccgccgcccctccctaaaactccccaaccccgcgcccctccctaacgccctcccgcccgcgccgtcaaccttctaaacaacaacccgaactaactccctcccgaaacgacgcgcgctacctaaatctcgtaaatacgactaaaaccgtccctacaaaaaaactccgccaaattaacgaaaatcctcgaccccgacataacgacgaaactccgaaaaccctcgactcgaccccctcccgacgacgaccccgaccgcccgacgcctttatcctcgacccgcgcccccgccgaaaaccgtacgcccgcgaattaaaaccgccgcgaaaccccgccgcccaaaaacccaccccgctcgaacgccgaccgcaacccgactctcaaaatccgcgccaacaaaaccataacgctcgtctacatcgacttatttatctaaacaactttatttcgaaaactactctttaaattactatttcctac

SEQ ID NO: 34919 - DNA, 761 bp, Artificial Sequence
  chemically treated genomic DNA (Homo sapiens) CpG-island No: 34919
ttttttttgtcgttatttttcgagatatttatttttttcgtttttttttagtcgtttttttttggtttcgttttttagttttttttgtttgttgttttttttcggggttcgtttttcgaagatttttttttaacgttttcgtttcgttttcggtttttgttttttttatttcggatcgttttttcggcgttttttttttagcgtttttttttgcgaattttaatcggataattttagtttagtttttttaatttatcgcggcgtttagtgttcggggatttttgttcgtcgtttttttttgggattttttaatttcgcgtttttttttggcgttttttcgttcgcgtcgttagttttttgggtagtagttcgggttggttttttttcggggcggcgcgcgttatttggatttcgtggatgcggttgaagtcgtttttgtagaagaatttcgttaggttggcgagggttttcggtttcggtatggcggcgaggtttcggggattttcggttcggttttttttcggcggcgatttcggtcgttcggcgtttttgttttcggttcgcgttttcgtcgggagtcgtgcgttcgcgggttgaggtcgtcgcggggtttcgtcgtttaggagtttatttcgttcgggcgtcggtcgtagttcggtttttaggattcgcgttagtagggttatggcgttcgtttgtatcggtttgtttgtttgagtaattttgtttcgggggttgttttttgggttgttgttttttgt

SEQ ID NO: 34920 - DNA, 761 bp, Artificial Sequence
  chemically treated genomic DNA (Homo sapiens) CpG-island No: 34920
acaaaaaacaacaacccaaaaaacaacccccgaaacaaaattactcaaacaaacaaaccgatacaaacgaacgccataaccctactaacgcgaatcctaaaaaccgaactacgaccgacgcccgaacgaaataaactcctaaacgacgaaaccccgcgacgacctcaacccgcgaacgcacgactcccgacgaaaacgcgaaccgaaaacaaaaacgccgaacgaccgaaatcgccgccgaaaaaaaaccgaaccgaaaatccccgaaacctcgccgccataccgaaaccgaaaaccctcgccaacctaacgaaattcttctacaaaaacgacttcaaccgcatccacgaaatccaaataacgcgcgccgccccgaaaaaaaaccaacccgaactactacccaaaaaactaacgacgcgaacgaaaaaacgccaaaaaaaaacgcgaaattaaaaaatcccaaaaaaaaacgacgaacaaaaatccccgaacactaaacgccgcgataaattaaaaaaactaaactaaaattatccgattaaaattcgcaaaaaaaaacgctaaaaaaaaaacgccgaaaaaacgatccgaaataaaaaaaacaaaaaccgaaaacgaaacgaaaacgttaaaaaaaaatcttcgaaaaacgaaccccgaaaaaaaacaacaaacaaaaaaaactaaaaaacgaaaccaaaaaaaaacgactaaaaaaaaacgaaaaaaataaatatctcgaaaaataacgacaaaaaaaa

SEQ ID NO: 34921 - DNA, 555 bp, Artificial Sequence
  chemically treated genomic DNA (Homo sapiens) CpG-island No: 34921
ggatttgagtaacgaggcgtgagtcggcgagggttagagggtatggcgggggggtaggtgtgtgaattgtgacgggtaataagttgagaggtgagagacgtatggggatgagtaggaattggagttggtattcggtggggaggtagcggagcgggttgaggggtgttagggggtgaaggagtgcgcgggttcgtatggcggtagggtagttgttttttcgacggcggtagtcgtgcgcgtttagtttttatcgcgtacgtagcgatggtcggttaggttgcggggattcgttggtttggttcgcgggatggtagcggttttgcgagggacgtcggtcgcggtcgaggatttagaggaggagattgatagagtagtcggtttatcggggatgagatttggaaaggcgcgggatgggggtaggaagtgggcgtggcgagggagttaggtttcgggggcgcggcgatgttcgcgttcggagtttgtttttttcggattagcgttgaggagaggagtgttttttggttttgggattttaatttgaggttattttgttat

SEQ ID NO: 34922 - DNA, 555 bp, Artificial Sequence
  chemically treated genomic DNA (Homo sapiens) CpG-island No: 34922
ataacaaaataacctcaaattaaaatcccaaaaccaaaaaacactcctctcctcaacgctaatccgaaaaaaacaaactccgaacgcgaacatcgccgcgcccccgaaacctaactccctcgccacgcccacttcctacccccatcccgcgcctttccaaatctcatccccgataaaccgactactctatcaatctcctcctctaaatcctcgaccgcgaccgacgtccctcgcaaaaccgctaccatcccgcgaaccaaaccaacgaatccccgcaacctaaccgaccatcgctacgtacgcgataaaaactaaacgcgcacgactaccgccgtcgaaaaaacaactaccctaccgccatacgaacccgcgcactccttcaccccctaacacccctcaacccgctccgctacctccccaccgaataccaactccaattcctactcatccccatacgtctctcacctctcaacttattacccgtcacaattcacacacctacccccccgccataccctctaaccctcgccgactcacgcctcgttactcaaatcc

SEQ ID NO: 34923 - DNA, 555 bp, Artificial Sequence
  chemically treated genomic DNA (Homo sapiens) CpG-island No: 34923
gtagtaggatggttttagattgaggttttagggttaaaggatatttttttttttagcgttggttcgggaaaggtaagtttcgggcgcgagtatcgtcgcgttttcgaagtttggttttttcgttacgtttattttttgtttttatttcgcgtttttttaggttttattttcggtgaatcgattgttttgttagtttttttttttgggttttcggtcgcggtcggcgtttttcgtaaagtcgttgttatttcgcgggttaagttagcgggttttcgtagtttggtcggttatcgttgcgtgcgcggtaggagttgggcgcgtacggttatcgtcgtcggaggagtaattgttttgtcgttatgcgggttcgcgtatttttttattttttaatattttttagttcgtttcgttatttttttatcggatattagttttaatttttatttatttttatacgttttttattttttaatttgttattcgttataatttatatatttattttttcgttatattttttaattttcgtcgatttacgtttcgttatttagattt

SEQ ID NO: 34924 - DNA, 555 bp, Artificial Sequence
  chemically treated genomic DNA (Homo sapiens) CpG-island No: 34924
aaatctaaataacgaaacgtaaatcgacgaaaattaaaaaatataacgaaaaaataaatatataaattataacgaataacaaattaaaaaataaaaaacgtataaaaataaataaaaattaaaactaatatccgataaaaaaataacgaaacgaactaaaaaatattaaaaaataaaaaaatacgcgaacccgcataacgacaaaacaattactcctccgacgacgataaccgtacgcgcccaactcctaccgcgcacgcaacgataaccgaccaaactacgaaaacccgctaacttaacccgcgaaataacaacgactttacgaaaaacgccgaccgcgaccgaaaacccaaaaaaaaaaactaacaaaacaatcgattcaccgaaaataaaacctaaaaaaacgcgaaataaaaacaaaaaataaacgtaacgaaaaaaccaaacttcgaaaacgcgacgatactcgcgcccgaaacttacctttcccgaaccaacgctaaaaaaaaaaatatcctttaaccctaaaacctcaatctaaaaccatcctactac

SEQ ID NO: 34925 - DNA, 620 bp, Artificial Sequence
  chemically treated genomic DNA (Homo sapiens) CpG-island No: 34925
  unsure (315)
taagttgatggatcgttattacgagtagtgttatttcggtattatcgtatggcgttcgcgacggtttattagttcgtttttcgcgttatttttgtatttttttttgtatttttttttgtatttttcgataaaattgttgcgcgtcgcgattggtaatcggcgatatttattatttggtcggtttcgtgtagagcgtagtttcgtttttcgattataacgtttttcggttcgttatagtgttgtagggagcgagtattttatagtttcgttttgaatttgtatagatgcgcgttattaggcggcggatatcggcgntcgtcgttttcggggcggttatgcgttgttgtcggcgttcggtaggaagatggttttgttttcgtcgatatttttgcgtatatatttgatgttggtcggattcgggttcgtatagaatattttgttgtttaggttggtatgtatttgcgggcgtagaatgtagttgatgaataggtgcgtattattcggatggggcgcgtcggtcgggatggttatggtgtcgaatattagggcggtcgttttcggtattagtatttggattatattgtcgtttttcgtatcgatggcgcgttggcgcgcgatat

SEQ ID NO: 34926 - DNA, 620 bp, Artificial Sequence
  chemically treated genomic DNA (Homo sapiens) CpG-island No: 34926
  unsure (306)
atatcgcgcgccaacgcgccatcgatacgaaaaacgacaatataatccaaatactaataccgaaaacgaccgccctaatattcgacaccataaccatcccgaccgacgcgccccatccgaataatacgcacctattcatcaactacattctacgcccgcaaatacataccaacctaaacaacaaaatattctatacgaacccgaatccgaccaacatcaaatatatacgcaaaaatatcgacgaaaacaaaaccatcttcctaccgaacgccgacaacaacgcataaccgccccgaaaacgacgancgccgatatccgccgcctaataacgcgcatctatacaaattcaaaacgaaactataaaatactcgctccctacaacactataacgaaccgaaaaacgttataatcgaaaaacgaaactacgctctacacgaaaccgaccaaataataaatatcgccgattaccaatcgcgacgcgcaacaattttatcgaaaaatacaaaaaaaaatacaaaaaaaaatacaaaaataacgcgaaaaacgaactaataaaccgtcgcgaacgccatacgataataccgaaataacactactcgtaataacgatccatcaactta

SEQ ID NO: 34927 - DNA, 620 bp, Artificial Sequence
  chemically treated genomic DNA (Homo sapiens) CpG-island No: 34927
  unsure (306)
atatcgcgcgttagcgcgttatcgatgcgaagaacggtaatgtgatttaggtgttggtgtcgaagacggtcgttttgatgttcgatattatggttatttcggtcgacgcgttttattcgaataatgcgtatttgtttattaattatattttgcgttcgtaagtgtatgttagtttgagtaataaggtgttttatgcgaattcgaattcggttagtattaagtatgtgcgtaaggatatcggcgagaataaggttatttttttgtcggacgtcgatagtagcgtatggtcgtttcggaagcgacgancgtcgatattcgtcgtttgatgacgcgtatttatataagtttaagacgggattgtgaggtattcgttttttgtaatattgtagcgagtcgaagggcgttgtgatcgagaagcggaattgcgttttgtacggggtcgattaggtagtgggtatcgtcgattgttaatcgcgacgcgtagtagttttgtcgggagatataagaggagatataaggggaaatataaggatggcgcgagagacggattggtaggtcgtcgcgggcgttatgcgatagtgtcgaggtaatattattcgtggtagcggtttattagtttg

SEQ ID NO: 34928 - DNA, 620 bp, Artificial Sequence
  chemically treated genomic DNA (Homo sapiens) CpG-island No: 34928
  unsure (315)
caaactaataaaccgctaccacgaataatattacctcgacactatcgcataacgcccgcgacgacctaccaatccgtctctcgcgccatccttatatttccccttatatctcctcttatatctcccgacaaaactactacgcgtcgcgattaacaatcgacgatacccactacctaatcgaccccgtacaaaacgcaattccgcttctcgatcacaacgcccttcgactcgctacaatattacaaaaaacgaatacctcacaatcccgtcttaaacttatataaatacgcgtcatcaaacgacgaatatcgacgntcgtcgcttccgaaacgaccatacgctactatcgacgtccgacaaaaaaataaccttattctcgccgatatccttacgcacatacttaatactaaccgaattcgaattcgcataaaacaccttattactcaaactaacatacacttacgaacgcaaaatataattaataaacaaatacgcattattcgaataaaacgcgtcgaccgaaataaccataatatcgaacatcaaaacgaccgtcttcgacaccaacacctaaatcacattaccgttcttcgcatcgataacgcgctaacgcgcgatat

SEQ ID NO: 34929 - DNA, 723 bp, Artificial Sequence
  chemically treated genomic DNA (Homo sapiens) CpG-island No: 34929
cgggcgcggggcggttgttatattattttggtcgggtttcgaaagggaggagtggagtttgttcgttttcgcgagttttcgcgcgtttagatttttttttatttgttcggcgtgtttagggcgtttttagcgttggaagtcgggggcgtttgttcgagtcgggagtcgttgggttatgtttttgtttattaggtttttcgaatttttggtatggtagcgtttgttcgtgttttcgatttttttcgtaggtaattcgcgcgaatttggggttcgtagagagcgagcgttcgcggatatcggttgaatagtttggaggttgcgcgagggggcgtcgcggggagggataaaagttagtaataaagagtatagatttcgtttagtagttgattgattcgttttaaaatagtcgtttttatttgttgtttttcgcgtttcgtttttaggcgtagtattcgggtttgtagttcggtcgttcgaaagtgggcgagtaggttgagtgttagcgagtagagggttagcgttagtagttcgtacgattttggattcggtagtcgtgcgtcgcgtttcgttcgcgtcgttattagagttatcgtttcgggcgcgtttaattttttagggtcgcgggtatcggtggttgtcgttttgtgggtgcgtttcgttattattttttcgcgttttgagaattaataaataaataaatagaataaataaaggcgatagtcg

SEQ ID NO: 34930 - DNA, 723 bp, Artificial Sequence
  chemically treated genomic DNA (Homo sapiens) CpG-island No: 34930
cgactatcgcctttatttattctatttatttatttattaattctcaaaacgcgaaaaaataataacgaaacgcacccacaaaacgacaaccaccgatacccgcgaccctaaaaaattaaacgcgcccgaaacgataactctaataacgacgcgaacgaaacgcgacgcacgactaccgaatccaaaatcgtacgaactactaacgctaaccctctactcgctaacactcaacctactcgcccactttcgaacgaccgaactacaaacccgaatactacgcctaaaaacgaaacgcgaaaaacaacaaataaaaacgactattttaaaacgaatcaatcaactactaaacgaaatctatactctttattactaacttttatccctccccgcgacgccccctcgcgcaacctccaaactattcaaccgatatccgcgaacgctcgctctctacgaaccccaaattcgcgcgaattacctacgaaaaaaatcgaaaacacgaacaaacgctaccataccaaaaattcgaaaaacctaataaacaaaaacataacccaacgactcccgactcgaacaaacgcccccgacttccaacgctaaaaacgccctaaacacgccgaacaaataaaaaaaaatctaaacgcgcgaaaactcgcgaaaacgaacaaactccactcctccctttcgaaacccgaccaaaataatataacaaccgccccgcgcccg

SEQ ID NO: 34931 - DNA, 723 bp, Artificial Sequence
  chemically treated genomic DNA (Homo sapiens) CpG-island No: 34931
cggttgtcgtttttatttattttatttatttatttattggtttttaagacgcgagaggatggtagcggagcgtatttataaagcggtagttatcggtgttcgcggttttggggagttgggcgcgttcgggacggtggttttggtggcggcgcgggcggagcgcggcgtacggttgtcgagtttagggtcgtgcgggttgttgacgttggttttttgttcgttggtatttagtttgttcgtttattttcggacggtcgagttgtaggttcgggtgttgcgtttggaagcggagcgcggggagtagtaaatggagacggttattttgggacgagttaattaattgttggacgaggtttgtgttttttgttgttggtttttattttttttcgcggcgttttttcgcgtagtttttagattgtttagtcggtgttcgcgggcgttcgttttttgcgagttttaggttcgcgcgagttgtttgcgggaggggtcggggatacggatagacgttgttatattagggattcggaggatttggtgggtaagagtatgatttagcgattttcggttcgggtaagcgttttcggtttttagcgttgggagcgttttgggtacgtcgggtaggtggaggaaggtttgggcgcgcggaggttcgcggaggcgggtaagttttatttttttttttcgggattcggttagggtggtgtgatagtcgtttcgcgttcg

SEQ ID NO: 34932 - DNA, 723 bp, Artificial Sequence
  chemically treated genomic DNA (Homo sapiens) CpG-island No: 34932
cgaacgcgaaacgactatcacaccaccctaaccgaatcccgaaaaaaaaaaataaaacttacccgcctccgcgaacctccgcgcgcccaaaccttcctccacctacccgacgtacccaaaacgctcccaacgctaaaaaccgaaaacgcttacccgaaccgaaaatcgctaaatcatactcttacccaccaaatcctccgaatccctaatataacaacgtctatccgtatccccgacccctcccgcaaacaactcgcgcgaacctaaaactcgcaaaaaacgaacgcccgcgaacaccgactaaacaatctaaaaactacgcgaaaaaacgccgcgaaaaaaaataaaaaccaacaacaaaaaacacaaacctcgtccaacaattaattaactcgtcccaaaataaccgtctccatttactactccccgcgctccgcttccaaacgcaacacccgaacctacaactcgaccgtccgaaaataaacgaacaaactaaataccaacgaacaaaaaaccaacgtcaacaacccgcacgaccctaaactcgacaaccgtacgccgcgctccgcccgcgccgccaccaaaaccaccgtcccgaacgcgcccaactccccaaaaccgcgaacaccgataactaccgctttataaatacgctccgctaccatcctctcgcgtcttaaaaaccaataaataaataaataaaataaataaaaacgacaaccg

SEQ ID NO: 34933 - DNA, 633 bp, Artificial Sequence
  chemically treated genomic DNA (Homo sapiens) CpG-island No: 34933
cgcgcggcgcgtgtattttagtaatagatttttaggtttttagcgcgggttaggaaggggtcggcgtttcgcgtttcgtcgggtgtgtgattttgtcgcgagggcgtagtcgagcggtcgcgtttgatgttgttgttgttatggcgattagcgtttcggcgattggttcggcgcggtcgtattacgttgttttttgggcgcggggggtgggggaggtttcggcgcgttcgtttttttttcggatgttgcgagagtaaattcggggtagttttttttcgatttttttttttttattttcgcgtttcgtatttcggatggacgggagggaaaaattttaaggtgggtttaggtagtagcgaggtggacgttttcgtttagtttggcgattacggttattcgacgttttcgttcgtttttgggtacggtgtgagcgcgcgttacgtgttagggttttttatagttcgttgttggcgtcgtttttcgttttcgttttagtttttttggaggagttcgttattttcgggaatgtgattcgtttcgcgatttaattttatttttttttattttttgtttgagtcgtttgttttttttggaaatacgttgagttttttcgttggagagggagttagaata

SEQ ID NO: 34934 - DNA, 633 bp, Artificial Sequence
  chemically treated genomic DNA (Homo sapiens) CpG-island No: 34934
tattctaactccctctccaacgaaaaaactcaacgtatttccaaaaaaaacaaacgactcaaacaaaaaataaaaaaaaataaaattaaatcgcgaaacgaatcacattcccgaaaataacgaactcctccaaaaaaactaaaacgaaaacgaaaaacgacgccaacaacgaactataaaaaaccctaacacgtaacgcgcgctcacaccgtacccaaaaacgaacgaaaacgtcgaataaccgtaatcgccaaactaaacgaaaacgtccacctcgctactacctaaacccaccttaaaatttttccctcccgtccatccgaaatacgaaacgcgaaaataaaaaaaaaaaaatcgaaaaaaaactaccccgaatttactctcgcaacatccgaaaaaaaaacgaacgcgccgaaacctcccccaccccccgcgcccaaaaaacaacgtaatacgaccgcgccgaaccaatcgccgaaacgctaatcgccataacaacaacaacatcaaacgcgaccgctcgactacgccctcgcgacaaaatcacacacccgacgaaacgcgaaacgccgaccccttcctaacccgcgctaaaaacctaaaaatctattactaaaatacacgcgccgcgcg

SEQ ID NO: 34935 - DNA, 633 bp, Artificial Sequence
  chemically treated genomic DNA (Homo sapiens) CpG-island No: 34935
tgttttggttttttttttagcggggaggtttaacgtgtttttaagaggagtaggcggtttaggtaagaagtggaggggaataaaattaaatcgcggggcgagttatattttcgggggtggcgggtttttttagggaggttggggcgggagcggggggcggcgttagtagcgggttgtggagggttttggtacgtagcgcgcgtttatatcgtgtttaggagcgagcgaggacgtcgagtaatcgtggtcgttaggttgggcgggggcgtttatttcgttgttatttgggtttattttggggtttttttttttcgtttattcggggtgcggggcgcggggatgaggaggggagggtcgagagaaggttgtttcgggtttgttttcgtagtattcggagaaggggcgggcgcgtcggagttttttttatttttcgcgtttaaggagtaacgtagtgcggtcgcgtcggattaatcgtcgaggcgttggtcgttatggtaatagtagtattaggcgcggtcgttcggttgcgttttcgcggtaaagttatatattcggcggggcgcggggcgtcggtttttttttggttcgcgttggaaatttggaagtttgttgttaaaatgtacgcgtcgcgcg

SEQ ID NO: 34936 - DNA, 633 bp, Artificial Sequence
  chemically treated genomic DNA (Homo sapiens) CpG-island No: 34936
cgcgcgacgcgtacattttaacaacaaacttccaaatttccaacgcgaaccaaaaaaaaaccgacgccccgcgccccgccgaatatataactttaccgcgaaaacgcaaccgaacgaccgcgcctaatactactattaccataacgaccaacgcctcgacgattaatccgacgcgaccgcactacgttactccttaaacgcgaaaaataaaaaaaactccgacgcgcccgccccttctccgaatactacgaaaacaaacccgaaacaaccttctctcgaccctcccctcctcatccccgcgccccgcaccccgaataaacgaaaaaaaaaaaccccaaaataaacccaaataacaacgaaataaacgcccccgcccaacctaacgaccacgattactcgacgtcctcgctcgctcctaaacacgatataaacgcgcgctacgtaccaaaaccctccacaacccgctactaacgccgccccccgctcccgccccaacctccctaaaaaaacccgccacccccgaaaatataactcgccccgcgatttaattttattcccctccacttcttacctaaaccgcctactcctcttaaaaacacgttaaacctccccgctaaaaaaaaaaccaaaaca

SEQ ID NO: 34937 - DNA, 1070 bp, Artificial Sequence
  chemically treated genomic DNA (Homo sapiens) CpG-island No: 34937
ggagacgcgtgcgatttaggtagattttgcgcggatttcgcgttaaggaggggtcgttgtttaggaatcgtttttttttttcgcgcgtgtttgttttcgtgcgcgcgttcgtttaatgttttcgattattgtttgttagtcgatttttattttaatcggtttgtttattttttcgggagcggagagatttaacgggatacgtcgttcgttttcgttttttcgggagcgcgagcgcgttttcggttgcgtttgtatagtaatgaggggcggggaggggcgacggggacgcggtggtttcgcgttcgcgcgtgtcgggacgtatcgcggggggcggcgcgattgtgaggtggcgttgacgtacgtttcggggtttttaagcggttagggcggttacggcgattgcgacggcggcggcggcggcgatcgtcgcgaggggtggtggggtcgaagtcggtgttttttggtttagttacggtgttttttttttattgattttttttttttttattacggtcgcgtaattttagcgtcggcggttttttaggtggggtaggggacgaggagcgttttttttcgttgtcggcggtttgataaatgagggatttcgggtttggggtgttgtagatcgtttcgtttcgaagtagtagttttgggtttttgttttgcggcgaggcgtatggtttttacgtcgtggggttcgttaattcgttgtttttcgttacgtttttcggtttattgtcgttattatcgttgtttgttatcggttttttagaggtcgtttttttttttttcgtttttttcggcggcggcgcgggtagttcggtcgtcgtcgtttttttttttttttcgtttttggcgtattagtagattatgtaggatgagttgtttttggggttgatatagtagtcggcgcggtcgttttcgggggcggcggttacggagaaatttttcgattattatttcggcggcggtacgatcgcgggtgtgatttattttttttttttttaggattttaaatcgagtttgtattatttttttttttttttcgtttttttttgttgttgttgtcg

SEQ ID NO: 34938 - DNA, 1070 bp, Artificial Sequence
  chemically treated genomic DNA (Homo sapiens) CpG-island No: 34938
cgacaacaacaacaaaaaaaaacgaaaaaaaaaaaaaaataatacaaactcgatttaaaatcctaaaaaaaaaaaaaataaatcacacccgcgatcgtaccgccgccgaaataataatcgaaaaatttctccgtaaccgccgcccccgaaaacgaccgcgccgactactatatcaaccccaaaaacaactcatcctacataatctactaatacgccaaaaacgaaaaaaaaaaaaaaacgacgacgaccgaactacccgcgccgccgccgaaaaaaacgaaaaaaaaaaaaacgacctctaaaaaaccgataacaaacaacgataataacgacaataaaccgaaaaacgtaacgaaaaacaacgaattaacgaaccccacgacgtaaaaaccatacgcctcgccgcaaaacaaaaacccaaaactactacttcgaaacgaaacgatctacaacaccccaaacccgaaatccctcatttatcaaaccgccgacaacgaaaaaaaacgctcctcgtcccctaccccacctaaaaaaccgccgacgctaaaattacgcgaccgtaataaaaaaaaaaaaaatcaataaaaaaaaaacaccgtaactaaaccaaaaaacaccgacttcgaccccaccacccctcgcgacgatcgccgccgccgccgccgtcgcaatcgccgtaaccgccctaaccgcttaaaaaccccgaaacgtacgtcaacgccacctcacaatcgcgccgccccccgcgatacgtcccgacacgcgcgaacgcgaaaccaccgcgtccccgtcgcccctccccgcccctcattactatacaaacgcaaccgaaaacgcgctcgcgctcccgaaaaaacgaaaacgaacgacgtatcccgttaaatctctccgctcccgaaaaaataaacaaaccgattaaaataaaaatcgactaacaaacaataatcgaaaacattaaacgaacgcgcgcacgaaaacaaacacgcgcgaaaaaaaaaaacgattcctaaacaacgacccctccttaacgcgaaatccgcgcaaaatctacctaaatcgcacgcgtctcc

SEQ ID NO: 34939 - DNA, 1070 bp, Artificial Sequence
  chemically treated genomic DNA (Homo sapiens) CpG-island No: 34939
cggtagtagtagtaggaggaggcggaggaggaggaggggtggtgtagattcggtttgaagttttgggaggggaggaggtgggttatattcgcgatcgtgtcgtcgtcggggtggtggtcggggagttttttcgtggtcgtcgttttcgaaagcggtcgcgtcggttgttgtgttagttttagaagtagtttattttgtatggtttgttgatgcgttaggaacggggaggaagaggaagcggcggcggtcgggttgttcgcgtcgtcgtcgagggggacggagaagggggaggcggtttttaagaagtcggtgataggtaacggtggtggcgatagtgggtcgaagggcgtggcggagggtagcgggttgacggattttacggcgtaaggattatacgtttcgtcgtagaataggggtttaggattgttatttcggagcggggcggtttgtagtattttaaattcgaaattttttatttattaggtcgtcggtagcgggaggagacgtttttcgttttttgttttatttaggaagtcgtcggcgttggggttgcgcggtcgtggtggaaggagggggagttagtgagagagggatatcgtgattgagttagggggtatcgatttcggttttattatttttcgcggcgatcgtcgtcgtcgtcgtcgtcgtagtcgtcgtagtcgttttggtcgtttaagaatttcggaacgtgcgttagcgttattttataatcgcgtcgtttttcgcggtgcgtttcggtacgcgcgggcgcgaggttatcgcgttttcgtcgttttttttcgttttttattattatgtagacgtagtcgagggcgcgttcgcgttttcgggagggcgggagcgagcggcgtgtttcgttgggttttttcgttttcggggaaatggataggtcggttggggtgggggtcggttggtaaatagtggtcgggagtattgggcgggcgcgcgtacgagggtaagtacgcgcgggagggagggacggtttttgggtaacggtttttttttggcgcgggattcgcgtagagtttgtttgggtcgtacgcgttttt

SEQ ID NO: 34940 - DNA, 1070 bp, Artificial Sequence
  chemically treated genomic DNA (Homo sapiens) CpG-island No: 34940
aaaaacgcgtacgacccaaacaaactctacgcgaatcccgcgccaaaaaaaaaccgttacccaaaaaccgtccctccctcccgcgcgtacttaccctcgtacgcgcgcccgcccaatactcccgaccactatttaccaaccgacccccaccccaaccgacctatccatttccccgaaaacgaaaaaacccaacgaaacacgccgctcgctcccgccctcccgaaaacgcgaacgcgccctcgactacgtctacataataataaaaaacgaaaaaaaacgacgaaaacgcgataacctcgcgcccgcgcgtaccgaaacgcaccgcgaaaaacgacgcgattataaaataacgctaacgcacgttccgaaattcttaaacgaccaaaacgactacgacgactacgacgacgacgacgacgacgatcgccgcgaaaaataataaaaccgaaatcgataccccctaactcaatcacgatatccctctctcactaactccccctccttccaccacgaccgcgcaaccccaacgccgacgacttcctaaataaaacaaaaaacgaaaaacgtctcctcccgctaccgacgacctaataaataaaaaatttcgaatttaaaatactacaaaccgccccgctccgaaataacaatcctaaacccctattctacgacgaaacgtataatccttacgccgtaaaatccgtcaacccgctaccctccgccacgcccttcgacccactatcgccaccaccgttacctatcaccgacttcttaaaaaccgcctcccccttctccgtccccctcgacgacgacgcgaacaacccgaccgccgccgcttcctcttcctccccgttcctaacgcatcaacaaaccatacaaaataaactacttctaaaactaacacaacaaccgacgcgaccgctttcgaaaacgacgaccacgaaaaaactccccgaccaccaccccgacgacgacacgatcgcgaatataacccacctcctcccctcccaaaacttcaaaccgaatctacaccacccctcctcctcctccgcctcctcctactactactaccg

SEQ ID NO: 34941 - DNA, 516 bp, Artificial Sequence
  chemically treated genomic DNA (Homo sapiens) CpG-island No: 34941
tttcgagcgttttttttcgcgagagttgcgcggtcggaattgcgtcggcgtgacgttattgatttcgtcgggtttattttcggcgttcgtatcgtttcgttttttagttaaggtttcgggttgaggtatttgtttggttgtagttttttttcgatttgttcggcgggatttaggggattaagtcgagtcgagtcgcggggttcgttttagttcggttatgagcgcggtcgtatgatgcgtttttgtttcggtcgttgtagtcgtcgtcgtcgtcgtcgtaggtcgggaggagtcgtagcgtcgggcgatttcgttcgggtttcgggtgagtgcggcgggttgggtcgggcgggttgtttattttcgggtttttcggttatttttggttttcggcgtgttttgttttttcgtcggtttcgtcgttttgtttttatttcgtcgtatatttgcgattttttggagtttttaggggtattttcgtgttcgtatttgattttttttttaggtgtttttttg

SEQ ID NO: 34942 - DNA, 516 bp, Artificial Sequence
  chemically treated genomic DNA (Homo sapiens) CpG-island No: 34942
caaaaaaacacctaaaaaaaaaatcaaatacgaacacgaaaatacccctaaaaactccaaaaaatcgcaaatatacgacgaaataaaaacaaaacgacgaaaccgacgaaaaaacaaaacacgccgaaaaccaaaaataaccgaaaaacccgaaaataaacaacccgcccgacccaacccgccgcactcacccgaaacccgaacgaaatcgcccgacgctacgactcctcccgacctacgacgacgacgacgacgactacaacgaccgaaacaaaaacgcatcatacgaccgcgctcataaccgaactaaaacgaaccccgcgactcgactcgacttaatcccctaaatcccgccgaacaaatcgaaaaaaaactacaaccaaacaaatacctcaacccgaaaccttaactaaaaaacgaaacgatacgaacgccgaaaataaacccgacgaaatcaataacgtcacgccgacgcaattccgaccgcgcaactctcgcgaaaaaaaacgctcgaaa

SEQ ID NO: 34943 - DNA, 516 bp, Artificial Sequence
  chemically treated genomic DNA (Homo sapiens) CpG-island No: 34943
taagggggtatttggaagggaagttaggtgcgggtacggaggtgtttttaggaattttagaaggtcgtaggtgtgcggcggggtggagatagagcggcggaatcgacggaaggatagggtacgtcgggggttagaagtggtcgggagattcgggagtgagtagttcgttcggtttagttcgtcgtatttattcgaggttcgggcggggtcgttcggcgttgcggtttttttcggtttgcggcggcggcggcggcgattgtagcggtcgaggtagggacgtattatgcggtcgcgtttatggtcgggttggagcgggtttcgcggttcggttcggtttggttttttgggtttcgtcgggtaggtcggaaggaggttgtagttaagtaaatgttttagttcggagttttggttggagagcggggcggtgcgagcgtcggaagtgaattcgacgaggttagtgacgttacgtcggcgtagtttcggtcgcgtagttttcgcggagaggggcgttcgagg

SEQ ID NO: 34944 - DNA, 516 bp, Artificial Sequence
  chemically treated genomic DNA (Homo sapiens) CpG-island No: 34944
cctcgaacgcccctctccgcgaaaactacgcgaccgaaactacgccgacgtaacgtcactaacctcgtcgaattcacttccgacgctcgcaccgccccgctctccaaccaaaactccgaactaaaacatttacttaactacaacctccttccgacctacccgacgaaacccaaaaaaccaaaccgaaccgaaccgcgaaacccgctccaacccgaccataaacgcgaccgcataatacgtccctacctcgaccgctacaatcgccgccgccgccgccgcaaaccgaaaaaaaccgcaacgccgaacgaccccgcccgaacctcgaataaatacgacgaactaaaccgaacgaactactcactcccgaatctcccgaccacttctaacccccgacgtaccctatccttccgtcgattccgccgctctatctccaccccgccgcacacctacgaccttctaaaattcctaaaaacacctccgtacccgcacctaacttcccttccaaataccccctta

SEQ ID NO: 34945 - DNA, 974 bp, Artificial Sequence
  chemically treated genomic DNA (Homo sapiens) CpG-island No: 34945
gtcggcggcggtaggttttatttcgcggagcgagttcgtaagttgtaggcgcgtcgttaagatgtagcggcggtttcggttgtcgtcgggcgggttaggagtagcgcgattcgagtcgggtagggggcgttcgttacggtattcgcgcgtttttagcgtttagattcgtttgcgggttcggattttttttgttattgttttattcgtcgtttttgttattttattttttgtgtcgtcgtagttcggtgttttcggttttgcgggatttcggtcgggtcggattttggtaaagcgttaggtttcgcgtgggttttcggcgagcggttgatggcgagggggcgcggcgcggttttgtagttcgagttttcgacgttggaggttcggttcgttttagtcgtattgtttcgggtcgcgcgtatcggtttttgagttgcgtcgtcgtagtattcgtcgtattcgcggggttatgcggagagtcgtcgggatggaggattttttcgcggaggaagaggagttttggtacgattagtaggatttggagtagggtgagcgcgggggcgatcgggataggaaggcggggagcgttcggtgatttttgttcgtttttttattgttgggcgttattatttcgggaggggttgggttggatcgggcgcgttcgattcggaggagggacgcgtttggagaatcgggacgtggagagagggggcgttgtcggagaagacgcggatcggacgggcggagatttgtaaaagtggggggcggggggcggtttttttatttttttagacgatcgggtattcgttatttagttcgtttatttcgttttggaggtagtaattgttcggtcgtttttggtattgttacggggtttgagcgttagttaggagttttttgaggtcgggaggcggttttttcgttatgttttgttgggagggtggtttgtgtgtagagggaagttattttacgttaaa

SEQ ID NO: 34946 - DNA, 974 bp, Artificial Sequence
  chemically treated genomic DNA (Homo sapiens) CpG-island No: 34946
tttaacgtaaaataacttccctctacacacaaaccaccctcccaacaaaacataacgaaaaaaccgcctcccgacctcaaaaaactcctaactaacgctcaaaccccgtaacaataccaaaaacgaccgaacaattactacctccaaaacgaaataaacgaactaaataacgaatacccgatcgtctaaaaaaataaaaaaaccgccccccgccccccacttttacaaatctccgcccgtccgatccgcgtcttctccgacaacgccccctctctccacgtcccgattctccaaacgcgtccctcctccgaatcgaacgcgcccgatccaacccaacccctcccgaaataataacgcccaacaataaaaaaacgaacaaaaatcaccgaacgctccccgccttcctatcccgatcgcccccgcgctcaccctactccaaatcctactaatcgtaccaaaactcctcttcctccgcgaaaaaatcctccatcccgacgactctccgcataaccccgcgaatacgacgaatactacgacgacgcaactcaaaaaccgatacgcgcgacccgaaacaatacgactaaaacgaaccgaacctccaacgtcgaaaactcgaactacaaaaccgcgccgcgccccctcgccatcaaccgctcgccgaaaacccacgcgaaacctaacgctttaccaaaatccgacccgaccgaaatcccgcaaaaccgaaaacaccgaactacgacgacacaaaaaataaaataacaaaaacgacgaataaaacaataacaaaaaaaatccgaacccgcaaacgaatctaaacgctaaaaacgcgcgaataccgtaacgaacgccccctacccgactcgaatcgcgctactcctaacccgcccgacgacaaccgaaaccgccgctacatcttaacgacgcgcctacaacttacgaactcgctccgcgaaataaaacctaccgccgccgac

SEQ ID NO: 34947 - DNA, 974 bp, Artificial Sequence
  chemically treated genomic DNA (Homo sapiens) CpG-island No: 34947
tttggcgtgagataatttttttttatatataagttatttttttagtaaaatatgacgaaggagtcgtttttcggttttagaagatttttagttagcgtttaggtttcgtaataatattaggggcggtcgagtagttgttgtttttaggacggggtgggcgagttggatgacggatgttcggtcgtttgggaaaataggaagatcgtttttcgttttttatttttgtaggttttcgttcgttcggttcgcgtttttttcggtagcgttttttttttttacgtttcggttttttagacgcgtttttttttcgagtcgggcgcgttcggtttagtttagtttttttcggggtgatagcgtttaataatggagaagcggataggggttatcgggcgtttttcgtttttttgtttcggtcgttttcgcgtttattttgttttaggttttgttggtcgtattaggattttttttttttcgcggagaagttttttatttcggcggtttttcgtatggtttcgcgggtgcggcgggtgttgcggcggcgtagtttaagggtcggtgcgcgcggttcgggataatgcggttgaggcgggtcgggtttttagcgtcgggaattcgggttatagagtcgcgtcgcgttttttcgttattaatcgttcgtcgggagtttacgcggggtttggcgttttgttagggttcggttcggtcggggtttcgtagagtcgggggtatcgggttgcggcgatataaagggtggagtggtagggacggcgggtgggatagtggtaaggaggattcgggttcgtaggcgggtttgggcgttaggagcgcgcgggtgtcgtggcgggcgttttttgttcggttcgggtcgcgttgtttttggttcgttcggcgataatcggagtcgtcgttgtattttggcggcgcgtttgtagtttgcgagttcgtttcgcggggtggggtttgtcgtcgtcgat

SEQ ID NO: 34948 - DNA, 974 bp, Artificial Sequence
  chemically treated genomic DNA (Homo sapiens) CpG-island No: 34948
atcgacgacgacaaaccccaccccgcgaaacgaactcgcaaactacaaacgcgccgccaaaatacaacgacgactccgattatcgccgaacgaaccaaaaacaacgcgacccgaaccgaacaaaaaacgcccgccacgacacccgcgcgctcctaacgcccaaacccgcctacgaacccgaatcctccttaccactatcccacccgccgtccctaccactccaccctttatatcgccgcaacccgatacccccgactctacgaaaccccgaccgaaccgaaccctaacaaaacgccaaaccccgcgtaaactcccgacgaacgattaataacgaaaaaacgcgacgcgactctataacccgaattcccgacgctaaaaacccgacccgcctcaaccgcattatcccgaaccgcgcgcaccgacccttaaactacgccgccgcaacacccgccgcacccgcgaaaccatacgaaaaaccgccgaaataaaaaacttctccgcgaaaaaaaaaaaatcctaatacgaccaacaaaacctaaaacaaaataaacgcgaaaacgaccgaaacaaaaaaacgaaaaacgcccgataacccctatccgcttctccattattaaacgctatcaccccgaaaaaaactaaactaaaccgaacgcgcccgactcgaaaaaaaaacgcgtctaaaaaaccgaaacgtaaaaaaaaaaaacgctaccgaaaaaaacgcgaaccgaacgaacgaaaacctacaaaaataaaaaacgaaaaacgatcttcctattttcccaaacgaccgaacatccgtcatccaactcgcccaccccgtcctaaaaacaacaactactcgaccgcccctaatattattacgaaacctaaacgctaactaaaaatcttctaaaaccgaaaaacgactccttcgtcatattttactaaaaaaataacttatatataaaaaaaaattatctcacgccaaa

SEQ ID NO: 34949 - DNA, 535 bp, Artificial Sequence
  chemically treated genomic DNA (Homo sapiens) CpG-island No: 34949
ttcgggggcgggtgtttttaggcggcgcgtgatttcgtttcggttcgtttcgtttcgtttgtatcgtagatatacgttttagttttttagtttttcgtgcgcgtcgggttcgagttatagagtttatggaatttacggagtcgatggaatttacggagtttatggaatttacggagtttatggaatttacggagtttatggaatttacggagtttatggaatcggcgcggacgtatttgtgggggcgaggcgttgttgcgggagttggaggtgttggtgtaggacgtggtgaggacgagtttttggtgggagcgttacggttggattgcgttattttcgcgtttagttttttcgttttgtcggtaggtgaggaacgcggggattcggcgtttcggtcggttgcgggtgggggcggggtgcggcggaggtggcggcgcggggtttgtaatagtagtcgtgggagtgtagtttgcgtagtggattggcggcggtagggaggcggaggtggtcggggtttcgtatttaaggatggagg

SEQ ID NO: 34950 - DNA, 535 bp, Artificial Sequence
  chemically treated genomic DNA (Homo sapiens) CpG-island No: 34950
cctccatccttaaatacgaaaccccgaccacctccgcctccctaccgccgccaatccactacgcaaactacactcccacgactactattacaaaccccgcgccgccacctccgccgcaccccgcccccacccgcaaccgaccgaaacgccgaatccccgcgttcctcacctaccgacaaaacgaaaaaactaaacgcgaaaataacgcaatccaaccgtaacgctcccaccaaaaactcgtcctcaccacgtcctacaccaacacctccaactcccgcaacaacgcctcgcccccacaaatacgtccgcgccgattccataaactccgtaaattccataaactccgtaaattccataaactccgtaaattccataaactccgtaaattccatcgactccgtaaattccataaactctataactcgaacccgacgcgcacgaaaaactaaaaaactaaaacgtatatctacgatacaaacgaaacgaaacgaaccgaaacgaaatcacgcgccgcctaaaaacacccgcccccgaa

SEQ ID NO: 34951 - DNA, 535 bp, Artificial Sequence
  chemically treated genomic DNA (Homo sapiens) CpG-island No: 34951
tttttatttttgggtgcggggtttcgattattttcgtttttttgtcgtcgttagtttattgcgtaggttgtatttttacggttgttgttgtagatttcgcgtcgttattttcgtcgtatttcgtttttattcgtagtcggtcgggacgtcgggttttcgcgttttttatttgtcggtaaggcgaagaggttgagcgcgaggatggcgtagtttagtcgtggcgtttttattaggagttcgtttttattacgttttgtattagtatttttagttttcgtagtagcgtttcgtttttataggtgcgttcgcgtcggttttatgggtttcgtaggttttatgggtttcgtaggttttatgggtttcgtaggttttatgggtttcgtaggttttatcggtttcgtgggttttatggattttgtggttcgggttcgacgcgtacggaggattggaggattggggcgtgtgtttgcggtgtaggcgaggcggggcgggtcggggcggagttacgcgtcgtttggggatattcgttttcggg

SEQ ID NO: 34952 - DNA, 535 bp, Artificial Sequence
  chemically treated genomic DNA (Homo sapiens) CpG-island No: 34952
cccgaaaacgaatatccccaaacgacgcgtaactccgccccgacccgccccgcctcgcctacaccgcaaacacacgccccaatcctccaatcctccgtacgcgtcgaacccgaaccacaaaatccataaaacccacgaaaccgataaaacctacgaaacccataaaacctacgaaacccataaaacctacgaaacccataaaacctacgaaacccataaaaccgacgcgaacgcacctataaaaacgaaacgctactacgaaaactaaaaatactaatacaaaacgtaataaaaacgaactcctaataaaaacgccacgactaaactacgccatcctcgcgctcaacctcttcgccttaccgacaaataaaaaacgcgaaaacccgacgtcccgaccgactacgaataaaaacgaaatacgacgaaaataacgacgcgaaatctacaacaacaaccgtaaaaatacaacctacgcaataaactaacgacgacaaaaaaacgaaaataatcgaaaccccgcacccaaaaataaaaa

SEQ ID NO: 34953 - DNA, 850 bp, Artificial Sequence
  chemically treated genomic DNA (Homo sapiens) CpG-island No: 34953
gagttcgtttgcgtaaggtaggcgcgggggattaaatggttgttggtgtagagtggggttgtttcggtattaagggttcgtttcgtggtcggaaggataaaggatatttaggggacgagggtcgtcgagttagcgcgattttcgggtcggtgggttggggcgggttgggggttggggtcgggtcgattttcgcggtggggtttatttcgtaggataaagtagcggtttcgtttttcggcgcgcgttcgaggttcgtgcgtgtgagtacgcgtcggagacggttagaaatggcggttggggcggacgagggggttggcgcgggaagcgggttgtttggttcggttacgtttttatttcgttaggaatttaggagtcggtttgtttttcgaatttattttttttcgttttttcgtttttgtaggttgtgtgtcgagtttggaagaaagtgtgattcgttcgacggaataaaggatatgatagttcggtttcgtgcggttattgcggagcgttaggaatattttttaaaatggcggtcggcgcgtcggaatagggcgggaggcggcggcgcgtgggggcgggacggggaggggcgcggttagtcgggtttttgttttcgcgatttcggcggtgtagggcgggtggagtcgcggagtagtttttatggtcgtttcgtcggagttcggtgagttcgaggagaggaaggtaatttgggggtcggcggggcgtcgtcgcgggtgggcggtgggtaaggacgtttttcgcggagtttttaggttcggagtacgtgttattggtttttttgttatttatgggtttgaaattattttaattgtttttagtttttatttta

SEQ ID NO: 34954 - DNA, 850 bp, Artificial Sequence
  chemically treated genomic DNA (Homo sapiens) CpG-island No: 34954
taaaataaaaactaaaaacaattaaaataatttcaaacccataaataacaaaaaaaccaataacacgtactccgaacctaaaaactccgcgaaaaacgtccttacccaccgcccacccgcgacgacgccccgccgacccccaaattaccttcctctcctcgaactcaccgaactccgacgaaacgaccataaaaactactccgcgactccacccgccctacaccgccgaaatcgcgaaaacaaaaacccgactaaccgcgcccctccccgtcccgcccccacgcgccgccgcctcccgccctattccgacgcgccgaccgccattttaaaaaatattcctaacgctccgcaataaccgcacgaaaccgaactatcatatcctttattccgtcgaacgaatcacactttcttccaaactcgacacacaacctacaaaaacgaaaaaacgaaaaaaaataaattcgaaaaacaaaccgactcctaaattcctaacgaaataaaaacgtaaccgaaccaaacaacccgcttcccgcgccaaccccctcgtccgccccaaccgccatttctaaccgtctccgacgcgtactcacacgcacgaacctcgaacgcgcgccgaaaaacgaaaccgctactttatcctacgaaataaaccccaccgcgaaaatcgacccgaccccaacccccaacccgccccaacccaccgacccgaaaatcgcgctaactcgacgaccctcgtcccctaaatatcctttatccttccgaccacgaaacgaacccttaataccgaaacaaccccactctacaccaacaaccatttaatcccccgcgcctaccttacgcaaacgaactc

SEQ ID NO: 34955 - DNA, 850 bp, Artificial Sequence
  chemically treated genomic DNA (Homo sapiens) CpG-island No: 34955
tgggataaggattaggaatagttaaaatagttttaagtttatgggtggtagagaagttagtgatacgtgtttcgggtttaggagtttcgcggagaacgtttttatttatcgtttattcgcggcggcgtttcgtcgatttttaggttattttttttttttcgggtttatcgggtttcggcggggcggttatgaggattatttcgcgattttattcgttttgtatcgtcggggtcgcggaagtagaagttcggttggtcgcgttttttttcgtttcgtttttacgcgtcgtcgtttttcgttttgtttcgacgcgtcggtcgttattttagggaatgtttttaacgtttcgtagtggtcgtacggggtcgggttgttatgttttttgtttcgtcgaacgggttatatttttttttaagttcggtatatagtttgtaggggcgggagagcggaaggagatgggttcggaaaataaatcgatttttagatttttggcgaggtgggggcgtaatcgagttagatagttcgtttttcgcgttagttttttcgttcgttttaatcgttatttttaatcgttttcggcgcgtgtttatacgtacgagtttcgggcgcgcgtcgaggggcggggtcgttgttttgttttgcggggtgggttttatcgcgggggtcggttcggttttagtttttagttcgttttagtttatcgattcggaagtcgcgttggttcggcggttttcgttttttaagtgttttttgttttttcggttacgggacgagtttttggtgtcggggtagttttattttgtattagtagttatttagtttttcgcgtttgttttgcgtaaacgggttt

SEQ ID NO: 34956 - DNA, 850 bp, Artificial Sequence
  chemically treated genomic DNA (Homo sapiens) CpG-island No: 34956
aaacccgtttacgcaaaacaaacgcgaaaaactaaataactactaatacaaaataaaactaccccgacaccaaaaactcgtcccgtaaccgaaaaaacaaaaaacacttaaaaaacgaaaaccgccgaaccaacgcgacttccgaatcgataaactaaaacgaactaaaaactaaaaccgaaccgacccccgcgataaaacccaccccgcaaaacaaaacaacgaccccgcccctcgacgcgcgcccgaaactcgtacgtataaacacgcgccgaaaacgattaaaaataacgattaaaacgaacgaaaaaactaacgcgaaaaacgaactatctaactcgattacgcccccacctcgccaaaaatctaaaaatcgatttattttccgaacccatctccttccgctctcccgcccctacaaactatataccgaacttaaaaaaaaatataacccgttcgacgaaacaaaaaacataacaacccgaccccgtacgaccactacgaaacgttaaaaacattccctaaaataacgaccgacgcgtcgaaacaaaacgaaaaacgacgacgcgtaaaaacgaaacgaaaaaaaacgcgaccaaccgaacttctacttccgcgaccccgacgatacaaaacgaataaaatcgcgaaataatcctcataaccgccccgccgaaacccgataaacccgaaaaaaaaaaaataacctaaaaatcgacgaaacgccgccgcgaataaacgataaataaaaacgttctccgcgaaactcctaaacccgaaacacgtatcactaacttctctaccacccataaacttaaaactattttaactattcctaatccttatccca

SEQ ID NO: 34957 - DNA, 863 bp, Artificial Sequence
  chemically treated genomic DNA (Homo sapiens) CpG-island No: 34957
gacgttcggtttgcgtagtgagatgtttgttcgtcgtcgtcgtcgtcgttatcgcggaggagcgcgataaagggagtcgagtcggacgtgagggggatttcgcggagtcgtcgcgttagcgtagttttttagtcgtatcggagtcgttagagttcgagtcgtcgtcgtcgtcgtcgtcgttttcgtcgtcgtcgcggttgtttaggggtcggttagttttttagttttgttcgggggtcgcgtcgtcgtcgtttttagcgtcgtttttagtttgtttgttcgttttaaatgtgatatcggcgtcgcggagcgcgatttgaagtcgtcgtcggggaggggacgagtattatgtcgaatttgagtaaaggtacgggtagtcggaaggatattaagatgcggattcgggttttttcggtgagttttttttcggcgttcgggatttcggggtcgggggtcgggtcgagagtcgtacgcgaggttcgggttgaagttttttaataggtcgtaggttcggtttttttttttttacgttcgtcggtcgcggggcgcgagttttttcggtaatcgggcggcgcggggtttcggcgcggtcgttttttcgggtcgtttttcgcgtcgggagttcgggtttggcgtcgcgttttcgttcgggagttgtttttttagtcgtttcgcgggcgtcggttgcggtcggggtttttcggtcgttttacgtttttttacgttgtcggggttgtaggtttagttttcggcgttgttagtagtcgcggagttttttttgtgtggggcgtgtgtggaattttttacgtggggtttcgttatattttgaaaatttatttagtttagtttttagggtgatgaag

SEQ ID NO: 34958 - DNA, 863 bp, Artificial Sequence
  chemically treated genomic DNA (Homo sapiens) CpG-island No: 34958
cttcatcaccctaaaaactaaactaaataaattttcaaaatataacgaaaccccacgtaaaaaattccacacacgccccacacaaaaaaaactccgcgactactaacaacgccgaaaactaaacctacaaccccgacaacgtaaaaaaacgtaaaacgaccgaaaaaccccgaccgcaaccgacgcccgcgaaacgactaaaaaaacaactcccgaacgaaaacgcgacgccaaacccgaactcccgacgcgaaaaacgacccgaaaaaacgaccgcgccgaaaccccgcgccgcccgattaccgaaaaaactcgcgccccgcgaccgacgaacgtaaaaaaaaaaaaaccgaacctacgacctattaaaaaacttcaacccgaacctcgcgtacgactctcgacccgacccccgaccccgaaatcccgaacgccgaaaaaaaactcaccgaaaaaacccgaatccgcatcttaatatccttccgactacccgtacctttactcaaattcgacataatactcgtcccctccccgacgacgacttcaaatcgcgctccgcgacgccgatatcacatttaaaacgaacaaacaaactaaaaacgacgctaaaaacgacgacgacgcgacccccgaacaaaactaaaaaactaaccgacccctaaacaaccgcgacgacgacgaaaacgacgacgacgacgacgacgactcgaactctaacgactccgatacgactaaaaaactacgctaacgcgacgactccgcgaaatccccctcacgtccgactcgactccctttatcgcgctcctccgcgataacgacgacgacgacgacgaacaaacatctcactacgcaaaccgaacgtc

SEQ ID NO: 34959 - DNA, 863 bp, Artificial Sequence
  chemically treated genomic DNA (Homo sapiens) CpG-island No: 34959
ttttattattttaaaagttaggttgggtaaatttttaaagtgtagcgaaattttacgtgaaaagttttatatacgttttatatagggaggatttcgcggttgttagtagcgtcggagattgggtttataatttcggtaacgtggggaggcgtggggcggtcgaggggtttcggtcgtagtcgacgttcgcggagcggttgaaggagtagttttcggacgggggcgcggcgttaggttcgggttttcggcgcggggaacggttcgggagggcggtcgcgtcggggtttcgcgtcgttcggttgtcgggaaggttcgcgtttcgcggtcggcgggcgtgggggaggggaggtcgggtttgcggtttgttgggggattttagttcgggtttcgcgtgcggttttcggttcggttttcggtttcggggtttcggacgtcgaggagagatttatcggaaaggttcggattcgtattttggtgttttttcggttgttcgtgtttttgtttagattcgatatggtgttcgtttttttttcggcggcggttttaggtcgcgtttcgcgacgtcggtgttatatttaaggcgggtaggtaggttaggggcgacgttgggggcggcggcggcgcgattttcgggtagggttggggagttggtcggtttttgggtagtcgcggcggcggcgggggcggcggcggcggcggcggcggttcggattttggcgatttcgatgcggttggggggttgcgttggcgcggcggtttcgcggggttttttttacgttcggttcggttttttttatcgcgttttttcgcgatggcggcggcggcggcgacggataaatattttattgcgtaggtcgaacgtt

SEQ ID NO: 34960 - DNA, 863 bp, Artificial Sequence
  chemically treated genomic DNA (Homo sapiens) CpG-island No: 34960
aacgttcgacctacgcaataaaatatttatccgtcgccgccgccgccgccatcgcgaaaaaacgcgataaaaaaaaccgaaccgaacgtaaaaaaaaccccgcgaaaccgccgcgccaacgcaaccccccaaccgcatcgaaatcgccaaaatccgaaccgccgccgccgccgccgccgcccccgccgccgccgcgactacccaaaaaccgaccaactccccaaccctacccgaaaatcgcgccgccgccgcccccaacgtcgcccctaacctacctacccgccttaaatataacaccgacgtcgcgaaacgcgacctaaaaccgccgccgaaaaaaaaacgaacaccatatcgaatctaaacaaaaacacgaacaaccgaaaaaacaccaaaatacgaatccgaacctttccgataaatctctcctcgacgtccgaaaccccgaaaccgaaaaccgaaccgaaaaccgcacgcgaaacccgaactaaaatcccccaacaaaccgcaaacccgacctcccctcccccacgcccgccgaccgcgaaacgcgaaccttcccgacaaccgaacgacgcgaaaccccgacgcgaccgccctcccgaaccgttccccgcgccgaaaacccgaacctaacgccgcgcccccgtccgaaaactactccttcaaccgctccgcgaacgtcgactacgaccgaaacccctcgaccgccccacgcctccccacgttaccgaaattataaacccaatctccgacgctactaacaaccgcgaaatcctccctatataaaacgtatataaaacttttcacgtaaaatttcgctacactttaaaaatttacccaacctaacttttaaaataataaaa

SEQ ID NO: 34961 - DNA, 602 bp, Artificial Sequence
  chemically treated genomic DNA (Homo sapiens) CpG-island No: 34961
tttcgcggttgttattagcgtcggagattgggtttataatttcggtaacgtggggaggcgtggggcggtcgaggggtttcggtcgtagtcgacgttcgcggagcggttgaaggagtagttttcggacgggggcgcggcgttaggttcgggttttcggcgcggggaacggttcgggaggggcggtcgcgtcggggtttcgcgtcgttcggttgtcgggaaggttttcgtttcgcggtcggcgggcgtgggggaggggaggtcgggtttgcggtttgttgggggattttagttcgggtttttcgtgcgggtttcgggtcggttttcggtttcggggtgtcggacgtcgaggagagatttatcggaaaggcgcggattcgtattttggggtgttttcggttgttcgtgtttttgtttagatatgatatggggttcgtttttttttcggcggcggttttaggtggcgtttcgcgacgtcggtgtgatatttaaagcgggtacgcgcgttatgggcgatattgggggcggcggcggcgcgattttcgggtacggttgtggagttggtcggtttttgtgtatattcggcggcggagggggcgtcgacg

SEQ ID NO: 34962 - DNA, 602 bp, Artificial Sequence
  chemically treated genomic DNA (Homo sapiens) CpG-island No: 34962
cgtcgacgccccctccgccgccgaatatacacaaaaaccgaccaactccacaaccgtacccgaaaatcgcgccgccgccgcccccaatatcgcccataacgcgcgtacccgctttaaatatcacaccgacgtcgcgaaacgccacctaaaaccgccgccgaaaaaaaaacgaaccccatatcatatctaaacaaaaacacgaacaaccgaaaacaccccaaaatacgaatccgcgcctttccgataaatctctcctcgacgtccgacaccccgaaaccgaaaaccgacccgaaacccgcacgaaaaacccgaactaaaatcccccaacaaaccgcaaacccgacctcccctcccccacgcccgccgaccgcgaaacgaaaaccttcccgacaaccgaacgacgcgaaaccccgacgcgaccgcccctcccgaaccgttccccgcgccgaaaacccgaacctaacgccgcgcccccgtccgaaaactactccttcaaccgctccgcgaacgtcgactacgaccgaaacccctcgaccgccccacgcctccccacgttaccgaaattataaacccaatctccgacgctaataacaaccgcgaaa

SEQ ID NO: 34963 - DNA, 602 bp, Artificial Sequence
  chemically treated genomic DNA (Homo sapiens) CpG-island No: 34963
cgtcggcgtttttttcgtcgtcgggtgtgtataggggtcggttagttttatagtcgtgttcgggggtcgcgtcgtcgtcgtttttagtgtcgtttatagcgcgcgtgttcgttttaaatgttatatcggcgtcgcggagcgttatttaaagtcgtcgtcggggaggggacgagttttatgttatatttgagtaaaggtacgggtagtcggaagtattttaagatgcggattcgcgttttttcggtgagttttttttcggcgttcggtatttcggggtcgggggtcggttcgagattcgtacgagaggttcgggttgaagttttttaataggtcgtaggttcggtttttttttttttacgttcgtcggtcgcggggcgagagttttttcggtaatcgggcggcgcggggtttcggcgcggtcgtttttttcgggtcgtttttcgcgtcgggagttcgggtttggcgtcgcgttttcgttcgggagttgtttttttagtcgtttcgcgggcgtcggttgcggtcggggtttttcggtcgttttacgtttttttacgttgtcggggttgtaggtttagttttcggcgttgatagtagtcgcggag

SEQ ID NO: 34964 - DNA, 602 bp, Artificial Sequence
  chemically treated genomic DNA (Homo sapiens) CpG-island No: 34964
ctccgcgactactatcaacgccgaaaactaaacctacaaccccgacaacgtaaaaaaacgtaaaacgaccgaaaaaccccgaccgcaaccgacgcccgcgaaacgactaaaaaaacaactcccgaacgaaaacgcgacgccaaacccgaactcccgacgcgaaaaacgacccgaaaaaaacgaccgcgccgaaaccccgcgccgcccgattaccgaaaaaactctcgccccgcgaccgacgaacgtaaaaaaaaaaaaaccgaacctacgacctattaaaaaacttcaacccgaacctctcgtacgaatctcgaaccgacccccgaccccgaaataccgaacgccgaaaaaaaactcaccgaaaaaacgcgaatccgcatcttaaaatacttccgactacccgtacctttactcaaatataacataaaactcgtcccctccccgacgacgactttaaataacgctccgcgacgccgatataacatttaaaacgaacacgcgcgctataaacgacactaaaaacgacgacgacgcgacccccgaacacgactataaaactaaccgacccctatacacacccgacgacgaaaaaaacgccgacg

SEQ ID NO: 34965 - DNA, 524 bp, Artificial Sequence
  chemically treated genomic DNA (Homo sapiens) CpG-island No: 34965
tttaatagttttatagtttgagcgtcggaaacgtttatcgtagttagtttgtcgaagtttaacgtttgatcgcgcgttatgaagttgtacgagagaaagtggcgtaattattgaatgtatcggatgattaaattatcgtttggacgcgcggtattattgaatttattaatatggtggtataatgttatgcgcgttcgcgtttgtaatcgggcgatgagattattgttagcgtggtagaatattacgttaatttcgttttttggttgatggtcgtttaataaattggagttaaagtggtgaaattgtcgtttaatgcgtagcgattgtcggatgtcgatttgttgttagaattgattatttttcgtagtcggattttggcgttgggttagatgtcgaacgttattggcggttgttcggatttggcgcgagcgattatttttgtttatttagtcgggatggtggtgatggttgatggtgtttagggggtagtgtattttttcgcggatgtttagtaattggatatt

SEQ ID NO: 34966 - DNA, 524 bp, Artificial Sequence
  chemically treated genomic DNA (Homo sapiens) CpG-island No: 34966
aatatccaattactaaacatccgcgaaaaaatacactaccccctaaacaccatcaaccatcaccaccatcccgactaaataaacaaaaataatcgctcgcgccaaatccgaacaaccgccaataacgttcgacatctaacccaacgccaaaatccgactacgaaaaataatcaattctaacaacaaatcgacatccgacaatcgctacgcattaaacgacaatttcaccactttaactccaatttattaaacgaccatcaaccaaaaaacgaaattaacgtaatattctaccacgctaacaataatctcatcgcccgattacaaacgcgaacgcgcataacattataccaccatattaataaattcaataataccgcgcgtccaaacgataatttaatcatccgatacattcaataattacgccactttctctcgtacaacttcataacgcgcgatcaaacgttaaacttcgacaaactaactacgataaacgtttccgacgctcaaactataaaactattaaa

SEQ ID NO: 34967 - DNA, 524 bp, Artificial Sequence
  chemically treated genomic DNA (Homo sapiens) CpG-island No: 34967
aatatttagttgttgaatattcgcggggaaatgtattgttttttgagtattattaattattattattatttcggttgaatgagtaaaggtaatcgttcgcgttagattcgggtaatcgttagtaacgttcgatatttgatttaacgttagaattcgattacggggagtaattagttttggtaataaatcgatattcggtagtcgttgcgtattaagcggtaattttattattttggttttagtttgttgggcgattattagttaggggacgaggttggcgtggtgttttgttacgttgataataattttatcgttcggttgtagacgcggacgcgtatagtattgtgttattatgttgatggatttagtggtgtcgcgcgtttagacgatagtttagttattcggtgtatttagtaattgcgttattttttttcgtgtagttttataacgcgcggttaggcgttgggtttcggtaaattggttgcgatggacgttttcggcgtttagattgtaaaattgttggg

SEQ ID NO: 34968 - DNA, 524 bp, Artificial Sequence
  chemically treated genomic DNA (Homo sapiens) CpG-island No: 34968
cccaacaattttacaatctaaacgccgaaaacgtccatcgcaaccaatttaccgaaacccaacgcctaaccgcgcgttataaaactacacgaaaaaaaataacgcaattactaaatacaccgaataactaaactatcgtctaaacgcgcgacaccactaaatccatcaacataataacacaatactatacgcgtccgcgtctacaaccgaacgataaaattattatcaacgtaacaaaacaccacgccaacctcgtcccctaactaataatcgcccaacaaactaaaaccaaaataataaaattaccgcttaatacgcaacgactaccgaatatcgatttattaccaaaactaattactccccgtaatcgaattctaacgttaaatcaaatatcgaacgttactaacgattacccgaatctaacgcgaacgattacctttactcattcaaccgaaataataataataattaataatactcaaaaaacaatacatttccccgcgaatattcaacaactaaatatt

SEQ ID NO: 34969 - DNA, 776 bp, Artificial Sequence
  chemically treated genomic DNA (Homo sapiens) CpG-island No: 34969
  unsure (512)
aatcgtgcggggaagggtcgcgaggagagtaggggcgtcgtcggtgtcgttgtatttattttgcgtagttagtggtttagggtagtcgtcgagtttttttgaggatgaggatggggcgggcgatgtggtcggcgttgtattttatttcgttttgagatagttttaggaattttggtcgttcgtaggggaaacgtaggggtaggttcgagttttcgtagttgtcgtcgtcgtgttcggagtttgagttgttagttatgatgtcgtttatgaaattggttacggtagattttattcgagtgagtatattatttcggcgttcggttgtagcggtgcgagtaggaggcggcggggtcgggtaaggcgtagcgcggggtatgtaggttgcggtgggcgtcgggcgtacggcgagtcgggttattgggacgcgtcgcgcgcggtttttagagtttagtgttgtagggggtcgagtttcggtttttcgtgtttagtgtcgcggtggtcgtcgttttttntcgttatattttcgtaacggagttgtatggagcgggtcgatcgggggagttatcgcgcgttttaggagcgtttaggcggttgtagttgtagtaggtttttttttcgttttttgcgttcggtttcggcgtgcgttgaattgagtttattcggcgagttcgcggagtcgtcgcggttgttgttacggttattgtcgtcgggttatgtgataattaggttgtaagggtttaggttgttgcggtggtcgttgtttagttttttttttg

SEQ ID NO: 34970 - DNA, 776 bp, Artificial Sequence
  chemically treated genomic DNA (Homo sapiens) CpG-island No: 34970
  unsure (265)
caaaaaaaaaactaaacaacgaccaccgcaacaacctaaacccttacaacctaattatcacataacccgacgacaataaccgtaacaacaaccgcgacgactccgcgaactcgccgaataaactcaattcaacgcacgccgaaaccgaacgcaaaaaacgaaaaaaaaacctactacaactacaaccgcctaaacgctcctaaaacgcgcgataactcccccgatcgacccgctccatacaactccgttacgaaaatataacganaaaaaacgacgaccaccgcgacactaaacacgaaaaaccgaaactcgaccccctacaacactaaactctaaaaaccgcgcgcgacgcgtcccaataacccgactcgccgtacgcccgacgcccaccgcaacctacataccccgcgctacgccttacccgaccccgccgcctcctactcgcaccgctacaaccgaacgccgaaataatatactcactcgaataaaatctaccgtaaccaatttcataaacgacatcataactaacaactcaaactccgaacacgacgacgacaactacgaaaactcgaacctacccctacgtttcccctacgaacgaccaaaattcctaaaactatctcaaaacgaaataaaatacaacgccgaccacatcgcccgccccatcctcatcctcaaaaaaactcgacgactaccctaaaccactaactacgcaaaataaatacaacgacaccgacgacgcccctactctcctcgcgacccttccccgcacgatt

SEQ ID NO: 34971 - DNA, 776 bp, Artificial Sequence
  chemically treated genomic DNA (Homo sapiens) CpG-island No: 34971
  unsure (265)
taggggaggggttgagtaacggttatcgtagtagtttgagtttttgtagtttgattattatatgattcggcggtagtagtcgtggtagtagtcgcggcggtttcgcgagttcgtcgggtgggtttagtttagcgtacgtcggagtcgagcgtagggggcggggaagggatttgttgtagttgtagtcgtttgggcgtttttggagcgcgcggtgattttttcggtcggttcgttttatgtagtttcgttgcggaagtgtagcggngggaggcggcggttatcgcggtattaagtacgagaggtcggggttcggttttttgtagtattaggttttgggagtcgcgcgcggcgcgttttagtggttcgattcgtcgtgcgttcggcgtttatcgtagtttgtatgtttcgcgttgcgttttgttcggtttcgtcgttttttgttcgtatcgttgtagtcgggcgtcggagtaatatgtttattcgagtgaaatttgtcgtggttaattttatgggcggtattatggttggtagtttaggtttcgagtacggcggcggtagttgcggaggttcggatttgtttttgcgttttttttacgggcggttagagtttttggggttgttttaggacgaggtggagtgtagcgtcgattatatcgttcgttttatttttatttttaaggagattcggcggttgttttgggttattggttacgtagagtgagtgtagcgatatcggcggcgtttttgtttttttcgcggttttttttcgtacggtt

SEQ ID NO: 34972 - DNA, 776 bp, Artificial Sequence
  chemically treated genomic DNA (Homo sapiens) CpG-island No: 34972
  unsure (512)
aaccgtacgaaaaaaaaccgcgaaaaaaacaaaaacgccgccgatatcgctacactcactctacgtaaccaataacccaaaacaaccgccgaatctccttaaaaataaaaataaaacgaacgatataatcgacgctacactccacctcgtcctaaaacaaccccaaaaactctaaccgcccgtaaaaaaaacgcaaaaacaaatccgaacctccgcaactaccgccgccgtactcgaaacctaaactaccaaccataataccgcccataaaattaaccacgacaaatttcactcgaataaacatattactccgacgcccgactacaacgatacgaacaaaaaacgacgaaaccgaacaaaacgcaacgcgaaacatacaaactacgataaacgccgaacgcacgacgaatcgaaccactaaaacgcgccgcgcgcgactcccaaaacctaatactacaaaaaaccgaaccccgacctctcgtacttaataccgcgataaccgccgcctcccnccgctacacttccgcaacgaaactacataaaacgaaccgaccgaaaaaatcaccgcgcgctccaaaaacgcccaaacgactacaactacaacaaatcccttccccgccccctacgctcgactccgacgtacgctaaactaaacccacccgacgaactcgcgaaaccgccgcgactactaccacgactactaccgccgaatcatataataatcaaactacaaaaactcaaactactacgataaccgttactcaacccctccccta

SEQ ID NO: 34973 - DNA, 849 bp, Artificial Sequence
  chemically treated genomic DNA (Homo sapiens) CpG-island No: 34973
ggcgatattagttcgcggagaagaagggttgaaggtggagtagggggatacgtcgcgttttattagacgtacgtcgcgacgtttgttggtggatattattcgggattttaaagcggtcgttcgtcgatttttagcgttaagttacggtcggatgcgtttagggcggattcgcgcggttcggttttttaaggagttcgggtgggggcggggttgggcggggcggggcgcggcgcgcgcggggcgggggcgcgcggtttgtggcgtcgttattcggtagatttcggagggtagagcgttgtgtcggtttcgttgtcgttggttaggagcgcggggatagttcggggttgcgtcggagcgtcggttcgttttttcgggggtttcgttattatgtcgttgaggtagcgtttggtttagttggttggtcgtttgtaggattcgtagaaagtggttcgtttttagcggttgtgcggggtggaagcgtcgtcgcgtcgtttagtagatcggagggaggatgagaaagcggaggcgtttttcgtcggagattttcgattgcgagggcggtagttaggggcgtttggaggtttttagtttttcgggagcgatcgtaattagtgttcggttaagtcggacggcggcggcgtttttaacggcgtgcggaacgggttggcggtcgagttgggttcggtttcgtcgcggcgcgcgggcgttttgcgtcgtaattcgttgacgggcgaggagggttagttggttcgcgtgagtaattggtcgttttattgtttgttttgtttcggtacggagttgggtaacgaatttttttatattttgtttttttttttttggatttggaat

SEQ ID NO: 34974 - DNA, 849 bp, Artificial Sequence
  chemically treated genomic DNA (Homo sapiens) CpG-island No: 34974
attccaaatccaaaaaaaaaaaaacaaaatataaaaaaattcgttacccaactccgtaccgaaacaaaacaaacaataaaacgaccaattactcacgcgaaccaactaaccctcctcgcccgtcaacgaattacgacgcaaaacgcccgcgcgccgcgacgaaaccgaacccaactcgaccgccaacccgttccgcacgccgttaaaaacgccgccgccgtccgacttaaccgaacactaattacgatcgctcccgaaaaactaaaaacctccaaacgcccctaactaccgccctcgcaatcgaaaatctccgacgaaaaacgcctccgctttctcatcctccctccgatctactaaacgacgcgacgacgcttccaccccgcacaaccgctaaaaacgaaccactttctacgaatcctacaaacgaccaaccaactaaaccaaacgctacctcaacgacataataacgaaacccccgaaaaaacgaaccgacgctccgacgcaaccccgaactatccccgcgctcctaaccaacgacaacgaaaccgacacaacgctctaccctccgaaatctaccgaataacgacgccacaaaccgcgcgcccccgccccgcgcgcgccgcgccccgccccgcccaaccccgcccccacccgaactccttaaaaaaccgaaccgcgcgaatccgccctaaacgcatccgaccgtaacttaacgctaaaaatcgacgaacgaccgctttaaaatcccgaataatatccaccaacaaacgtcgcgacgtacgtctaataaaacgcgacgtatccccctactccaccttcaacccttcttctccgcgaactaatatcgcc

SEQ ID NO: 34975 - DNA, 849 bp, Artificial Sequence
  chemically treated genomic DNA (Homo sapiens) CpG-island No: 34975
gttttagatttagaaggggaagaataggatgtagaagagttcgttgtttagtttcgtgtcgaagtagaataggtagtagagcggttagttgtttacgcgggttagttggtttttttcgttcgttagcgagttgcggcgtagagcgttcgcgcgtcgcggcgaggtcgggtttagttcggtcgttagttcgtttcgtacgtcgttgggggcgtcgtcgtcgttcggtttggtcgggtattgattgcggtcgttttcgggaggttgggggtttttaggcgtttttggttgtcgttttcgtagtcgagggttttcggcgagaggcgttttcgtttttttatttttttttcggtttgttgagcggcgcggcggcgtttttatttcgtatagtcgttggaaacgggttattttttgcgggttttgtagacggttaattagttgggttaggcgttgttttagcgatatgataacggaattttcgggaaggcgggtcggcgtttcggcgtagtttcgaattgttttcgcgtttttggttagcggtagcggaatcggtatagcgttttatttttcggagtttgtcgggtgacggcgttataggtcgcgcgttttcgtttcgcgcgcgtcgcgtttcgtttcgtttagtttcgtttttattcgggttttttgaggggtcgggtcgcgcgggttcgttttgagcgtattcggtcgtggtttggcgttgaggatcggcgggcggtcgttttgaggtttcgggtaatatttattagtaggcgtcgcggcgtacgtttggtgggacgcggcgtgtttttttgttttatttttagtttttttttttcgcgggttagtgtcgtt

SEQ ID NO: 34976 - DNA, 849 bp, Artificial Sequence
  chemically treated genomic DNA (Homo sapiens) CpG-island No: 34976
aacgacactaacccgcgaaaaaaaaaaactaaaaataaaacaaaaaaacacgccgcgtcccaccaaacgtacgccgcgacgcctactaataaatattacccgaaacctcaaaacgaccgcccgccgatcctcaacgccaaaccacgaccgaatacgctcaaaacgaacccgcgcgacccgacccctcaaaaaacccgaataaaaacgaaactaaacgaaacgaaacgcgacgcgcgcgaaacgaaaacgcgcgacctataacgccgtcacccgacaaactccgaaaaataaaacgctataccgattccgctaccgctaaccaaaaacgcgaaaacaattcgaaactacgccgaaacgccgacccgccttcccgaaaattccgttatcatatcgctaaaacaacgcctaacccaactaattaaccgtctacaaaacccgcaaaaaataacccgtttccaacgactatacgaaataaaaacgccgccgcgccgctcaacaaaccgaaaaaaaaataaaaaaacgaaaacgcctctcgccgaaaaccctcgactacgaaaacgacaaccaaaaacgcctaaaaacccccaacctcccgaaaacgaccgcaatcaatacccgaccaaaccgaacgacgacgacgcccccaacgacgtacgaaacgaactaacgaccgaactaaacccgacctcgccgcgacgcgcgaacgctctacgccgcaactcgctaacgaacgaaaaaaaccaactaacccgcgtaaacaactaaccgctctactacctattctacttcgacacgaaactaaacaacgaactcttctacatcctattcttccccttctaaatctaaaac

SEQ ID NO: 34977 - DNA, 921 bp, Artificial Sequence
  chemically treated genomic DNA (Homo sapiens) CpG-island No: 34977
ttaggcgggtttaggcgtagtcgttattttcgggttgggtttggtattgcgttattcggtgttcgcgggatttttaggaacgagaatacggttaagtaagggacgagtatagtcgttttaggtattacgatagattcgcggcggcggtttaaggattatagagggtagtacgttcgttttcgttttttttcggttcgcggtaattttttttcgcgttttcgttacgcgtaggtttagtttcgcggcggtttcggttttacgtttcgcgttcgggttcgttcggtgatttagtatttgggtatcgtatcgttgggggcgaaggtatcgatcgggcggtacgggtcgggatcgggcgttggattagggcggtttcgaggtttggcgggcgattcgtttttagtaaaggtgcgcggggggacgagcgggtgggagcggtttcgtaaataagttttcgttttagtttttgttttttgttcgaaattgatgatgttttgtattgggtcgtcgttttttagtacgtatacggttttcgtcgttataattcgttaggttacgtcgaggttttggtttcgaggattgtaacggaaattttagacgttgtaggagattacgacgtaaattagtatttcgttttcgcgattattttataggttagattttcgcgtttcgtttattttggttttaaattaatcgtttcgtacgcgtttagttcgttttttgcggtagtttcgggtcgcgagtggtcgggaatgattgggggcggggttaaggggtcgcgtgcgtcggagatttttttcgtttcgtagtcgggaaacgtttagaatttcgaaatgtggagaaaataattttttttttacgggggcgtggttcgtcggttgtagtacgcgaaattggtaaaatgatgtaaatagggtacgtttt

SEQ ID NO: 34978 - DNA, 921 bp, Artificial Sequence
  chemically treated genomic DNA (Homo sapiens) CpG-island No: 34978
aaaacgtaccctatttacatcattttaccaatttcgcgtactacaaccgacgaaccacgcccccgtaaaaaaaaaattattttctccacatttcgaaattctaaacgtttcccgactacgaaacgaaaaaaatctccgacgcacgcgaccccttaaccccgcccccaatcattcccgaccactcgcgacccgaaactaccgcaaaaaacgaactaaacgcgtacgaaacgattaatttaaaaccaaaataaacgaaacgcgaaaatctaacctataaaataatcgcgaaaacgaaatactaatttacgtcgtaatctcctacaacgtctaaaatttccgttacaatcctcgaaaccaaaacctcgacgtaacctaacgaattataacgacgaaaaccgtatacgtactaaaaaacgacgacccaatacaaaacatcatcaatttcgaacaaaaaacaaaaactaaaacgaaaacttatttacgaaaccgctcccacccgctcgtccccccgcgcacctttactaaaaacgaatcgcccgccaaacctcgaaaccgccctaatccaacgcccgatcccgacccgtaccgcccgatcgataccttcgcccccaacgatacgatacccaaatactaaatcaccgaacgaacccgaacgcgaaacgtaaaaccgaaaccgccgcgaaactaaacctacgcgtaacgaaaacgcgaaaaaaaattaccgcgaaccgaaaaaaaacgaaaacgaacgtactaccctctataatccttaaaccgccgccgcgaatctatcgtaatacctaaaacgactatactcgtcccttacttaaccgtattctcgttcctaaaaatcccgcgaacaccgaataacgcaataccaaacccaacccgaaaataacgactacgcctaaacccgcctaa

SEQ ID NO: 34979 - DNA, 921 bp, Artificial Sequence
  chemically treated genomic DNA (Homo sapiens) CpG-island No: 34979
aaagcgtattttgtttatattattttgttaatttcgcgtattgtaatcggcgggttacgttttcgtgaaaagaaggttgttttttttatatttcggggttttggacgtttttcggttgcggggcggggggagttttcggcgtacgcggttttttggtttcgtttttagttattttcggttattcgcgattcgaggttgtcgtagggggcgggttgagcgcgtgcgaggcgattggtttggggttagagtgggcgaggcgcggaggtttggtttataaagtagtcgcggagacggggtgttggtttgcgtcgtagttttttgtagcgtttggggttttcgttgtagttttcggaattaggatttcggcgtggtttagcgagttatggcgacgaaggtcgtgtgcgtgttgaagggcgacggtttagtgtagggtattattaatttcgagtagaaggtaagggttgggacggaggtttgtttgcgaggtcgtttttattcgttcgttttttcgcgtatttttgttaggagcgggtcgttcgttaggtttcggggtcgttttggtttagcgttcggtttcggttcgtgtcgttcggtcggtgttttcgtttttagcggtgcggtgtttaagtgttgagttatcgggcgggttcgggcgcggggcgtgggatcgaggtcgtcgcggggttgggtttgcgcgtggcgggagcgcggggagggattgtcgcgggtcggggaggggcgggggcgggcgtgttgttttttgtggtttttgggtcgtcgtcgcgggtttgtcgtggtgtttggagcggttgtgttcgttttttgtttggtcgtgttttcgtttttgagggtttcgcggatatcgagtggcgtagtgttaggtttagttcggggatggcgattgcgtttgggttcgtttgg

SEQ ID NO: 34980 - DNA, 921 bp, Artificial Sequence
  chemically treated genomic DNA (Homo sapiens) CpG-island No: 34980
ccaaacgaacccaaacgcaatcgccatccccgaactaaacctaacactacgccactcgatatccgcgaaaccctcaaaaacgaaaacacgaccaaacaaaaaacgaacacaaccgctccaaacaccacgacaaacccgcgacgacgacccaaaaaccacaaaaaacaacacgcccgcccccgcccctccccgacccgcgacaatccctccccgcgctcccgccacgcgcaaacccaaccccgcgacgacctcgatcccacgccccgcgcccgaacccgcccgataactcaacacttaaacaccgcaccgctaaaaacgaaaacaccgaccgaacgacacgaaccgaaaccgaacgctaaaccaaaacgaccccgaaacctaacgaacgacccgctcctaacaaaaatacgcgaaaaaacgaacgaataaaaacgacctcgcaaacaaacctccgtcccaacccttaccttctactcgaaattaataataccctacactaaaccgtcgcccttcaacacgcacacgaccttcgtcgccataactcgctaaaccacgccgaaatcctaattccgaaaactacaacgaaaaccccaaacgctacaaaaaactacgacgcaaaccaacaccccgtctccgcgactactttataaaccaaacctccgcgcctcgcccactctaaccccaaaccaatcgcctcgcacgcgctcaacccgccccctacgacaacctcgaatcgcgaataaccgaaaataactaaaaacgaaaccaaaaaaccgcgtacgccgaaaactccccccgccccgcaaccgaaaaacgtccaaaaccccgaaatataaaaaaaacaaccttcttttcacgaaaacgtaacccgccgattacaatacgcgaaattaacaaaataatataaacaaaatacgcttt

SEQ ID NO: 34981 - DNA, 1444 bp, Artificial Sequence
  chemically treated genomic DNA (Homo sapiens) CpG-island No: 34981
gttttttgttcgcggtagtcgagagttagcggtttagtgttcgtcgttttcgtcgggtgtagggtcggttagggtcgagcgtttcgtagagacgtatttcgggagtatcgcgtcgagcggagcgcgcgtgcgttagggtttgttttgggttattttcgtagttttgggatttcgcgttttgtaaggtcgttttttcggttcgcggtcgcggtcgtcgtcgtcgtcggcgggaaagcgtttagcgtttcggcgttacgcgttagtagttttgtacgcggggcggtgtagggcggcgtagggcgggacgaggcggggagggggcggggttagcgcgacggggcggggcgaacgtcgggtataggaagcgtcgggaggtttgagtcgttttagggtgtttcgcgcggcgtggattcgggtcgttgtcgttatttcgttggagagagggagagagaggttcgttcgttcgtcggtcgggttagtgtgagttagtgcgtgagggcgcggggggtcgtgttagcgagacgtagagcgtagtcgttattattaaacggatatgttgaagattagcgttgtcgtcgtttttttttttttattttgcgaacgggattgagagggggttcgttattttttcgtttttgtttcggtcgttcgtttcgtcgtttcgggcgtagtttttttttgttcgggtttcggatttcgtcgttcgtcgttttttttcggttattaggttcggttggttttttagtttcgtttcgtcgcggcgcgaggtttatgtgatcggcgggttcggagtagtcgtcgtcgtagcgcgaatatggacgtcgttaacgtttttaattaggaggtaaggggtgtttggggtaggggggtgtcgggtttgttgtgggagtcggggttcgtttttttcgtcgtcggaggtttaaagttttggttcgggtggggacgttttttgtttcggtttcggggcggcggggtttgcgcggagcggggtttgtggttcgggagaggtcgcggcgattacgggaattgatttcgtatttttttttttattgtttattttcggatcgcgatttcgggtttttttttttcgtttttttgcggtttttttatagtttaagtttgtgtcgtgtttttttaatttggttttttttcgggtttgggcgttttcgttttttgtttcgcgagtttcgttgtcgggttcgtagtgtcgggagttcgtaaagggttaagaaagaagcgcgggcgggcgtgtggggttgggggcgggggagcgggagtatttgtcggtcgtggggttggcggagaggtggttttagtttttttgttgtttaggtcgcggcgcgtcgacggttggattttgatttcgggtttgggaggagttgaagagggtgtttatttttttttttcgggatttacgtatttgggaaatagggttaataaacgg

SEQ ID NO: 34982 - DNA, 1444 bp, Artificial Sequence
  chemically treated genomic DNA (Homo sapiens) CpG-island No: 34982
ccgtttattaaccctatttcccaaatacgtaaatcccgaaaaaaaaaaataaacaccctcttcaactcctcccaaacccgaaatcaaaatccaaccgtcgacgcgccgcgacctaaacaacaaaaaaactaaaaccacctctccgccaaccccacgaccgacaaatactcccgctcccccgcccccaaccccacacgcccgcccgcgcttctttcttaaccctttacgaactcccgacactacgaacccgacaacgaaactcgcgaaacaaaaaacgaaaacgcccaaacccgaaaaaaaaccaaattaaaaaaacacgacacaaacttaaactataaaaaaaccgcaaaaaaacgaaaaaaaaaaacccgaaatcgcgatccgaaaataaacaataaaaaaaaaaatacgaaatcaattcccgtaatcgccgcgacctctcccgaaccacaaaccccgctccgcgcaaaccccgccgccccgaaaccgaaacaaaaaacgtccccacccgaaccaaaactttaaacctccgacgacgaaaaaaacgaaccccgactcccacaacaaacccgacacccccctaccccaaacaccccttacctcctaattaaaaacgttaacgacgtccatattcgcgctacgacgacgactactccgaacccgccgatcacataaacctcgcgccgcgacgaaacgaaactaaaaaaccaaccgaacctaataaccgaaaaaaaacgacgaacgacgaaatccgaaacccgaacaaaaaaaaactacgcccgaaacgacgaaacgaacgaccgaaacaaaaacgaaaaaataacgaaccccctctcaatcccgttcgcaaaataaaaaaaaaaaaacgacgacaacgctaatcttcaacatatccgtttaataataacgactacgctctacgtctcgctaacacgaccccccgcgccctcacgcactaactcacactaacccgaccgacgaacgaacgaacctctctctccctctctccaacgaaataacgacaacgacccgaatccacgccgcgcgaaacaccctaaaacgactcaaacctcccgacgcttcctatacccgacgttcgccccgccccgtcgcgctaaccccgccccctccccgcctcgtcccgccctacgccgccctacaccgccccgcgtacaaaactactaacgcgtaacgccgaaacgctaaacgctttcccgccgacgacgacgacgaccgcgaccgcgaaccgaaaaaacgaccttacaaaacgcgaaatcccaaaactacgaaaataacccaaaacaaaccctaacgcacgcgcgctccgctcgacgcgatactcccgaaatacgtctctacgaaacgctcgaccctaaccgaccctacacccgacgaaaacgacgaacactaaaccgctaactctcgactaccgcgaacaaaaaac

SEQ ID NO: 34983 - DNA, 1444 bp, Artificial Sequence
  chemically treated genomic DNA (Homo sapiens) CpG-island No: 34983
tcgtttattagttttattttttaagtgcgtgaatttcggagaagggggatgaatattttttttaattttttttagattcgggattagagtttagtcgtcgacgcgtcgcggtttgagtaataggagagttgaagttattttttcgttagttttacgatcggtagatgttttcgttttttcgtttttaattttatacgttcgttcgcgttttttttttagttttttgcgggttttcggtattgcgaattcgataacggggttcgcggagtagagagcgagggcgtttagattcgaaaaagggttaagttagaggaatacggtatagatttgggttatgggaaggtcgtaagggggcgaaggggagaagttcgaggtcgcggttcgggggtgggtagtggggggaggggtgcggggttagttttcgtggtcgtcgcgatttttttcgggttataggtttcgtttcgcgtaggtttcgtcgtttcggaatcggggtaggaagcgtttttattcggattaaagttttaaattttcggcggcgggagaaacgagtttcggtttttatagtaggttcggtatttttttgttttaaatattttttattttttggttgaaggcgttgacggcgtttatgttcgcgttgcggcggcggttgtttcgggttcgtcggttatatagatttcgcgtcgcggcggagcggggttgggaaattagtcgggtttggtggtcggggggaggcgacgagcggcggagttcgaggttcgggtaggaagaggttgcgttcgaagcggcgaggcgggcggtcgaggtagaggcggagaggtggcgggtttttttttagtttcgttcgtaggatgaggaaaaggaggcggcggtagcgttggtttttaatatgttcgtttggtggtggcggttgcgttttgcgtttcgttgatacggtttttcgcgtttttacgtattggtttatattggttcggtcggcgagcgggcgggtttttttttttttttttttagcgggatggcggtagcggttcgagtttacgtcgcgcggggtattttgggacggtttaggtttttcggcgttttttgtgttcggcgttcgtttcgtttcgtcgcgttggtttcgtttttttttcgtttcgtttcgttttgcgtcgttttgtatcgtttcgcgtgtagggttgttggcgcgtgacgtcgggacgttgggcgttttttcgtcggcggcggcggcggtcgcggtcgcgggtcggggagacggttttgtagagcgcgggattttagggttgcgagggtgatttagagtaagttttggcgtacgcgcgtttcgttcgacgcggtgttttcggggtgcgtttttgcgaaacgttcggttttaatcggttttgtattcggcgggggcggcgggtattgagtcgttggttttcggttgtcgcgaataaagggt

SEQ ID NO: 34984 - DNA, 1444 bp, Artificial Sequence
  chemically treated genomic DNA (Homo sapiens) CpG-island No: 34984
accctttattcgcgacaaccgaaaaccaacgactcaatacccgccgcccccgccgaatacaaaaccgattaaaaccgaacgtttcgcaaaaacgcaccccgaaaacaccgcgtcgaacgaaacgcgcgtacgccaaaacttactctaaatcaccctcgcaaccctaaaatcccgcgctctacaaaaccgtctccccgacccgcgaccgcgaccgccgccgccgccgacgaaaaaacgcccaacgtcccgacgtcacgcgccaacaaccctacacgcgaaacgatacaaaacgacgcaaaacgaaacgaaacgaaaaaaaaacgaaaccaacgcgacgaaacgaaacgaacgccgaacacaaaaaacgccgaaaaacctaaaccgtcccaaaataccccgcgcgacgtaaactcgaaccgctaccgccatcccgctaaaaaaaaaaaaaaaaaaacccgcccgctcgccgaccgaaccaatataaaccaatacgtaaaaacgcgaaaaaccgtatcaacgaaacgcaaaacgcaaccgccaccaccaaacgaacatattaaaaaccaacgctaccgccgcctccttttcctcatcctacgaacgaaactaaaaaaaaacccgccacctctccgcctctacctcgaccgcccgcctcgccgcttcgaacgcaacctcttcctacccgaacctcgaactccgccgctcgtcgcctccccccgaccaccaaacccgactaatttcccaaccccgctccgccgcgacgcgaaatctatataaccgacgaacccgaaacaaccgccgccgcaacgcgaacataaacgccgtcaacgccttcaaccaaaaaataaaaaatatttaaaacaaaaaaataccgaacctactataaaaaccgaaactcgtttctcccgccgccgaaaatttaaaactttaatccgaataaaaacgcttcctaccccgattccgaaacgacgaaacctacgcgaaacgaaacctataacccgaaaaaaatcgcgacgaccacgaaaactaaccccgcacccctccccccactacccacccccgaaccgcgacctcgaacttctccccttcgcccccttacgaccttcccataacccaaatctataccgtattcctctaacttaaccctttttcgaatctaaacgccctcgctctctactccgcgaaccccgttatcgaattcgcaataccgaaaacccgcaaaaaactaaaaaaaaaacgcgaacgaacgtataaaattaaaaacgaaaaaacgaaaacatctaccgatcgtaaaactaacgaaaaaataacttcaactctcctattactcaaaccgcgacgcgtcgacgactaaactctaatcccgaatctaaaaaaaattaaaaaaaatattcatcccccttctccgaaattcacgcacttaaaaaataaaactaataaacga

SEQ ID NO: 34985 - DNA, 628 bp, Artificial Sequence
  chemically treated genomic DNA (Homo sapiens) CpG-island No: 34985
cggggcgcgtttcgcgttatttttttcgtttgttgttcgttggtcgaggcggtcgcgttgcgtcgcgggtcgcgatttttttttcgcgcgtcggttcgcgcgtgtttcgcgttttcgcgtttgagcgtttcgcgtcggcggaattgtgggatcgtcgcgtataggaagtggcggcggcgcgaggcggagggcggcgatgggggtcggggcggcgggcgcgtattcgttgaggttcgacgtaggcgggcgggttagtgcgcgcgcgtacgacgcgagaatcgcgattagtaggtggagtgtaggtgagtcgcgtcgagttcggtcgagtcgtcggagggtcgtttttcgtcgcgagtcgtagggttcgtcgtagtgagcggttgcgtttcgcggggcgcgcggtttggagagcgcggcgtttggaggtttcgggtatcgttcggtttttgtgcggattgtacggttcgcggtgttgtgcggggtgtacggcgattggggatgcgggcgatcgggtagagatggggatgcggggtcgacgagagggttgggcggtttgagggtttttttcggggggaatttgttacgtttcggttttcgttttgggggagttttatggttgatttcgggg

SEQ ID NO: 34986 - DNA, 628 bp, Artificial Sequence
  chemically treated genomic DNA (Homo sapiens) CpG-island No: 34986
ccccgaaatcaaccataaaactcccccaaaacgaaaaccgaaacgtaacaaattccccccgaaaaaaaccctcaaaccgcccaaccctctcgtcgaccccgcatccccatctctacccgatcgcccgcatccccaatcgccgtacaccccgcacaacaccgcgaaccgtacaatccgcacaaaaaccgaacgatacccgaaacctccaaacgccgcgctctccaaaccgcgcgccccgcgaaacgcaaccgctcactacgacgaaccctacgactcgcgacgaaaaacgaccctccgacgactcgaccgaactcgacgcgactcacctacactccacctactaatcgcgattctcgcgtcgtacgcgcgcgcactaacccgcccgcctacgtcgaacctcaacgaatacgcgcccgccgccccgacccccatcgccgccctccgcctcgcgccgccgccacttcctatacgcgacgatcccacaattccgccgacgcgaaacgctcaaacgcgaaaacgcgaaacacgcgcgaaccgacgcgcgaaaaaaaaatcgcgacccgcgacgcaacgcgaccgcctcgaccaacgaacaacaaacgaaaaaaataacgcgaaacgcgccccg

SEQ ID NO: 34987 - DNA, 628 bp, Artificial Sequence
  chemically treated genomic DNA (Homo sapiens) CpG-island No: 34987
tttcgaaattagttatggggtttttttagagcgagagtcggagcgtagtaagtttttttcggagagggtttttaggtcgtttagttttttcgtcggtttcgtatttttatttttattcgatcgttcgtatttttagtcgtcgtgtatttcgtatagtatcgcgagtcgtgtagttcgtataggggtcgggcggtattcggagtttttaggcgtcgcgttttttaggtcgcgcgtttcgcggagcgtagtcgtttattgcggcgggttttgcgattcgcggcgggggacgatttttcggcggttcggtcgagttcggcgcggtttatttgtattttatttgttggtcgcggttttcgcgtcgtgcgcgcgcgtattggttcgttcgtttgcgtcgggttttagcgagtgcgcgttcgtcgtttcggtttttatcgtcgtttttcgtttcgcgtcgtcgttattttttgtgcgcggcgattttatagtttcgtcggcgcgggacgtttaggcgcggggacgcgggatacgcgcggatcgacgcgcgggggaggagtcgcggttcgcggcgtagcgcgatcgtttcggttaacggatagtaagcgggggaggtgacgcgaggcgcgtttcg

SEQ ID NO: 34988 - DNA, 628 bp, Artificial Sequence
  chemically treated genomic DNA (Homo sapiens) CpG-island No: 34988
cgaaacgcgcctcgcgtcacctcccccgcttactatccgttaaccgaaacgatcgcgctacgccgcgaaccgcgactcctcccccgcgcgtcgatccgcgcgtatcccgcgtccccgcgcctaaacgtcccgcgccgacgaaactataaaatcgccgcgcacaaaaaataacgacgacgcgaaacgaaaaacgacgataaaaaccgaaacgacgaacgcgcactcgctaaaacccgacgcaaacgaacgaaccaatacgcgcgcgcacgacgcgaaaaccgcgaccaacaaataaaatacaaataaaccgcgccgaactcgaccgaaccgccgaaaaatcgtcccccgccgcgaatcgcaaaacccgccgcaataaacgactacgctccgcgaaacgcgcgacctaaaaaacgcgacgcctaaaaactccgaataccgcccgacccctatacgaactacacgactcgcgatactatacgaaatacacgacgactaaaaatacgaacgatcgaataaaaataaaaatacgaaaccgacgaaaaaactaaacgacctaaaaaccctctccgaaaaaaacttactacgctccgactctcgctctaaaaaaaccccataactaatttcgaaa

SEQ ID NO: 34989 - DNA, 503 bp, Artificial Sequence
  chemically treated genomic DNA (Homo sapiens) CpG-island No: 34989
agaaatcgttttgtaaaaggatattttgggaacggggtgtcgagaatatatttttaagaatacgggatattagtaaaggtcggcggaagagtattagtaagttatagaaggaagaaaagcgggtagatcgatcgggttagtttaagttagtagaatagtagacgaaggtcggattttgcggggtttacgtagcggagttcgtttgttttttcgttcgcgtatttgtcgttcgttgcgatttggtttcgatgtattttcgtagttttcgtaacgcgcggtttcgcgttatttgtttattgttcgttaggcgttgcgttagttggattttcggcgggagcggtatttcgggaattatggtgaggagaattttgagattacgtattcgacgttttcgttggggcgttcgagtgacgatacgcgttcgttattattgaacgttatattgaggcgatataatttagttagacgttaaacgttttggacgatgttgcgtacgtatcgtt

SEQ ID NO: 34990 - DNA, 503 bp, Artificial Sequence
  chemically treated genomic DNA (Homo sapiens) CpG-island No: 34990
aacgatacgtacgcaacatcgtccaaaacgtttaacgtctaactaaattatatcgcctcaatataacgttcaataataacgaacgcgtatcgtcactcgaacgccccaacgaaaacgtcgaatacgtaatctcaaaattctcctcaccataattcccgaaataccgctcccgccgaaaatccaactaacgcaacgcctaacgaacaataaacaaataacgcgaaaccgcgcgttacgaaaactacgaaaatacatcgaaaccaaatcgcaacgaacgacaaatacgcgaacgaaaaaacaaacgaactccgctacgtaaaccccgcaaaatccgaccttcgtctactattctactaacttaaactaacccgatcgatctacccgcttttcttccttctataacttactaatactcttccgccgacctttactaatatcccgtattcttaaaaatatattctcgacaccccgttcccaaaatatccttttacaaaacgatttct

SEQ ID NO: 34991 - DNA, 503 bp, Artificial Sequence
  chemically treated genomic DNA (Homo sapiens) CpG-island No: 34991
ggcggtacgtacgtagtatcgtttaggacgtttgacgtttagttgggttgtgtcgttttagtgtgacgtttagtggtgacgagcgcgtgtcgttattcgagcgttttagcggaagcgtcgagtgcgtggttttagggttttttttattatggttttcggagtgtcgttttcgtcggagatttagttggcgtagcgtttggcgggtaatgaataggtgacgcgggatcgcgcgttgcggaagttgcggaagtatatcgaggttaggtcgtagcgggcgataggtacgcgggcgggagggtaggcgagtttcgttgcgtgggtttcgtaggattcggttttcgtttgttgttttattggtttaggttgattcgatcggtttgttcgttttttttttttttgtagtttgttggtgttttttcgtcggtttttattggtgtttcgtgtttttaaaggtgtgttttcgatatttcgtttttaggatgtttttttgtagagcggttttt

SEQ ID NO: 34992 - DNA, 503 bp, Artificial Sequence
  chemically treated genomic DNA (Homo sapiens) CpG-island No: 34992
aaaaaccgctctacaaaaaaacatcctaaaaacgaaatatcgaaaacacacctttaaaaacacgaaacaccaataaaaaccgacgaaaaaacaccaacaaactacaaaaaaaaaaaaaacgaacaaaccgatcgaatcaacctaaaccaataaaacaacaaacgaaaaccgaatcctacgaaacccacgcaacgaaactcgcctaccctcccgcccgcgtacctatcgcccgctacgacctaacctcgatatacttccgcaacttccgcaacgcgcgatcccgcgtcacctattcattacccgccaaacgctacgccaactaaatctccgacgaaaacgacactccgaaaaccataataaaaaaaaccctaaaaccacgcactcgacgcttccgctaaaacgctcgaataacgacacgcgctcgtcaccactaaacgtcacactaaaacgacacaacccaactaaacgtcaaacgtcctaaacgatactacgtacgtaccgcc

SEQ ID NO: 34993 - DNA, 698 bp, Artificial Sequence
  chemically treated genomic DNA (Homo sapiens) CpG-island No: 34993
gtttcggttcgggtttttatttgtcggtgattacgtcgtcgtaggagcgaatgatgacgattttcgagtcggtggttagtacggcgtgtatcgaggaaattagtttagcgcgggcggagagaatagcgcgtcgttagttcggttcgaggacgtagggagttcggttcggtttttcggtttgattttttttagtcgtaggtagatgtggggagcgggtttcggaggtttatcggttattttcgttcgtttcggtttcgttttcgttaggggaggacgcggaggggtttcggaaattcgggtcgtcgggacgcggagggagtagtttcggttttttgtcgtttttttttttcgttttgggtttcgcggtcgggtggggtgcggtgggtagcgtttcgggtttcggggggcgttttcggcgtcggtatttggtgttgattattacgtagtcggtgcggttttattcgggttgggagcgcgtagcgtttaggtgtagagcgcgaagagtttcgggaagaagagcgcgttttcggttagcgttagtagtatcggggttgcgggttcggcgttttcgtggcgtcgcgtggttgggttcggttcgggcgttcggttcggtcgcgcgattttaatttttcgttttcgttttcgttttttttcgttcggcgttggtttcgattcgcgggcggttttgcgcgtgatta

SEQ ID NO: 34994 - DNA, 698 bp, Artificial Sequence
  chemically treated genomic DNA (Homo sapiens) CpG-island No: 34994
taatcacgcgcaaaaccgcccgcgaatcgaaaccaacgccgaacgaaaaaaaacgaaaacgaaaacgaaaaattaaaatcgcgcgaccgaaccgaacgcccgaaccgaacccaaccacgcgacgccacgaaaacgccgaacccgcaaccccgatactactaacgctaaccgaaaacgcgctcttcttcccgaaactcttcgcgctctacacctaaacgctacgcgctcccaacccgaataaaaccgcaccgactacgtaataatcaacaccaaataccgacgccgaaaacgccccccgaaacccgaaacgctacccaccgcaccccacccgaccgcgaaacccaaaacgaaaaaaaaaaacgacaaaaaaccgaaactactccctccgcgtcccgacgacccgaatttccgaaacccctccgcgtcctcccctaacgaaaacgaaaccgaaacgaacgaaaataaccgataaacctccgaaacccgctccccacatctacctacgactaaaaaaaatcaaaccgaaaaaccgaaccgaactccctacgtcctcgaaccgaactaacgacgcgctattctctccgcccgcgctaaactaatttcctcgatacacgccgtactaaccaccgactcgaaaatcgtcatcattcgctcctacgacgacgtaatcaccgacaaataaaaacccgaaccgaaac

SEQ ID NO: 34995 - DNA, 698 bp, Artificial Sequence
  chemically treated genomic DNA (Homo sapiens) CpG-island No: 34995
tggttacgcgtagagtcgttcgcggatcggggttagcgtcgggcggagggggacggggacgggggcggagggttgaaatcgcgcggtcgggtcgggcgttcgagtcgaatttagttacgcggcgttacggaggcgtcggattcgtagtttcgatgttgttgacgttggtcgggggcgcgttttttttttcggggtttttcgcgttttgtatttgggcgttgcgcgtttttagttcggatggagtcgtatcgattgcgtgatgattagtattaggtatcggcgtcgagaacgtttttcgaggttcggggcgttgtttatcgtattttattcggtcgcggggtttagggcggaaaaggggggcggtaggaagtcggggttgtttttttcgcgtttcggcggttcgagttttcgaagttttttcgcgtttttttttggcgggagcggggtcggggcgggcgggaatggtcgatgagttttcggagttcgttttttatatttgtttgcggttggggagagttaggtcgaagggtcgggtcgggttttttgcgttttcggatcggattgacggcgcgttgtttttttcgttcgcgttaggttggttttttcggtgtacgtcgtgttggttatcggttcggggatcgttattattcgtttttgcgacgacgtgattatcggtaggtaagagttcgggtcggggt

SEQ ID NO: 34996 - DNA, 698 bp, Artificial Sequence
  chemically treated genomic DNA (Homo sapiens) CpG-island No: 34996
accccgacccgaactcttacctaccgataatcacgtcgtcgcaaaaacgaataataacgatccccgaaccgataaccaacacgacgtacaccgaaaaaaccaacctaacgcgaacgaaaaaaacaacgcgccgtcaatccgatccgaaaacgcaaaaaacccgacccgacccttcgacctaactctccccaaccgcaaacaaatataaaaaacgaactccgaaaactcatcgaccattcccgcccgccccgaccccgctcccgccaaaaaaaaacgcgaaaaaacttcgaaaactcgaaccgccgaaacgcgaaaaaaacaaccccgacttcctaccgccccccttttccgccctaaaccccgcgaccgaataaaatacgataaacaacgccccgaacctcgaaaaacgttctcgacgccgatacctaatactaatcatcacgcaatcgatacgactccatccgaactaaaaacgcgcaacgcccaaatacaaaacgcgaaaaaccccgaaaaaaaaaacgcgcccccgaccaacgtcaacaacatcgaaactacgaatccgacgcctccgtaacgccgcgtaactaaattcgactcgaacgcccgacccgaccgcgcgatttcaaccctccgcccccgtccccgtccccctccgcccgacgctaaccccgatccgcgaacgactctacgcgtaacca

SEQ ID NO: 34997 - DNA, 682 bp, Artificial Sequence
  chemically treated genomic DNA (Homo sapiens) CpG-island No: 34997
ttcggttttcgggtcgtcgtttagttttttttcgcgtttttttgcgtttgggttattttcgatttttgttgttcggtttttagtttttttttatttatttcgtttcgttatgtttcgttttagtcgttcggtttttttttttttgtacgtttcgttttcgatttttcggttttttttcggtttgttcgttatatttttggttttttttgtaagtttcgtttttggtttttgtttttttttttttcgtcggttttaattcgcgtttggttaaggttcgcgggaattcgtgagttatcgagagagtagagaattcggcgtcgttaaatagtttagttcgcgttttagcgtttcggcgtcgtcgcgttattttttcgagtaagtggtttttgggcgcgttcgtttcgcgtatattttagcgcgtttttttcgtcgttgggttgcgggttgttttcggggagcgttttcggtttagagagtttttgaagcgagtgtgagtgagtgtgagtgggtgcgtttgaataatttgtttaggtgggtgtgcgtacgagtgtgtgtaggagcgtatagtttcggaaatttcgcgaaattttattcggttttagtgtcgtattgaggatttaagattttttttaggaatttttatttatttagggcgattttttaattattttttgtcgtgagt

SEQ ID NO: 34998 - DNA, 682 bp, Artificial Sequence
  chemically treated genomic DNA (Homo sapiens) CpG-island No: 34998
actcacgacaaaaaataattaaaaaatcgccctaaataaataaaaattcctaaaaaaaatcttaaatcctcaatacgacactaaaaccgaataaaatttcgcgaaatttccgaaactatacgctcctacacacactcgtacgcacacccacctaaacaaattattcaaacgcacccactcacactcactcacactcgcttcaaaaactctctaaaccgaaaacgctccccgaaaacaacccgcaacccaacgacgaaaaaaacgcgctaaaatatacgcgaaacgaacgcgcccaaaaaccacttactcgaaaaaataacgcgacgacgccgaaacgctaaaacgcgaactaaactatttaacgacgccgaattctctactctctcgataactcacgaattcccgcgaaccttaaccaaacgcgaattaaaaccgacgaaaaaaaaaaaaacaaaaaccaaaaacgaaacttacaaaaaaaaccaaaaatataacgaacaaaccgaaaaaaaaccgaaaaatcgaaaacgaaacgtacaaaaaaaaaaaaaccgaacgactaaaacgaaacataacgaaacgaaataaataaaaaaaaactaaaaaccgaacaacaaaaatcgaaaataacccaaacgcaaaaaaacgcgaaaaaaaactaaacgacgacccgaaaaccgaa

SEQ ID NO: 34999 - DNA, 682 bp, Artificial Sequence
  chemically treated genomic DNA (Homo sapiens) CpG-island No: 34999
gtttacggtaggaggtggttaagaggtcgttttgaataggtaagggtttttaaaaggggttttggatttttagtgcggtattggaatcgagtaaaatttcgcggagttttcgaggttgtgcgtttttgtatatattcgtacgtatatttatttaaataagttgtttaaacgtatttatttatatttatttatattcgttttagaaattttttgagtcggaggcgtttttcgagagtagttcgtagtttagcggcgggagaggcgcgttggagtgtgcgcgggacgggcgcgtttaggagttatttattcggaggagtggcgcgacggcgtcgggacgttgaagcgcgagttgggttgtttggcggcgtcgagttttttgttttttcggtggtttacgggttttcgcggattttagttaagcgcgggttagagtcggcgggagaaaaggaggtagaggttaggggcggaatttgtaggagggattaagggtgtggcgggtaggtcggggaggagtcgggaggtcgggggcggagcgtgtagggaaggaggagtcgagcggttggggcggggtatggcggggcggagtgggtgaggaggagttggggatcggatagtaggagtcggaagtggtttaggcgtaggagagcgcggagaagggttgggcggcggttcgggagtcgga

SEQ ID NO: 35000 - DNA, 682 bp, Artificial Sequence
  chemically treated genomic DNA (Homo sapiens) CpG-island No: 35000
tccgactcccgaaccgccgcccaacccttctccgcgctctcctacgcctaaaccacttccgactcctactatccgatccccaactcctcctcacccactccgccccgccataccccgccccaaccgctcgactcctccttccctacacgctccgcccccgacctcccgactcctccccgacctacccgccacacccttaatccctcctacaaattccgcccctaacctctacctccttttctcccgccgactctaacccgcgcttaactaaaatccgcgaaaacccgtaaaccaccgaaaaaacaaaaaactcgacgccgccaaacaacccaactcgcgcttcaacgtcccgacgccgtcgcgccactcctccgaataaataactcctaaacgcgcccgtcccgcgcacactccaacgcgcctctcccgccgctaaactacgaactactctcgaaaaacgcctccgactcaaaaaatttctaaaacgaatataaataaatataaataaatacgtttaaacaacttatttaaataaatatacgtacgaatatatacaaaaacgcacaacctcgaaaactccgcgaaattttactcgattccaataccgcactaaaaatccaaaaccccttttaaaaacccttacctattcaaaacgacctcttaaccacctcctaccgtaaac

SEQ ID NO: 35001 - DNA, 861 bp, Artificial Sequence
  chemically treated genomic DNA (Homo sapiens) CpG-island No: 35001
cggatagcgagatggggtttagttttgcgtttcgggggtcgtaatagacggtaaggtggaggtggtttttcggtttcgtagtcggatttcggtatttcgagttcgtttatcggggtcgggttttggcgggtcgcggagtgaggtcgggcggcgtagcgtaggcggtgttcgggcgtagggttagtttcgtcgtcgtcgtcgtcgtcgtcgtcgtcgtcgtcgcgagttcggatttgttcgttcgatttggcggcgtagtttcgcgggatcgtttagttttcgtttttcgtgcggttttcgaggtagttttagtttcggacgtaatttcggagtcgttttaggtttttggggggaacggtgggttagacggggacgggaagggatagcggttttcgatcgtttttcgaggtgaggtttttacggttgggattgggtaggggtcgggcgggtgtcgggggaagcggggagggtttcgaggggcgaggggtcgcggttgggatgaggcgcgtcgggagtcgtaggtgttggggaggtaacggcgggacggttcgtatttgagttttttcggaagcgggaatcggttttgaaaggcgatgtcggggtttcgcggcgtcgcgtaggttaggaacgttgttgtttggttttaggtttggggtaggttttcgggtgtggggcgttggcggatcgggtattagtgtgtgttggggcgcgggtaattcgtaattcggggtttatagtttttttttcgtaaggggattgttttcgtttttttttcgggatagatttgcgtatttttttttcgacggtagtattatatttttttagttagtgaaaattgtaatgttgtttttttattggagg

SEQ ID NO: 35002 - DNA, 861 bp, Artificial Sequence
  chemically treated genomic DNA (Homo sapiens) CpG-island No: 35002
cctccaataaaaaaacaacattacaattttcactaactaaaaaaatataatactaccgtcgaaaaaaaaatacgcaaatctatcccgaaaaaaaaacgaaaacaatccccttacgaaaaaaaaactataaaccccgaattacgaattacccgcgccccaacacacactaatacccgatccgccaacgccccacacccgaaaacctaccccaaacctaaaaccaaacaacaacgttcctaacctacgcgacgccgcgaaaccccgacatcgcctttcaaaaccgattcccgcttccgaaaaaactcaaatacgaaccgtcccgccgttacctccccaacacctacgactcccgacgcgcctcatcccaaccgcgacccctcgcccctcgaaaccctccccgcttcccccgacacccgcccgacccctacccaatcccaaccgtaaaaacctcacctcgaaaaacgatcgaaaaccgctatcccttcccgtccccgtctaacccaccgttccccccaaaaacctaaaacgactccgaaattacgtccgaaactaaaactacctcgaaaaccgcacgaaaaacgaaaactaaacgatcccgcgaaactacgccgccaaatcgaacgaacaaatccgaactcgcgacgacgacgacgacgacgacgacgacgacgacgaaactaaccctacgcccgaacaccgcctacgctacgccgcccgacctcactccgcgacccgccaaaacccgaccccgataaacgaactcgaaataccgaaatccgactacgaaaccgaaaaaccacctccaccttaccgtctattacgacccccgaaacgcaaaactaaaccccatctcgctatccg

SEQ ID NO: 35003 - DNA, 861 bp, Artificial Sequence
  chemically treated genomic DNA (Homo sapiens) CpG-island No: 35003
tttttagtggaggagtaatattgtagtttttattggttaggagggtgtagtgttgtcgtcgaaaggaaagtgcgtaaatttgtttcgggggaagggcgaaggtagtttttttgcgggaggaaggttgtaggtttcggattacgaattattcgcgttttaatatatattgatgttcggttcgttagcgttttatattcgggaatttgttttaggtttagagttagatagtagcgtttttggtttgcgcggcgtcgcggggtttcggtatcgttttttagagtcggttttcgttttcgaggaaatttaggtgcgggtcgtttcgtcgttgtttttttagtatttgcggttttcggcgcgttttattttagtcgcggtttttcgtttttcgaggtttttttcgtttttttcggtattcgttcggtttttgtttagttttagtcgtggaagttttatttcggggggcggtcgaaggtcgttgttttttttcgttttcgtttaatttatcgttttttttagggatttgagacggtttcggggttgcgttcgggattggagttgtttcgagagtcgtacggggagcgagagttgagcgatttcgcgagattgcgtcgttaggtcgggcgggtaggttcgggttcgcggcggcggcggcggcggcggcggcggcggcggcgggattggttttgcgttcgggtatcgtttgcgttgcgtcgttcggttttatttcgcggttcgttaggattcggtttcggtgaacgggttcggggtgtcgaggttcggttgcggggtcgggaagttatttttattttgtcgtttgttacgattttcgaggcgtaaggttgagttttatttcgttattcg

SEQ ID NO: 35004 - DNA, 861 bp, Artificial Sequence
  chemically treated genomic DNA (Homo sapiens) CpG-island No: 35004
cgaataacgaaataaaactcaaccttacgcctcgaaaatcgtaacaaacgacaaaataaaaataacttcccgaccccgcaaccgaacctcgacaccccgaacccgttcaccgaaaccgaatcctaacgaaccgcgaaataaaaccgaacgacgcaacgcaaacgatacccgaacgcaaaaccaatcccgccgccgccgccgccgccgccgccgccgccgccgcgaacccgaacctacccgcccgacctaacgacgcaatctcgcgaaatcgctcaactctcgctccccgtacgactctcgaaacaactccaatcccgaacgcaaccccgaaaccgtctcaaatccctaaaaaaaacgataaattaaacgaaaacgaaaaaaaacaacgaccttcgaccgccccccgaaataaaacttccacgactaaaactaaacaaaaaccgaacgaataccgaaaaaaacgaaaaaaacctcgaaaaacgaaaaaccgcgactaaaataaaacgcgccgaaaaccgcaaatactaaaaaaacaacgacgaaacgacccgcacctaaatttcctcgaaaacgaaaaccgactctaaaaaacgataccgaaaccccgcgacgccgcgcaaaccaaaaacgctactatctaactctaaacctaaaacaaattcccgaatataaaacgctaacgaaccgaacatcaatatatattaaaacgcgaataattcgtaatccgaaacctacaaccttcctcccgcaaaaaaactaccttcgcccttcccccgaaacaaatttacgcactttcctttcgacgacaacactacaccctcctaaccaataaaaactacaatattactcctccactaaaaa

SEQ ID NO: 35005 - DNA, 551 bp, Artificial Sequence
  chemically treated genomic DNA (Homo sapiens) CpG-island No: 35005
gtgttcggcgtaagaggcgatacgtttttggagtagtcgggatttttcgttcgagttcggtacgtttcgttttacgcggagtttcggaggtcggacgggaagatttcggggtagtttttcgggtttttttttgttttttttcgttcgtttagggtataggatttttcggacggttgagcgtcgcggggttagttcgagcgatttattcgggttttacgttcggtcgcggagttgggagcgtatttaggtaggttttttacgtttggatttttggttcggtttttcgatttgataatttttcgcgttgcgttcggtttcgtttatttggttcgtatagtattgagttgatatcgcggcggttaatgtcgaaggcgcgttcgttggtttttcgcgtcgtacgggtttttttggttgtttcgcgtttcgagcgttgggtttagtcgtagtttatatttgaacgaagattagttcgcgaagcgttagcgcgagttggtaaaatattcgtagtcgttcgcgcggttcgtttttcgttttagttcgtcgtgtcgttt

SEQ ID NO: 35006 - DNA, 551 bp, Artificial Sequence
  chemically treated genomic DNA (Homo sapiens) CpG-island No: 35006
aaacgacacgacgaactaaaacgaaaaacgaaccgcgcgaacgactacgaatattttaccaactcgcgctaacgcttcgcgaactaatcttcgttcaaatataaactacgactaaacccaacgctcgaaacgcgaaacaaccaaaaaaacccgtacgacgcgaaaaaccaacgaacgcgccttcgacattaaccgccgcgatatcaactcaatactatacgaaccaaataaacgaaaccgaacgcaacgcgaaaaattatcaaatcgaaaaaccgaaccaaaaatccaaacgtaaaaaacctacctaaatacgctcccaactccgcgaccgaacgtaaaacccgaataaatcgctcgaactaaccccgcgacgctcaaccgtccgaaaaatcctataccctaaacgaacgaaaaaaaacaaaaaaaaacccgaaaaactaccccgaaatcttcccgtccgacctccgaaactccgcgtaaaacgaaacgtaccgaactcgaacgaaaaatcccgactactccaaaaacgtatcgcctcttacgccgaacac

SEQ ID NO: 35007 - DNA, 551 bp, Artificial Sequence
  chemically treated genomic DNA (Homo sapiens) CpG-island No: 35007
gggcggtacggcgggttggggcggggagcgggtcgcgcgggcggttgcgagtgttttattagttcgcgttggcgtttcgcgggttgattttcgtttaagtgtgagttgcggttgagtttagcgttcgaggcgcgaggtagttaggagggttcgtgcggcgcggggagttagcgagcgcgttttcggtattggtcgtcgcgatgttagtttagtgttgtgcgggttaggtgagcgaggtcgggcgtagcgcggggggttgttagatcggagaatcgggttaggagtttaggcgtggaggatttgtttgggtgcgtttttagtttcgcggtcgaacgtagggttcgggtgggtcgttcgggttggtttcgcggcgtttagtcgttcgggaaattttgtgttttgggcgggcgggaaggggtagggggaagttcgagaggttatttcggggttttttcgttcggttttcgggatttcgcgtggagcggggcgtgtcgggttcgggcggaggatttcgattgttttaggggcgtgtcgttttttgcgtcgagtat

SEQ ID NO: 35008 - DNA, 551 bp, Artificial Sequence
  chemically treated genomic DNA (Homo sapiens) CpG-island No: 35008
atactcgacgcaaaaaacgacacgcccctaaaacaatcgaaatcctccgcccgaacccgacacgccccgctccacgcgaaatcccgaaaaccgaacgaaaaaaccccgaaataacctctcgaacttccccctaccccttcccgcccgcccaaaacacaaaatttcccgaacgactaaacgccgcgaaaccaacccgaacgacccacccgaaccctacgttcgaccgcgaaactaaaaacgcacccaaacaaatcctccacgcctaaactcctaacccgattctccgatctaacaaccccccgcgctacgcccgacctcgctcacctaacccgcacaacactaaactaacatcgcgacgaccaataccgaaaacgcgctcgctaactccccgcgccgcacgaaccctcctaactacctcgcgcctcgaacgctaaactcaaccgcaactcacacttaaacgaaaatcaacccgcgaaacgccaacgcgaactaataaaacactcgcaaccgcccgcgcgacccgctccccgccccaacccgccgtaccgccc

SEQ ID NO: 35009 - DNA, 564 bp, Artificial Sequence
  chemically treated genomic DNA (Homo sapiens) CpG-island No: 35009
ttcgcgattattttttatttttttatcgcggtttgtttcgttgagttcggtttcgagtgttttattgttgtcgttattttttttacgacgatgtttgacgttgattttcggtcgtttttcgaattttttttatatattttttatcgtttatcgttatatattgttttgttatagtaataattttgttttttgtgtgtcggtgttttattcgtgtttcgcggttttcggtttattatattagatttttttttcgaattttttatttcgttttttttaacgttatttattcgtcgtttttttttaatacgacgatcgtcggtttttcgtttagaaggacgtgtgagacggacgcggtcggtcgtatttgtttacgcgcgtttcgtttcgttatcggacgacgggcggcgttcggtaagtcgatatgttttttaggtaggtatgcgggatgatgtcgtcgtgaagcgtagcgcgtcggggtatgtcgcgcgcgtttcgttcgtttttttttttattcggaacggagagcggtttcgaaatcgttcggaagttagattttttaaattt

SEQ ID NO: 35010 - DNA, 564 bp, Artificial Sequence
  chemically treated genomic DNA (Homo sapiens) CpG-island No: 35010
aaatttaaaaaatctaacttccgaacgatttcgaaaccgctctccgttccgaataaaaaaaaaaacgaacgaaacgcgcgcgacataccccgacgcgctacgcttcacgacgacatcatcccgcatacctacctaaaaaacatatcgacttaccgaacgccgcccgtcgtccgataacgaaacgaaacgcgcgtaaacaaatacgaccgaccgcgtccgtctcacacgtccttctaaacgaaaaaccgacgatcgtcgtattaaaaaaaaacgacgaataaataacgttaaaaaaaacgaaataaaaaattcgaaaaaaaaatctaatataataaaccgaaaaccgcgaaacacgaataaaacaccgacacacaaaaaacaaaattattactataacaaaacaatatataacgataaacgataaaaaatatataaaaaaaattcgaaaaacgaccgaaaatcaacgtcaaacatcgtcgtaaaaaaaataacgacaacaataaaacactcgaaaccgaactcaacgaaacaaaccgcgataaaaaaataaaaaataatcgcgaa

SEQ ID NO: 35011 - DNA, 564 bp, Artificial Sequence
  chemically treated genomic DNA (Homo sapiens) CpG-island No: 35011
gggtttggagggtttggttttcgggcggtttcggggtcgtttttcgtttcgggtggaaagggggacgggcggggcgcgcgcggtatatttcggcgcgttgcgttttacggcggtattatttcgtatatttgtttggggggtatgtcggtttatcgggcgtcgttcgtcgttcggtagcggggcggggcgcgcgtgagtagatgcggtcggtcgcgttcgttttatacgtttttttggacgagggatcggcggtcgtcgtgttgggggagggcggcgggtgggtaacgttggggggagcgaggtgggaagttcgggaggggagtttgatgtagtggatcgggggtcgcggggtacgagtgggatatcggtatataaaaagtaaaattattattgtggtaaaatagtgtatagcggtaaacggtaaggggtatgtgggggaggttcgggggacggtcgggggttagcgttaggtatcgtcgtgagggggatgacggtagtagtggaatattcgggatcggatttaacggggtagatcgcggtaggagagtggggggtggtcgcggg

SEQ ID NO: 35012 - DNA, 564 bp, Artificial Sequence
  chemically treated genomic DNA (Homo sapiens) CpG-island No: 35012
cccgcgaccaccccccactctcctaccgcgatctaccccgttaaatccgatcccgaatattccactactaccgtcatccccctcacgacgatacctaacgctaacccccgaccgtcccccgaacctcccccacataccccttaccgtttaccgctatacactattttaccacaataataattttactttttatataccgatatcccactcgtaccccgcgacccccgatccactacatcaaactcccctcccgaacttcccacctcgctccccccaacgttacccacccgccgccctcccccaacacgacgaccgccgatccctcgtccaaaaaaacgtataaaacgaacgcgaccgaccgcatctactcacgcgcgccccgccccgctaccgaacgacgaacgacgcccgataaaccgacataccccccaaacaaatatacgaaataataccgccgtaaaacgcaacgcgccgaaatataccgcgcgcgccccgcccgtccccctttccacccgaaacgaaaaacgaccccgaaaccgcccgaaaaccaaaccctccaaaccc

SEQ ID NO: 35013 - DNA, 623 bp, Artificial Sequence
  chemically treated genomic DNA (Homo sapiens) CpG-island No: 35013
tcgtaatcgcgttgtgattgttaggcgtgcgattggtatcgtttgtgttcgtacgttcggtaggagacgttagatagcgtgttttgtgcgggttattaggcgttttatttttatttcgtatcgtatatgcgggtgatgcgtgatttgataaagtagtatcgtttttttatggagttgatgacgatgttgcggtgacgtgcgtttaaacgggttgtttttgatgcgatattcgcgtcgttagcggtagttagtatagtacgattaataattttattaaggttattaataattttaggttgttttgatcggtttgcggtaatatcgtagagagcgacgttagtacgtcggaattaatgttttgtagatcgtcgattagcgcgttagtcgtgttcgttaggaaggggaacggttttatcgcgtcgttggtcgttagcggaaatagtatttcggtatcgaaaaagaatagcgcggcgggaacgagtagcgtttagatatttattacgttaaattagtcggggatttatatttagtaagttagttagtaggtagtagataatcgattgttatattaacgtggagaagcgtttattgggacgttcggtaaattatgcgttaaaaaacgt

SEQ ID NO: 35014 - DNA, 623 bp, Artificial Sequence
  chemically treated genomic DNA (Homo sapiens) CpG-island No: 35014
acgttttttaacgcataatttaccgaacgtcccaataaacgcttctccacgttaatataacaatcgattatctactacctactaactaacttactaaatataaatccccgactaatttaacgtaataaatatctaaacgctactcgttcccgccgcgctattctttttcgataccgaaatactatttccgctaacgaccaacgacgcgataaaaccgttccccttcctaacgaacacgactaacgcgctaatcgacgatctacaaaacattaattccgacgtactaacgtcgctctctacgatattaccgcaaaccgatcaaaacaacctaaaattattaataaccttaataaaattattaatcgtactatactaactaccgctaacgacgcgaatatcgcatcaaaaacaacccgtttaaacgcacgtcaccgcaacatcgtcatcaactccataaaaaaacgatactactttatcaaatcacgcatcacccgcatatacgatacgaaataaaaataaaacgcctaataacccgcacaaaacacgctatctaacgtctcctaccgaacgtacgaacacaaacgataccaatcgcacgcctaacaatcacaacgcgattacga

SEQ ID NO: 35015 - DNA, 623 bp, Artificial Sequence
  chemically treated genomic DNA (Homo sapiens) CpG-island No: 35015
gcgttttttggcgtatggtttgtcggacgttttaataaacgtttttttacgttaatgtggtagtcggttatttgttgtttgttggttggtttgttgaatgtggattttcgattggtttggcgtgatgaatgtttggacgttgttcgttttcgtcgcgttgttttttttcggtgtcgggatgttgttttcgttggcgattagcggcgcgatggagtcgtttttttttttggcgggtacggttggcgcgttggtcggcggtttgtaaaatattggtttcggcgtgttggcgtcgttttttgcgatgttgtcgtaaatcggttagggtagtttggggttgttgatgattttaatgggattgttgatcgtgttgtgttggttgtcgttggcgacgcggatgtcgtattaggggtagttcgtttaagcgtacgttatcgtagtatcgttattagttttatgggagaacgatgttgttttattagattacgtattattcgtatatgcggtgcggagtaagaataaaacgtttgatagttcgtataaagtacgttgtttggcgttttttgtcgagcgtgcgggtataggcgatgttagtcgtacgtttggtagttatagcgcggttgcgg

SEQ ID NO: 35016 - DNA, 623 bp, Artificial Sequence
  chemically treated genomic DNA (Homo sapiens) CpG-island No: 35016
ccgcaaccgcgctataactaccaaacgtacgactaacatcgcctatacccgcacgctcgacaaaaaacgccaaacaacgtactttatacgaactatcaaacgttttattcttactccgcaccgcatatacgaataatacgtaatctaataaaacaacatcgttctcccataaaactaataacgatactacgataacgtacgcttaaacgaactacccctaatacgacatccgcgtcgccaacgacaaccaacacaacacgatcaacaatcccattaaaatcatcaacaaccccaaactaccctaaccgatttacgacaacatcgcaaaaaacgacgccaacacgccgaaaccaatattttacaaaccgccgaccaacgcgccaaccgtacccgccaaaaaaaaaaacgactccatcgcgccgctaatcgccaacgaaaacaacatcccgacaccgaaaaaaaacaacgcgacgaaaacgaacaacgtccaaacattcatcacgccaaaccaatcgaaaatccacattcaacaaaccaaccaacaaacaacaaataaccgactaccacattaacgtaaaaaaacgtttattaaaacgtccgacaaaccatacgccaaaaaacgc

SEQ ID NO: 35017 - DNA, 511 bp, Artificial Sequence
  chemically treated genomic DNA (Homo sapiens) CpG-island No: 35017
ggttttttttcgtttaggtgagtttttttcgcgttttttattggtcgagatgttcgcggcgttgggagggcgacgtagcgcggtttagtttagggtttagggcggcgcgttattttcggtagcgcggagtttgtaaaatattttggagagaaaatggcggcggtagtagtttcggcgttttagtagttttcggatgaggagttttttttttagtttcgtcgttacggtttgtttttcggattagtgacggagagtattcgttcggtttattttaagaagttgaagaagtttcgagaggaagagtagtaatagtatcggttagggggtcgcggtaataagacgcggaatagtaataataataatacggtagtcgttacggtcgtagtcgcgggattagcggcggcggcggtcgcggggatgggggttcggtcggtttcgggcgattttttttatttacggatttttgggggtttgtgtcgaatttcggtttttggtttagagagttttttgg

SEQ ID NO: 35018 - DNA, 511 bp, Artificial Sequence
  chemically treated genomic DNA (Homo sapiens) CpG-island No: 35018
ccaaaaaactctctaaaccaaaaaccgaaattcgacacaaacccccaaaaatccgtaaataaaaaaaatcgcccgaaaccgaccgaacccccatccccgcgaccgccgccgccgctaatcccgcgactacgaccgtaacgactaccgtattattattattactattccgcgtcttattaccgcgaccccctaaccgatactattactactcttcctctcgaaacttcttcaacttcttaaaataaaccgaacgaatactctccgtcactaatccgaaaaacaaaccgtaacgacgaaactaaaaaaaaaactcctcatccgaaaactactaaaacgccgaaactactaccgccgccattttctctccaaaatattttacaaactccgcgctaccgaaaataacgcgccgccctaaaccctaaactaaaccgcgctacgtcgccctcccaacgccgcgaacatctcgaccaataaaaaacgcgaaaaaaactcacctaaacgaaaaaaaacc

SEQ ID NO: 35019 - DNA, 511 bp, Artificial Sequence
  chemically treated genomic DNA (Homo sapiens) CpG-island No: 35019
ttaggaggttttttgggttagaggtcgagattcggtataggtttttaggagttcgtaagtaggagaggtcgttcgagatcggtcggatttttattttcgcggtcgtcgtcgtcgttggtttcgcggttgcgatcgtggcggttgtcgtgttattgttattattgtttcgcgttttgttgtcgcggttttttgatcggtgttgttgttgttttttttttcgaagtttttttagttttttgaggtagatcgggcgggtgtttttcgttattggttcgggagataggtcgtaacggcggagttgagagaaaagttttttattcgagagttgttgaggcgtcgaagttgttgtcgtcgttattttttttttagggtgttttataagtttcgcgttatcggaagtgacgcgtcgttttagattttgaattagatcgcgttgcgtcgtttttttagcgtcgcgggtatttcggttaatgggaggcgcgggaggagtttatttgagcgggaaagagtt

SEQ ID NO: 35020 - DNA, 511 bp, Artificial Sequence
  chemically treated genomic DNA (Homo sapiens) CpG-island No: 35020
aactctttcccgctcaaataaactcctcccgcgcctcccattaaccgaaatacccgcgacgctaaaaaaacgacgcaacgcgatctaattcaaaatctaaaacgacgcgtcacttccgataacgcgaaacttataaaacaccctaaaaaaaaaataacgacgacaacaacttcgacgcctcaacaactctcgaataaaaaacttttctctcaactccgccgttacgacctatctcccgaaccaataacgaaaaacacccgcccgatctacctcaaaaaactaaaaaaacttcgaaaaaaaaaacaacaacaacaccgatcaaaaaaccgcgacaacaaaacgcgaaacaataataacaataacacgacaaccgccacgatcgcaaccgcgaaaccaacgacgacgacgaccgcgaaaataaaaatccgaccgatctcgaacgacctctcctacttacgaactcctaaaaacctataccgaatctcgacctctaacccaaaaaacctcctaa

SEQ ID NO: 35021 - DNA, 967 bp, Artificial Sequence
  chemically treated genomic DNA (Homo sapiens) CpG-island No: 35021
  unsure (731..732, 759)
atcgtttatttttttcgaattcgttttagtcgtttagttttttcgttttatttatagtgcgggatcggagggtaaagcgggcgggacgtgatggtggtttcggtttagcgttatgtaaataagtttcgtcgaggacgcgttttatattttttttttttaggtttttagtgaaaggacgggcggaattttgcgatttaaacgtttttttgaaattttttaatgtatcgttacgggagttttattttaaattttttgttagtcgttttcggaatttcgatttttgtttggagagcgttataatggttttacgagaaaaggagaagtcggttggatcggattgagagttttgcgattcgatttttaagaggagattggggggagggagcgagtagttcgagcgagcgcgggtttttttttgggttagtcgaatagtaatagtcgagttttattaattcgcggttttttgcgtttttagtatttattttcggattggaggcgtaaagtaaataggttttcgaagttgggtatagaggtatattgttcgtttttgcggtttttattttcgtttgcgagcgcgtttcgagggagggtcgtttggcgtgggggtcgcgcggggataggcgcggagggtagcggttatttcggtcggagagcgcgaggtcggtcgcgagcgggttttcggtcgtcgagttcgcgcgggaggtagcgtcgtagtttttcggtcggatatnnggtcgtagttcggcgcgtttttttgtnttcgtcgtcgtcgtttttagtcgagtagttagcgtcgggcggtttttggggttaagttaatattttttcgtagttttttatacgtcgtttttcgagagaggttttttatatatacgtatatatttttagatcgtacgtttttttaggaaaaaaaaatcgggaattagagcgtaaggggtggtggaagtaaaagtttgatagaggtgcg

SEQ ID NO: 35022 - DNA, 967 bp, Artificial Sequence
  chemically treated genomic DNA (Homo sapiens) CpG-island No: 35022
  unsure (209, 236..)
cgcacctctatcaaacttttacttccaccaccccttacgctctaattcccgatttttttttcctaaaaaaacgtacgatctaaaaatatatacgtatatataaaaaacctctctcgaaaaacgacgtataaaaaactacgaaaaaatattaacttaaccccaaaaaccgcccgacgctaactactcgactaaaaacgacgacgacgaanacaaaaaaacgcgccgaactacgaccnnatatccgaccgaaaaactacgacgctacctcccgcgcgaactcgacgaccgaaaacccgctcgcgaccgacctcgcgctctccgaccgaaataaccgctaccctccgcgcctatccccgcgcgacccccacgccaaacgaccctccctcgaaacgcgctcgcaaacgaaaataaaaaccgcaaaaacgaacaatatacctctatacccaacttcgaaaacctatttactttacgcctccaatccgaaaataaatactaaaaacgcaaaaaaccgcgaattaataaaactcgactattactattcgactaacccaaaaaaaaacccgcgctcgctcgaactactcgctccctccccccaatctcctcttaaaaatcgaatcgcaaaactctcaatccgatccaaccgacttctccttttctcgtaaaaccattataacgctctccaaacaaaaatcgaaattccgaaaacgactaacaaaaaatttaaaataaaactcccgtaacgatacattaaaaaatttcaaaaaaacgtttaaatcgcaaaattccgcccgtcctttcactaaaaacctaaaaaaaaaaaatataaaacgcgtcctcgacgaaacttatttacataacgctaaaccgaaaccaccatcacgtcccgcccgctttaccctccgatcccgcactataaataaaacgaaaaaactaaacgactaaaacgaattcgaaaaaaataaacgat

SEQ ID NO: 35023 - DNA, 967 bp, Artificial Sequence
  chemically treated genomic DNA (Homo sapiens) CpG-island No: 35023
  unsure (209, 236..)
cgtatttttgttaggtttttgtttttattattttttacgttttgattttcgattttttttttttaagggagcgtgcggtttgggggtgtgtgcgtgtgtgtgaaagatttttttcgaagagcggcgtgtgggaaattgcgggaaaatgttgatttaattttaggagtcgttcggcgttggttgttcggttggaggcggcggcggcgaangtaggaggacgcgtcgagttgcggttnngtgttcggtcggggagttgcggcgttgtttttcgcgcggattcggcggtcgaggattcgttcgcggtcggtttcgcgtttttcggtcggggtagtcgttgtttttcgcgtttgttttcgcgcggtttttacgttagacggttttttttcggggcgcgttcgtagacggaggtaagagtcgtaggagcgaataatgtgtttttgtgtttagtttcggagatttgtttgttttgcgtttttagttcgggggtggatgttggaggcgtagggagtcgcgggttaatggggttcggttgttgttgttcggttggtttagggggagattcgcgttcgttcgggttgttcgttttttttttttaatttttttttggaaatcgagtcgtagaatttttagttcggtttagtcggtttttttttttttcgtggagttattgtaacgttttttaggtaggagtcgaggtttcgggggcggttggtaaggggtttaggatgaggttttcgtagcgatgtattggggaattttaggaaagcgtttgggtcgtaaggtttcgttcgtttttttattgggggtttggggaggaggagtgtgaagcgcgttttcggcggagtttatttgtatggcgttgggtcggggttattattacgtttcgttcgttttgtttttcggtttcgtattgtaagtggagcggggaggttgagcggttggagcgagttcgggggaagtggacggt

SEQ ID NO: 35024 - DNA, 967 bp, Artificial Sequence
  chemically treated genomic DNA (Homo sapiens) CpG-island No: 35024
  unsure (731..732, 759)
accgtccacttcccccgaactcgctccaaccgctcaacctccccgctccacttacaatacgaaaccgaaaaacaaaacgaacgaaacgtaataataaccccgacccaacgccatacaaataaactccgccgaaaacgcgcttcacactcctcctccccaaacccccaataaaaaaacgaacgaaaccttacgacccaaacgctttcctaaaattccccaatacatcgctacgaaaacctcatcctaaaccccttaccaaccgcccccgaaacctcgactcctacctaaaaaacgttacaataactccacgaaaaaaaaaaaaaccgactaaaccgaactaaaaattctacgactcgatttccaaaaaaaaattaaaaaaaaaaaacgaacaacccgaacgaacgcgaatctccccctaaaccaaccgaacaacaacaaccgaaccccattaacccgcgactccctacgcctccaacatccacccccgaactaaaaacgcaaaacaaacaaatctccgaaactaaacacaaaaacacattattcgctcctacgactcttacctccgtctacgaacgcgccccgaaaaaaaaccgtctaacgtaaaaaccgcgcgaaaacaaacgcgaaaaacaacgactaccccgaccgaaaaacgcgaaaccgaccgcgaacgaatcctcgaccgccgaatccgcgcgaaaaacaacgccgcaactccccgaccgaacacnnaaccgcaactcgacgcgtcctcctacnttcgccgccgccgcctccaaccgaacaaccaacgccgaacgactcctaaaattaaatcaacattttcccgcaatttcccacacgccgctcttcgaaaaaaatctttcacacacacgcacacacccccaaaccgcacgctcccttaaaaaaaaaaaatcgaaaatcaaaacgtaaaaaataataaaaacaaaaacctaacaaaaatacg

SEQ ID NO: 35025 - DNA, 674 bp, Artificial Sequence
  chemically treated genomic DNA (Homo sapiens) CpG-island No: 35025
ggcgggggggtggtgtgcgggtgggtcggggggtgttgggggttgttggtgtgggttcggcgttgggcggcgtgcgtgtggggggggggggggcgggcggggggttcgtcgttggtcgcgggcgttgggtggggtggtgttgtttggttgttgtggtggtttttttcgttttttttttgttgggggcgtggttggtgttcggggtcggtgggtgtcggggggtgttggtggggcggggggcgcggcgttgggggggttcgcggggtggcggtggtgggggtgttcgtgcgtttgtggtcgtttgcgtgtgttttggttgtgtggttaggtggggtggtgggggtcgggtgggcgtcggggggcgtcggggtcggcgcgggtcgcggggtcggttttgtcgttgtttggttgtcggttttttcggcggtcgcgcgttcgtgtttcggtttttgttttttcgcgtgtcgtttcggtcgcgggggtgcgggttgttggtgtcgcgggttcgtgtttggggttgtcgggcggtcggtcgtggtttttgacgggttgatgttggtggtttttgcgttcgttcgcgcgtaagttcgcgcggttcggtttcggtatttttggtgtttagggtcgtcgtcgtttgcgtcgggtcgggtcggggttgcgtttgcgggcgttcg

SEQ ID NO: 35026 - DNA, 674 bp, Artificial Sequence
  chemically treated genomic DNA (Homo sapiens) CpG-island No: 35026
cgaacgcccgcaaacgcaaccccgacccgacccgacgcaaacgacgacgaccctaaacaccaaaaataccgaaaccgaaccgcgcgaacttacgcgcgaacgaacgcaaaaaccaccaacatcaacccgtcaaaaaccacgaccgaccgcccgacaaccccaaacacgaacccgcgacaccaacaacccgcacccccgcgaccgaaacgacacgcgaaaaaacaaaaaccgaaacacgaacgcgcgaccgccgaaaaaaccgacaaccaaacaacgacaaaaccgaccccgcgacccgcgccgaccccgacgccccccgacgcccacccgacccccaccaccccacctaaccacacaaccaaaacacacgcaaacgaccacaaacgcacgaacacccccaccaccgccaccccgcgaacccccccaacgccgcgccccccgccccaccaacaccccccgacacccaccgaccccgaacaccaaccacgcccccaacaaaaaaaaaacgaaaaaaaccaccacaacaaccaaacaacaccaccccacccaacgcccgcgaccaacgacgaaccccccgcccgccccccccccccccacacgcacgccgcccaacgccgaacccacaccaacaacccccaacaccccccgacccacccgcacaccacccccccgcc

SEQ ID NO: 35027 - DNA, 674 bp, Artificial Sequence
  chemically treated genomic DNA (Homo sapiens) CpG-island No: 35027
cggacgttcgtaagcgtagtttcgattcggttcggcgtaggcgacggcgattttgggtattagggatgtcggaatcggatcgcgcggatttgcgcgcgaacgagcgtaaagattattaatattagttcgttaagaattacgatcggtcgttcggtaattttagatacgagttcgcggtattaataattcgtattttcgcggtcggagcggtacgcgggggggtaagagtcggagtacgaacgcgcggtcgtcggggggatcgatagttagatagcgataaaatcggtttcgcggttcgcgtcggtttcgacgtttttcggcgtttattcgatttttattattttatttaattatataattaaaatatacgtagacggttataaacgtacgaatatttttattatcgttatttcgcggatttttttagcgtcgcgtttttcgttttattaatatttttcggtatttatcggtttcggatattaattacgtttttaataaaaaaaaaacgaggaaggttattataataattaaatagtattattttatttagcgttcgcgattaacggcgggtttttcgttcgttttttttttttttatacgtacgtcgtttagcgtcgaatttatattaataatttttaatatttttcgatttattcgtatattattttttcgtt

SEQ ID NO: 35028 - DNA, 674 bp, Artificial Sequence
  chemically treated genomic DNA (Homo sapiens) CpG-island No: 35028
aacgaaaaaataatatacgaataaatcgaaaaatattaaaaattattaatataaattcgacgctaaacgacgtacgtataaaaaaaaaaaaaacgaacgaaaaacccgccgttaatcgcgaacgctaaataaaataatactatttaattattataataaccttcctcgttttttttttattaaaaacgtaattaatatccgaaaccgataaataccgaaaaatattaataaaacgaaaaacgcgacgctaaaaaaatccgcgaaataacgataataaaaatattcgtacgtttataaccgtctacgtatattttaattatataattaaataaaataataaaaatcgaataaacgccgaaaaacgtcgaaaccgacgcgaaccgcgaaaccgattttatcgctatctaactatcgatccccccgacgaccgcgcgttcgtactccgactcttacccccccgcgtaccgctccgaccgcgaaaatacgaattattaataccgcgaactcgtatctaaaattaccgaacgaccgatcgtaattcttaacgaactaatattaataatctttacgctcgttcgcgcgcaaatccgcgcgatccgattccgacatccctaatacccaaaatcgccgtcgcctacgccgaaccgaatcgaaactacgcttacgaacgtccg

SEQ ID NO: 35029 - DNA, 576 bp, Artificial Sequence
  chemically treated genomic DNA (Homo sapiens) CpG-island No: 35029
tgttaatacgtgtatatttcgtttagattttttattttttttcgcgttttcgcgatagttgtttagtaattttagttttttagatttaattacggcgtcgtcgttcgtcgagagggttgtttatttcggggattcgtttagtttggtttagtaaaatgtattttagtagttttaatttgtatcggagaaaacgtaggttgcgcggcggtttagagcggttaagtggaatttcgtttcgatttttttgattgggtaatgcgtataagaaaattaagaggattggtcggttgtagagaggcggttcgtaacgcgacgcgaaagaagtggggtatagcggttcggggaatttttgttagttttcgattggacgaaagtagaacgtttgttttttcgtagatttagcgtacgtataacgtttatattattacgtcgtacgttgcgttagcggaagtttaatggttttattggtgggatgcgtggttaataaagggtaagaataaggcggatttcgtttttttcgtggttgattggatgtattcgttggtattgatttacgtgagttttagtatttagacg

SEQ ID NO: 35030 - DNA, 576 bp, Artificial Sequence
  chemically treated genomic DNA (Homo sapiens) CpG-island No: 35030
cgtctaaatactaaaactcacgtaaatcaataccaacgaatacatccaatcaaccacgaaaaaaacgaaatccgccttattcttaccctttattaaccacgcatcccaccaataaaaccattaaacttccgctaacgcaacgtacgacgtaataatataaacgttatacgtacgctaaatctacgaaaaaacaaacgttctactttcgtccaatcgaaaactaacaaaaattccccgaaccgctataccccacttctttcgcgtcgcgttacgaaccgcctctctacaaccgaccaatcctcttaattttcttatacgcattacccaatcaaaaaaatcgaaacgaaattccacttaaccgctctaaaccgccgcgcaacctacgttttctccgatacaaattaaaactactaaaatacattttactaaaccaaactaaacgaatccccgaaataaacaaccctctcgacgaacgacgacgccgtaattaaatctaaaaaactaaaattactaaacaactatcgcgaaaacgcgaaaaaaaataaaaaatctaaacgaaatatacacgtattaaca

SEQ ID NO: 35031 - DNA, 576 bp, Artificial Sequence
  chemically treated genomic DNA (Homo sapiens) CpG-island No: 35031
cgtttaaatgttgaaatttacgtaaattagtattagcggatgtatttagttagttacgaggaaggcggaattcgttttatttttgttttttattggttacgtattttattaatggggttattaaattttcgttaacgtagcgtacggcgtggtggtgtgagcgttgtacgtacgttgggtttacgaaggggtaggcgttttgttttcgtttaatcggaagttagtaagaatttttcgggtcgttatgttttatttttttcgcgtcgcgttacgggtcgtttttttgtagtcgattaatttttttgatttttttgtgcgtattatttaattagagaggtcgaggcggggttttatttgatcgttttaagtcgtcgcgtagtttgcgtttttttcggtataggttgaggttattaaggtatattttgttgggttaggttgggcgggttttcgggatgggtagttttttcgacgagcggcgacgtcgtggttgagtttagaaagttagagttgttggatagttatcgcgggagcgcggagggaagtgggaggtttggacggagtgtgtacgtgttggta

SEQ ID NO: 35032 - DNA, 576 bp, Artificial Sequence
  chemically treated genomic DNA (Homo sapiens) CpG-island No: 35032
taccaacacgtacacactccgtccaaacctcccacttccctccgcgctcccgcgataactatccaacaactctaactttctaaactcaaccacgacgtcgccgctcgtcgaaaaaactacccatcccgaaaacccgcccaacctaacccaacaaaatataccttaataacctcaacctataccgaaaaaaacgcaaactacgcgacgacttaaaacgatcaaataaaaccccgcctcgacctctctaattaaataatacgcacaaaaaaatcaaaaaaattaatcgactacaaaaaaacgacccgtaacgcgacgcgaaaaaaataaaacataacgacccgaaaaattcttactaacttccgattaaacgaaaacaaaacgcctaccccttcgtaaacccaacgtacgtacaacgctcacaccaccacgccgtacgctacgttaacgaaaatttaataaccccattaataaaatacgtaaccaataaaaaacaaaaataaaacgaattccgccttcctcgtaactaactaaatacatccgctaatactaatttacgtaaatttcaacatttaaacg

SEQ ID NO: 35033 - DNA, 788 bp, Artificial Sequence
  chemically treated genomic DNA (Homo sapiens) CpG-island No: 35033
agggcggtcggcggcgtacgttgtttattttgaatttcgcggaaagttggggcgtgtattcgcgagtttagagcgcgcgtattagtcgttagttgttcggtgatttcggcgcggttcggagtcgtcggtagcgttttagcgtaggaattcggttagtaggtcggtgttgttgagatattgtattatcgcgtttatgaaataggtgttgtcgtggttttttaagttttgagcgttcggcgtcgcgttttatcgtcggcggggagttggagttggggttggggttcgggcgggcgttttttttcggggttttcgggggtcgttggaattgggttcggggcgtaggcgaagttttttttatcgtcgttattatagtgtttcggttggggtcggggcggtgagttttcggggcgtgagcgttgtttagcgttagtaggaagcggttgaataggcggcgtagggagcggcggcgcggggtcggggtcgagcggttttttttttgtcgcgttttcggggtttaggtttatggttgtcggcgtagttttaggcgcggagtttcgggcgcgaggcggacgagcgtagtaggttttatagtttttttaaggtttttggtgtcggttatttgcgggttaggtgtgcggggacggggcggagcggataagggcgtgagtcgttcgcgcgggaattcggcggtacgattagttttttttaggtagcgtcgggttatttttatttttgtttggtgtcgttttcgttgcgttgattgggagttttcgtggtcggatttttta

SEQ ID NO: 35034 - DNA, 788 bp, Artificial Sequence
  chemically treated genomic DNA (Homo sapiens) CpG-island No: 35034
taaaaaatccgaccacgaaaactcccaatcaacgcaacgaaaacgacaccaaacaaaaataaaaataacccgacgctacctaaaaaaaactaatcgtaccgccgaattcccgcgcgaacgactcacgcccttatccgctccgccccgtccccgcacacctaacccgcaaataaccgacaccaaaaaccttaaaaaaactataaaacctactacgctcgtccgcctcgcgcccgaaactccgcgcctaaaactacgccgacaaccataaacctaaaccccgaaaacgcgacaaaaaaaaaaccgctcgaccccgaccccgcgccgccgctccctacgccgcctattcaaccgcttcctactaacgctaaacaacgctcacgccccgaaaactcaccgccccgaccccaaccgaaacactataataacgacgataaaaaaaacttcgcctacgccccgaacccaattccaacgacccccgaaaaccccgaaaaaaaacgcccgcccgaaccccaaccccaactccaactccccgccgacgataaaacgcgacgccgaacgctcaaaacttaaaaaaccacgacaacacctatttcataaacgcgataatacaatatctcaacaacaccgacctactaaccgaattcctacgctaaaacgctaccgacgactccgaaccgcgccgaaatcaccgaacaactaacgactaatacgcgcgctctaaactcgcgaatacacgccccaactttccgcgaaattcaaaataaacaacgtacgccgccgaccgccct

SEQ ID NO: 35035 - DNA, 788 bp, Artificial Sequence
  chemically treated genomic DNA (Homo sapiens) CpG-island No: 35035
tggggaattcgattacgaagatttttagttagcgtagcgggggcggtattaggtaggggtaggggtggttcggcgttgtttggagggggttggtcgtgtcgtcggattttcgcgcgggcggtttacgtttttgttcgtttcgtttcgttttcgtatatttggttcgtaggtagtcggtattaggagttttagagaagttgtagggtttgttgcgttcgttcgtttcgcgttcggggtttcgcgtttggagttgcgtcggtagttatggatttgggtttcggggacgcggtaggagggggatcgttcggtttcggtttcgcgtcgtcgttttttgcgtcgtttgtttagtcgttttttgttggcgttgggtagcgtttacgtttcggggatttatcgtttcggttttagtcgggatattgtgatggcgacggtgaggggggtttcgtttgcgtttcgggtttagttttagcggttttcgggagtttcggggaggaacgttcgttcggattttagttttagttttagtttttcgtcggcgatggggcgcggcgtcgggcgtttagggtttgaagaattacggtaatatttgttttatgaacgcggtggtgtagtgttttagtaatatcgatttgttggtcgagtttttgcgttggggcgttatcggcggtttcgggtcgcgtcgaggttatcgagtagttggcggttggtgcgcgcgttttggattcgcgaatatacgttttaatttttcgcggagtttaaggtaggtagcgtgcgtcgtcgatcgtttt

SEQ ID NO: 35036 - DNA, 788 bp, Artificial Sequence
  chemically treated genomic DNA (Homo sapiens) CpG-island No: 35036
aaaacgatcgacgacgcacgctacctaccttaaactccgcgaaaaattaaaacgtatattcgcgaatccaaaacgcgcgcaccaaccgccaactactcgataacctcgacgcgacccgaaaccgccgataacgccccaacgcaaaaactcgaccaacaaatcgatattactaaaacactacaccaccgcgttcataaaacaaatattaccgtaattcttcaaaccctaaacgcccgacgccgcgccccatcgccgacgaaaaactaaaactaaaactaaaatccgaacgaacgttcctccccgaaactcccgaaaaccgctaaaactaaacccgaaacgcaaacgaaacccccctcaccgtcgccatcacaatatcccgactaaaaccgaaacgataaatccccgaaacgtaaacgctacccaacgccaacaaaaaacgactaaacaaacgacgcaaaaaacgacgacgcgaaaccgaaaccgaacgatccccctcctaccgcgtccccgaaacccaaatccataactaccgacgcaactccaaacgcgaaaccccgaacgcgaaacgaacgaacgcaacaaaccctacaacttctctaaaactcctaataccgactacctacgaaccaaatatacgaaaacgaaacgaaacgaacaaaaacgtaaaccgcccgcgcgaaaatccgacgacacgaccaaccccctccaaacaacgccgaaccacccctacccctacctaataccgcccccgctacgctaactaaaaatcttcgtaatcgaattcccca

SEQ ID NO: 35037 - DNA, 657 bp, Artificial Sequence
  chemically treated genomic DNA (Homo sapiens) CpG-island No: 35037
gttgttcgcgtttttttcgcgcggttgttcgtattttaattttttgaggttacgggtcgtcgtcgttttttcggattcgttcgttcggtttagggggagggacgtttgggttcggtcgtttcgttgtttcggtcgcgcgtttcgcgtcggttcgacggtttgttcgtttttttgttatttttcgtttttacggggtttttttgtgcggcgtttttcgtcggtcggttttatttttaggtttcgtttttcgtcgtcgttatcgtcggattttgtttaggggaatggtttgcgagtcgggtttttggagataggaagtgaggcgtgcgagttttatgagcgcgtcgcggttcgggttggcgtgcgggtgcggttgcggcggtcgcgcggcggggtttcgggaggcgggtcgttgagcggggcgcgcggtttcgaggatgcgggagcgggagcgggagtaggtgagggcgcggttttcggtcggcgggaggggcgggcggttggttcgagcggtggggtgtgtttattcgttcggatttcggagcgcgttcgcggtttcggaatttcggagaatggggcgcggcggttagattcgtagcgggagcgtaataaagagaaaagttttgttttttaggttcgtttttatatatttgagtaatt

SEQ ID NO: 35038 - DNA, 657 bp, Artificial Sequence
  chemically treated genomic DNA (Homo sapiens) CpG-island No: 35038
aattactcaaatatataaaaacgaacctaaaaaacaaaacttttctctttattacgctcccgctacgaatctaaccgccgcgccccattctccgaaattccgaaaccgcgaacgcgctccgaaatccgaacgaataaacacaccccaccgctcgaaccaaccgcccgcccctcccgccgaccgaaaaccgcgccctcacctactcccgctcccgctcccgcatcctcgaaaccgcgcgccccgctcaacgacccgcctcccgaaaccccgccgcgcgaccgccgcaaccgcacccgcacgccaacccgaaccgcgacgcgctcataaaactcgcacgcctcacttcctatctccaaaaacccgactcgcaaaccattcccctaaacaaaatccgacgataacgacgacgaaaaacgaaacctaaaaataaaaccgaccgacgaaaaacgccgcacaaaaaaaccccgtaaaaacgaaaaataacaaaaaaacgaacaaaccgtcgaaccgacgcgaaacgcgcgaccgaaacaacgaaacgaccgaacccaaacgtccctccccctaaaccgaacgaacgaatccgaaaaaacgacgacgacccgtaacctcaaaaaattaaaatacgaacaaccgcgcgaaaaaaacgcgaacaac

SEQ ID NO: 35039 - DNA, 657 bp, Artificial Sequence
  chemically treated genomic DNA (Homo sapiens) CpG-island No: 35039
aattatttaagtatatgagagcgaatttgaaaaataagatttttttttttgttacgttttcgttacgggtttggtcgtcgcgttttatttttcgggatttcggggtcgcgggcgcgtttcggggttcgggcgagtggatatattttatcgttcgggttagtcgttcgtttttttcgtcggtcggggatcgcgtttttatttgttttcgttttcgttttcgtattttcggggtcgcgcgtttcgtttagcgattcgtttttcggggtttcgtcgcgcggtcgtcgtagtcgtattcgtacgttagttcgggtcgcggcgcgtttatggggttcgtacgttttattttttgtttttaaaaattcggttcgtagattatttttttgggtagagttcggcggtggcgacggcgaggggcgaggtttggaggtgggatcggtcggcgaggagcgtcgtataaagaagtttcgtgggggcggggggtggtaggaggacggatagatcgtcggatcgacgcgggacgcgcggtcggagtagcggggcggtcgggtttaggcgtttttttttttgagtcgggcgggcggattcggggaggcggcggcggttcgtgattttagagagttggaatgcgggtagtcgcgcgggggaggcgcggatagt

SEQ ID NO: 35040 - DNA, 657 bp, Artificial Sequence
  chemically treated genomic DNA (Homo sapiens) CpG-island No: 35040
actatccgcgcctcccccgcgcgactacccgcattccaactctctaaaatcacgaaccgccgccgcctccccgaatccgcccgcccgactcaaaaaaaaaaacgcctaaacccgaccgccccgctactccgaccgcgcgtcccgcgtcgatccgacgatctatccgtcctcctaccaccccccgcccccacgaaacttctttatacgacgctcctcgccgaccgatcccacctccaaacctcgcccctcgccgtcgccaccgccgaactctacccaaaaaaataatctacgaaccgaatttttaaaaacaaaaaataaaacgtacgaaccccataaacgcgccgcgacccgaactaacgtacgaatacgactacgacgaccgcgcgacgaaaccccgaaaaacgaatcgctaaacgaaacgcgcgaccccgaaaatacgaaaacgaaaacgaaaacaaataaaaacgcgatccccgaccgacgaaaaaaacgaacgactaacccgaacgataaaatatatccactcgcccgaaccccgaaacgcgcccgcgaccccgaaatcccgaaaaataaaacgcgacgaccaaacccgtaacgaaaacgtaacaaaaaaaaaaatcttatttttcaaattcgctctcatatacttaaataatt

SEQ ID NO: 35041 - DNA, 1072 bp, Artificial Sequence
  chemically treated genomic DNA (Homo sapiens) CpG-island No: 35041
tttcgtcgatgtcgtttaattttagtattatcgggagtgacgttatgaggtttgattatttttcgttttatcggtatagcgtcgtgatattttcgttttatcgttttattttagattatgagattgtgatgaagtagtttaataggggtttggtgtatgcggaacggtagagttattcgttgcgaaattttaatatcggtagttcgtacgtttatagtaggttcgcggcgttggtttatagttagttcgagattcgcgagtacgtatagtttttttcgttagcggtcgtatattgttcgtttagtttgagttatagtttttatagttcgtttttttatttttattttgtcgagcggcggttcgtggtgggcgcggttagcgtgtcggagttgattaatgcgtagttgtaggcgtaggattattcgttttttaatattatgcggacgtaggtgtatcggttatttttattttattcgttttttaggttcgttaatagtacgttagatttgtttcgttatttttatattagtagtagtaatttcgattttattacgcggcgcgtgtattattcggtgtaaacgttttaggaggatagtttgttcgtggcgtattcgttgtaggaggttagcgagttttttatcgcgcgcgcgtaacgcgtagttgtataaacggaatagtatcgaggtggtcgggtttagttacggtttggagggtttgtcggtttaaggagcgtattttattcgcgtcggcggtagaggtggcgtcgcgagtcgtttcggtgggtttttagtttagcgtttttatcgagaggatatagcgagaagggtcggaggaggcggagggtttgaggtacggttataagaagtttttgtcggacgttattatgttaatttatagtagcgaggaggaggaggacgaggatttcgaggaggagagcggggttcgggcgttttttgtacgtgcgcgcgagtttcggttcggtttggtttaggatttatttggttgttttcgcgttttgttcgtcgggtttttgtatattttggagtttaaggtttacgttttagacgcggag

SEQ ID NO: 35042 - DNA, 1072 bp, Artificial Sequence
  chemically treated genomic DNA (Homo sapiens) CpG-island No: 35042
ctccgcgtctaaaacgtaaaccttaaactccaaaatatacaaaaacccgacgaacaaaacgcgaaaacaaccaaataaatcctaaaccaaaccgaaccgaaactcgcgcgcacgtacaaaaaacgcccgaaccccgctctcctcctcgaaatcctcgtcctcctcctcctcgctactataaattaacataataacgtccgacaaaaacttcttataaccgtacctcaaaccctccgcctcctccgacccttctcgctatatcctctcgataaaaacgctaaactaaaaacccaccgaaacgactcgcgacgccacctctaccgccgacgcgaataaaatacgctccttaaaccgacaaaccctccaaaccgtaactaaacccgaccacctcgatactattccgtttatacaactacgcgttacgcgcgcgcgataaaaaactcgctaacctcctacaacgaatacgccacgaacaaactatcctcctaaaacgtttacaccgaataatacacgcgccgcgtaataaaatcgaaattactactactaatataaaaataacgaaacaaatctaacgtactattaacgaacctaaaaaacgaataaaataaaaataaccgatacacctacgtccgcataatattaaaaaacgaataatcctacgcctacaactacgcattaatcaactccgacacgctaaccgcgcccaccacgaaccgccgctcgacaaaataaaaataaaaaaacgaactataaaaactataactcaaactaaacgaacaatatacgaccgctaacgaaaaaaactatacgtactcgcgaatctcgaactaactataaaccaacgccgcgaacctactataaacgtacgaactaccgatattaaaatttcgcaacgaataactctaccgttccgcatacaccaaacccctattaaactacttcatcacaatctcataatctaaaataaaacgataaaacgaaaatatcacgacgctataccgataaaacgaaaaataatcaaacctcataacgtcactcccgataatactaaaattaaacgacatcgacgaaa

SEQ ID NO: 35043 - DNA, 1072 bp, Artificial Sequence
  chemically treated genomic DNA (Homo sapiens) CpG-island No: 35043
tttcgcgtttgggacgtgggttttgggttttaggatgtgtaggggttcggcgagtaggacgcgagggtagttaggtgggttttgggttaggtcgggtcgaggttcgcgcgtacgtgtaggaggcgttcgggtttcgttttttttttcgaagttttcgtttttttttttttcgttgttgtggattagtatggtggcgttcgatagggattttttatggtcgtattttaagtttttcgtttttttcggtttttttcgttgtgttttttcggtgaaaacgttgggttgggagtttatcgagacggttcgcggcgttatttttgtcgtcgacgcggatagggtgcgttttttgagtcggtaggttttttaggtcgtggttgagttcggttatttcgatgttgtttcgtttgtgtagttgcgcgttgcgcgcgcgcggtgaggggttcgttgattttttgtagcgagtgcgttacgggtaggttgtttttttggaacgtttgtatcgagtggtgtacgcgtcgcgtgatgaggtcggggttgttgttgttgatgtaaaggtggcgggataggtttggcgtgttgttggcgggtttggggggcgggtagggtgggggtggtcggtatatttgcgttcgtatgatgttgggagacgggtagttttgcgtttgtagttgcgtattggttagtttcggtacgttgatcgcgtttattacgggtcgtcgttcggtagggtaggggtagggagacgggttgtggaagttgtagtttaggttgaacgggtagtgtgcggtcgttggcgaggggagttgtgcgtgttcgcggatttcgggttggttgtagattagcgtcgcgggtttgttgtaggcgtacgagttgtcgatgttgaggtttcgtagcgagtggttttgtcgtttcgtatgtattaggtttttgttgagttgttttattatagttttatagtttggggtggggcggtaggacgggggtattacggcgttgtgtcgatgggacgggaggtagttaggttttatgacgttattttcggtgatgttagggttggacgatatcggcgagg

SEQ ID NO: 35044 - DNA, 1072 bp, Artificial Sequence
  chemically treated genomic DNA (Homo sapiens) CpG-island No: 35044
cctcgccgatatcgtccaaccctaacatcaccgaaaataacgtcataaaacctaactacctcccgtcccatcgacacaacgccgtaatacccccgtcctaccgccccaccccaaactataaaactataataaaacaactcaacaaaaacctaatacatacgaaacgacaaaaccactcgctacgaaacctcaacatcgacaactcgtacgcctacaacaaacccgcgacgctaatctacaaccaacccgaaatccgcgaacacgcacaactcccctcgccaacgaccgcacactacccgttcaacctaaactacaacttccacaacccgtctccctacccctaccctaccgaacgacgacccgtaataaacgcgatcaacgtaccgaaactaaccaatacgcaactacaaacgcaaaactacccgtctcccaacatcatacgaacgcaaatataccgaccacccccaccctacccgccccccaaacccgccaacaacacgccaaacctatcccgccacctttacatcaacaacaacaaccccgacctcatcacgcgacgcgtacaccactcgatacaaacgttccaaaaaaacaacctacccgtaacgcactcgctacaaaaaatcaacgaacccctcaccgcgcgcgcgcaacgcgcaactacacaaacgaaacaacatcgaaataaccgaactcaaccacgacctaaaaaacctaccgactcaaaaaacgcaccctatccgcgtcgacgacaaaaataacgccgcgaaccgtctcgataaactcccaacccaacgttttcaccgaaaaaacacaacgaaaaaaaccgaaaaaaacgaaaaacttaaaatacgaccataaaaaatccctatcgaacgccaccatactaatccacaacaacgaaaaaaaaaaaaacgaaaacttcgaaaaaaaaaacgaaacccgaacgcctcctacacgtacgcgcgaacctcgacccgacctaacccaaaacccacctaactaccctcgcgtcctactcgccgaacccctacacatcctaaaacccaaaacccacgtcccaaacgcgaaa

SEQ ID NO: 35045 - DNA, 714 bp, Artificial Sequence
  chemically treated genomic DNA (Homo sapiens) CpG-island No: 35045
ggtgtcgatttcgagggtattttcgcgttggatgcggttttagggcgtttgtatttggcgcggtttttggatttcgaagttggttcgtcgtggcgcgcgtttacggtacgcgttgaggggtcgggagcgcgggcgcgcggttgttgcgagtgtaggtgtaagtgtaggacgagaatgagtatgcgttcgtttttgcgcgcgattcgttgggcgcgttgttagagaattcggagttcggcgtagcgttgtatatttttcgcgcgtcggacgtcgacggtttcggttttaatagcgacgtgcgttatcgtttgttgcgttaggagtcgttcgtgtcgggtttcgtttggacgcgcgtatcggggcgttagtttcgcgcggtttggatcgagagattattttcgcgttgttgttgttggtggaagttatcgatcggttcgttaacgttagtcgtcgtcgtgtagcgcgcgttttagcgtatatacgttacggatgcgaatgagaacgcgtttgttttcgtttcgtcgtgtacgcgtgcgttttttagaggattagtcgtttgggttcgcggttggtacgtttttagttcgcgattcgtatttgggcgaggttgtacgcgtgttttatcggttggtatttggcggggacggttattttcggttgtatttaagtattggtgagagttagttttgggagtgagggcgaggaaggtgttga

SEQ ID NO: 35046 - DNA, 714 bp, Artificial Sequence
  chemically treated genomic DNA (Homo sapiens) CpG-island No: 35046
tcaacaccttcctcgccctcactcccaaaactaactctcaccaatacttaaatacaaccgaaaataaccgtccccgccaaataccaaccgataaaacacgcgtacaacctcgcccaaatacgaatcgcgaactaaaaacgtaccaaccgcgaacccaaacgactaatcctctaaaaaacgcacgcgtacacgacgaaacgaaaacaaacgcgttctcattcgcatccgtaacgtatatacgctaaaacgcgcgctacacgacgacgactaacgttaacgaaccgatcgataacttccaccaacaacaacaacgcgaaaataatctctcgatccaaaccgcgcgaaactaacgccccgatacgcgcgtccaaacgaaacccgacacgaacgactcctaacgcaacaaacgataacgcacgtcgctattaaaaccgaaaccgtcgacgtccgacgcgcgaaaaatatacaacgctacgccgaactccgaattctctaacaacgcgcccaacgaatcgcgcgcaaaaacgaacgcatactcattctcgtcctacacttacacctacactcgcaacaaccgcgcgcccgcgctcccgacccctcaacgcgtaccgtaaacgcgcgccacgacgaaccaacttcgaaatccaaaaaccgcgccaaatacaaacgccctaaaaccgcatccaacgcgaaaataccctcgaaatcgacacc

SEQ ID NO: 35047 - DNA, 714 bp, Artificial Sequence
  chemically treated genomic DNA (Homo sapiens) CpG-island No: 35047
ttagtatttttttcgtttttatttttagaattaatttttattagtgtttgagtgtagtcggaagtggtcgttttcgttagatgttagtcgataggatacgcgtgtagtttcgtttagatgcgggtcgcgggttaggagcgtgttagtcgcgggtttaggcggttggttttttgggaggcgtacgcgtgtacggcgaggcgaagataggcgcgtttttattcgtattcgtgacgtatatgcgttgaaacgcgcgttgtacgacggcggttggcgttggcgggtcggtcggtggtttttattagtagtagtagcgcgggagtggtttttcggtttaggtcgcgcggagttgacgtttcggtgcgcgcgtttaggcgaagttcggtacgggcggtttttggcgtagtaggcggtagcgtacgtcgttattggggtcggggtcgtcggcgttcgacgcgcggaaagtgtatagcgttgcgtcgggtttcgggttttttggtagcgcgtttagcgggtcgcgcgtaaaggcgggcgtatgtttattttcgttttgtatttgtatttgtattcgtagtagtcgcgcgttcgcgttttcggttttttagcgcgtatcgtaagcgcgcgttacggcgggttagtttcgaagtttaggggtcgcgttaggtataagcgttttgaggtcgtatttagcgcgaaggtgttttcgggatcggtatt

SEQ ID NO: 35048 - DNA, 714 bp, Artificial Sequence
  chemically treated genomic DNA (Homo sapiens) CpG-island No: 35048
aataccgatcccgaaaacaccttcgcgctaaatacgacctcaaaacgcttatacctaacgcgacccctaaacttcgaaactaacccgccgtaacgcgcgcttacgatacgcgctaaaaaaccgaaaacgcgaacgcgcgactactacgaatacaaatacaaatacaaaacgaaaataaacatacgcccgcctttacgcgcgacccgctaaacgcgctaccaaaaaacccgaaacccgacgcaacgctatacactttccgcgcgtcgaacgccgacgaccccgaccccaataacgacgtacgctaccgcctactacgccaaaaaccgcccgtaccgaacttcgcctaaacgcgcgcaccgaaacgtcaactccgcgcgacctaaaccgaaaaaccactcccgcgctactactactaataaaaaccaccgaccgacccgccaacgccaaccgccgtcgtacaacgcgcgtttcaacgcatatacgtcacgaatacgaataaaaacgcgcctatcttcgcctcgccgtacacgcgtacgcctcccaaaaaaccaaccgcctaaacccgcgactaacacgctcctaacccgcgacccgcatctaaacgaaactacacgcgtatcctatcgactaacatctaacgaaaacgaccacttccgactacactcaaacactaataaaaattaattctaaaaataaaaacgaaaaaaatactaa

SEQ ID NO: 35049 - DNA, 609 bp, Artificial Sequence
  chemically treated genomic DNA (Homo sapiens) CpG-island No: 35049
gttttcgcggcggagcgttttatcgttttaaatgttattggttgacgtagttttaaaaaaaattcgatggttcgtttattttatattagggggcgtttggtttttcggtcgttatagagcgttttggatgtttgaagttcgtttagttcgtcgtttttggaaaagtttaatatcgttttttcgtttttttcgagattgttaacgaggtaggttttgatgcgtatgcgtaaatacgtttattacgtttcgagttaaggcgtatgcgttttttgaaattgtcgttatcggttttattttttagtttttagtttcggtttttaaggggcgggtagaagttggaaatatgcggttgtcggtcgttgtagcgattttttatggtcgcgtatttcgtcgtatgggtttcggtttcgagtttcgtatttatttgttgcggaatttgtttatagggttggtgcggtacgaacgtatcgaggtattatgggcgcgtgtggacgaaatgaggggttacgcggagaaggtgaggagcgcggtttttttgtttattttgcgggtttggtttgagggggcggagtcggttgtaagtggaaagggatcgggattaatttggta

SEQ ID NO: 35050 - DNA, 609 bp, Artificial Sequence
  chemically treated genomic DNA (Homo sapiens) CpG-island No: 35050
taccaaattaatcccgatccctttccacttacaaccgactccgccccctcaaaccaaacccgcaaaataaacaaaaaaaccgcgctcctcaccttctccgcgtaacccctcatttcgtccacacgcgcccataatacctcgatacgttcgtaccgcaccaaccctataaacaaattccgcaacaaataaatacgaaactcgaaaccgaaacccatacgacgaaatacgcgaccataaaaaatcgctacaacgaccgacaaccgcatatttccaacttctacccgccccttaaaaaccgaaactaaaaactaaaaaataaaaccgataacgacaatttcaaaaaacgcatacgccttaactcgaaacgtaataaacgtatttacgcatacgcatcaaaacctacctcgttaacaatctcgaaaaaaacgaaaaaacgatattaaacttttccaaaaacgacgaactaaacgaacttcaaacatccaaaacgctctataacgaccgaaaaaccaaacgccccctaatataaaataaacgaaccatcgaattttttttaaaactacgtcaaccaataacatttaaaacgataaaacgctccgccgcgaaaac

SEQ ID NO: 35051 - DNA, 609 bp, Artificial Sequence
  chemically treated genomic DNA (Homo sapiens) CpG-island No: 35051
tattaggttggtttcggtttttttttatttgtagtcggtttcgtttttttagattagattcgtagagtggataagagggtcgcgttttttatttttttcgcgtagttttttatttcgtttatacgcgtttatggtgtttcgatgcgttcgtgtcgtattagttttgtgagtaagtttcgtaatagatggatgcgggattcgggatcgaggtttatacggcgaaatacgcggttatgggagatcgttgtagcgatcgatagtcgtatgtttttaatttttgttcgttttttggaggtcggaattggaaattggaaggtagagtcggtggcggtaattttagggaacgtatgcgttttagttcggagcgtggtgaacgtgtttgcgtatgcgtattagagtttgtttcgttggtaatttcgggaagggcggagaaacggtgttgagtttttttagaggcggcgagttgggcgggttttaggtatttagagcgttttgtggcggtcgaagaattaggcgttttttagtgtgggataagcgggttatcgggttttttttggggttgcgttagttagtggtatttagggcgatggggcgtttcgtcgcggagat

SEQ ID NO: 35052 - DNA, 609 bp, Artificial Sequence
  chemically treated genomic DNA (Homo sapiens) CpG-island No: 35052
atctccgcgacgaaacgccccatcgccctaaataccactaactaacgcaaccccaaaaaaaacccgataacccgcttatcccacactaaaaaacgcctaattcttcgaccgccacaaaacgctctaaatacctaaaacccgcccaactcgccgcctctaaaaaaactcaacaccgtttctccgcccttcccgaaattaccaacgaaacaaactctaatacgcatacgcaaacacgttcaccacgctccgaactaaaacgcatacgttccctaaaattaccgccaccgactctaccttccaatttccaattccgacctccaaaaaacgaacaaaaattaaaaacatacgactatcgatcgctacaacgatctcccataaccgcgtatttcgccgtataaacctcgatcccgaatcccgcatccatctattacgaaacttactcacaaaactaatacgacacgaacgcatcgaaacaccataaacgcgtataaacgaaataaaaaactacgcgaaaaaaataaaaaacgcgaccctcttatccactctacgaatctaatctaaaaaaacgaaaccgactacaaataaaaaaaaaccgaaaccaacctaata

SEQ ID NO: 35053 - DNA, 797 bp, Artificial Sequence
  chemically treated genomic DNA (Homo sapiens) CpG-island No: 35053
gacgagttcgggagtcgttggtcgttaattatcgcgcggtggagaggcgggcgttcggtttcggcgcgttgggggagttagttggcgttgttttttttatcgttttagacgtttatatcgatatagatagacgtatagacgggcgggtagatatcgatagttttttaatcgtttgcgttttagtttcggtttagggagtttttcgtattttttggggtgtcgtaaattgtagttcggtaggttcgcgtcgggagaagggagggcgcgtaggcggtcggaggaggggaggttttagcgcgttttcgttgcgatgtgaacggcggcggtttttatttggagtcgtatttggggcgtcgagtttcggggtcgcggaaagaatgcgcgtcgttcgtgcgtttcgtttgtcgcgtttggttattcgtagtcgtcgcgttcgtatttgattatggagtgcgtttttttgttcgcgtgtgttttttcggttgcgggttcgggttcgtcgaggggtttggcgggattggggcgcgtggttaaggtaggtgtcgtcgagcggagtttcgagagcgggtggtagggggcgttcgacgttagtttcgtcgcgttttttacgcgcgatgttatttttttttttgtaggcgttttagttgtgttgtttttgttgtgcgtcggtcgtcgcggttttagttagtgatagtagtagcggcgttagcggattaaatgatggttcgtatttgttttttatttttaagaagggtttttcgtagtattttgattttttttttttttaaagagagaaa

SEQ ID NO: 35054 - DNA, 797 bp, Artificial Sequence
  chemically treated genomic DNA (Homo sapiens) CpG-island No: 35054
tttctctctttaaaaaaaaaaaaaatcaaaatactacgaaaaacccttcttaaaaataaaaaacaaatacgaaccatcatttaatccgctaacgccgctactactatcactaactaaaaccgcgacgaccgacgcacaacaaaaacaacacaactaaaacgcctacaaaaaaaaaaataacatcgcgcgtaaaaaacgcgacgaaactaacgtcgaacgccccctaccacccgctctcgaaactccgctcgacgacacctaccttaaccacgcgccccaatcccgccaaacccctcgacgaacccgaacccgcaaccgaaaaaacacacgcgaacaaaaaaacgcactccataatcaaatacgaacgcgacgactacgaataaccaaacgcgacaaacgaaacgcacgaacgacgcgcattctttccgcgaccccgaaactcgacgccccaaatacgactccaaataaaaaccgccgccgttcacatcgcaacgaaaacgcgctaaaacctcccctcctccgaccgcctacgcgccctcccttctcccgacgcgaacctaccgaactacaatttacgacaccccaaaaaatacgaaaaactccctaaaccgaaactaaaacgcaaacgattaaaaaactatcgatatctacccgcccgtctatacgtctatctatatcgatataaacgtctaaaacgataaaaaaaacaacgccaactaactcccccaacgcgccgaaaccgaacgcccgcctctccaccgcgcgataattaacgaccaacgactcccgaactcgtc

SEQ ID NO: 35055 - DNA, 797 bp, Artificial Sequence
  chemically treated genomic DNA (Homo sapiens) CpG-island No: 35055
tttttttttttgggggaaggaagggttaaagtgttgcgaaaggttttttttggggatggggggtaaatacgaattattatttaattcgttggcgtcgttgttgttgttattggttaaggtcgcggcgatcgacgtatagtagaggtagtatagttggagcgtttgtaagagaaaaggtgatatcgcgcgtgaggggcgcggcggggttggcgtcgggcgttttttgttattcgttttcggagtttcgttcggcggtatttgttttggttacgcgttttagtttcgttaggtttttcggcgggttcgaattcgtagtcgggaaggtatacgcgagtaggagggcgtattttatggttaggtgcggacgcggcggttgcgggtggttagacgcggtaggcggagcgtacgggcggcgcgtatttttttcgcggtttcggagttcggcgttttaggtgcggttttaggtgagagtcgtcgtcgtttatatcgtagcgggggcgcgttgggattttttttttttcggtcgtttgcgcgtttttttttttttcggcgcgggtttgtcgagttgtagtttgcggtattttagagggtacggggggttttttgggtcgggattggagcgtaaacggttgggagattgtcggtgtttgttcgttcgtttgtgcgtttgtttgtgtcggtgtgagcgtttgaggcgatggggaagatagcgttagttggtttttttagcgcgtcggagtcgagcgttcgtttttttatcgcgcggtgattggcgattagcggttttcgggttcgtt

SEQ ID NO: 35056 - DNA, 797 bp, Artificial Sequence
  chemically treated genomic DNA (Homo sapiens) CpG-island No: 35056
aacgaacccgaaaaccgctaatcgccaatcaccgcgcgataaaaaaacgaacgctcgactccgacgcgctaaaaaaaccaactaacgctatcttccccatcgcctcaaacgctcacaccgacacaaacaaacgcacaaacgaacgaacaaacaccgacaatctcccaaccgtttacgctccaatcccgacccaaaaaaccccccgtaccctctaaaataccgcaaactacaactcgacaaacccgcgccgaaaaaaaaaaaaacgcgcaaacgaccgaaaaaaaaaaaatcccaacgcgcccccgctacgatataaacgacgacgactctcacctaaaaccgcacctaaaacgccgaactccgaaaccgcgaaaaaaatacgcgccgcccgtacgctccgcctaccgcgtctaaccacccgcaaccgccgcgtccgcacctaaccataaaatacgccctcctactcgcgtataccttcccgactacgaattcgaacccgccgaaaaacctaacgaaactaaaacgcgtaaccaaaacaaataccgccgaacgaaactccgaaaacgaataacaaaaaacgcccgacgccaaccccgccgcgcccctcacgcgcgatatcaccttttctcttacaaacgctccaactatactacctctactatacgtcgatcgccgcgaccttaaccaataacaacaacaacgacgccaacgaattaaataataattcgtatttaccccccatccccaaaaaaaacctttcgcaacactttaacccttccttcccccaaaaaaaaaaa

SEQ ID NO: 35057 - DNA, 523 bp, Artificial Sequence
  chemically treated genomic DNA (Homo sapiens) CpG-island No: 35057
cgtcgggttaggcgtagaggcgaacgggaggcggcgttgtatcgtgttcgttttttttcggttcggtttcggttttagttttagttttagttttagtttcggtttcggtttcggttcgcgggcgttgcgttttcgcgtataggaggcggcggcggtttttagttatcggttttcgtcggcgagcgtacgatgtattgtttgggcgtcgagtatttggtaagcgttcgtagtttcggttttcgggggaggagtttcggggaagggtcgagtttttcgtttttacgtattttttttgtcggacgttttcgtttttttcgcgtttcggggatttcgttttcgtttagtattttggggttatttggcggggaggaatttggattttgttttagtgttggggcggaggcgggggagacgcgggtcgcggggcgtaaatttggggtcgtttttaggtgtatttttaggtaagtatttggcggtagggggtttaatattcgtttcgcgtagagtaggtgttttaaaggtt

SEQ ID NO: 35058 - DNA, 523 bp, Artificial Sequence
  chemically treated genomic DNA (Homo sapiens) CpG-island No: 35058
aacctttaaaacacctactctacgcgaaacgaatattaaaccccctaccgccaaatacttacctaaaaatacacctaaaaacgaccccaaatttacgccccgcgacccgcgtctcccccgcctccgccccaacactaaaacaaaatccaaattcctccccgccaaataaccccaaaatactaaacgaaaacgaaatccccgaaacgcgaaaaaaacgaaaacgtccgacaaaaaaaatacgtaaaaacgaaaaactcgacccttccccgaaactcctcccccgaaaaccgaaactacgaacgcttaccaaatactcgacgcccaaacaatacatcgtacgctcgccgacgaaaaccgataactaaaaaccgccgccgcctcctatacgcgaaaacgcaacgcccgcgaaccgaaaccgaaaccgaaactaaaactaaaactaaaactaaaaccgaaaccgaaccgaaaaaaaacgaacacgatacaacgccgcctcccgttcgcctctacgcctaacccgacg

SEQ ID NO: 35059 - DNA, 523 bp, Artificial Sequence
  chemically treated genomic DNA (Homo sapiens) CpG-island No: 35059
agtttttgaaatatttgttttgcgcggagcggatgttaagttttttgtcgttaagtgtttatttggaggtgtatttgaggacgattttaagtttgcgtttcgcggttcgcgtttttttcgttttcgttttagtattggagtagggtttaggttttttttcgttaggtggttttaaggtattaagcgggggcgggattttcgaggcgcgggaaaggcggaagcgttcggtagggaaggtgcgtgaaggcgggggattcgattttttttcggggtttttttttcgagggtcgaggttgcgagcgtttattaggtattcggcgtttaggtagtgtatcgtgcgttcgtcggcgggggtcggtgattgggagtcgtcgtcgttttttgtacgcggagacgtagcgttcgcgagtcggggtcggggtcggggttggggttggggttggggttggagtcggggtcgggtcggggaggggcgggtacggtgtagcgtcgtttttcgttcgtttttgcgtttggttcggcg

SEQ ID NO: 35060 - DNA, 523 bp, Artificial Sequence
  chemically treated genomic DNA (Homo sapiens) CpG-island No: 35060
cgccgaaccaaacgcaaaaacgaacgaaaaacgacgctacaccgtacccgcccctccccgacccgaccccgactccaaccccaaccccaaccccaaccccgaccccgaccccgactcgcgaacgctacgtctccgcgtacaaaaaacgacgacgactcccaatcaccgacccccgccgacgaacgcacgatacactacctaaacgccgaatacctaataaacgctcgcaacctcgaccctcgaaaaaaaaaccccgaaaaaaaatcgaatcccccgccttcacgcaccttccctaccgaacgcttccgcctttcccgcgcctcgaaaatcccgcccccgcttaataccttaaaaccacctaacgaaaaaaaacctaaaccctactccaatactaaaacgaaaacgaaaaaaacgcgaaccgcgaaacgcaaacttaaaatcgtcctcaaatacacctccaaataaacacttaacgacaaaaaacttaacatccgctccgcgcaaaacaaatatttcaaaaact

SEQ ID NO: 35061 - DNA, 983 bp, Artificial Sequence
  chemically treated genomic DNA (Homo sapiens) CpG-island No: 35061
tcgggagggattgttttcgggtttcgcggttagggttgcgttttttttttttcgggttttacgcgttttcggcggacgcggggatttttttatagtggtttcgtagttggggtaagggggatattttcggcgtcgcggagtcgcgagcggagcgagcgttcggggcgtatttgagtttttagtatttttcgcggtcgcggtaaatagtatgtgcgggcgttgcgggtttcgggtcggtattcgggttcggggatcggggatcggggatcggggatcggggcgttttcgcgttggtcgtcgtcggtatttatcgttgtgtttgtcgtatttttagtgatgggatatggtcgcgttggcggtcggggtagggtaggaatcggtatcgatttggcggcggcggtttgggcgtttgtattgtgtgttcgcgggtcgcgtcggtattagtttttataggttttcgttaatttcgtgttcgggggcggttcgggggagggggttcgggtggatttaggcgataaggggaggtggtgacgggcggaggtgaatttttcgcgttcggggcggggcgggtcgggcgggcgagttttcgggggcggggaaaacgttttttcggttggcgttcggcggggtttcggggtttcggggtttcggggtttttttttcgtcgttcggtttttttcggtttacggtagggtttcggtgttttgggttggtagcgaagttcggagttttgggcgtgcggcggttgcggtggtttttgggttttttcgtttaattcgggtcgcggagtttttacgcgtattttatttttttttcggttgcggagtttggcggcggcggggattgttcgggattcggattttcggcgtttttcgttttttgtttttattgtgatttgttttttggtttcggagttttttcgttttattcgcgtcggggtttttagcgcgaagggtttagtttttggtgttttcggtttgggg

SEQ ID NO: 35062 - DNA, 983 bp, Artificial Sequence
  chemically treated genomic DNA (Homo sapiens) CpG-island No: 35062
ccccaaaccgaaaacaccaaaaactaaacccttcgcgctaaaaaccccgacgcgaataaaacgaaaaaactccgaaaccaaaaaacaaatcacaataaaaacaaaaaacgaaaaacgccgaaaatccgaatcccgaacaatccccgccgccgccaaactccgcaaccgaaaaaaaaataaaatacgcgtaaaaactccgcgacccgaattaaacgaaaaaacccaaaaaccaccgcaaccgccgcacgcccaaaactccgaacttcgctaccaacccaaaacaccgaaaccctaccgtaaaccgaaaaaaaccgaacgacgaaaaaaaaaccccgaaaccccgaaaccccgaaaccccgccgaacgccaaccgaaaaaacgttttccccgcccccgaaaactcgcccgcccgacccgccccgccccgaacgcgaaaaattcacctccgcccgtcaccacctccccttatcgcctaaatccacccgaaccccctcccccgaaccgcccccgaacacgaaattaacgaaaacctataaaaactaataccgacgcgacccgcgaacacacaatacaaacgcccaaaccgccgccgccaaatcgataccgattcctaccctaccccgaccgccaacgcgaccatatcccatcactaaaaatacgacaaacacaacgataaataccgacgacgaccaacgcgaaaacgccccgatccccgatccccgatccccgatccccgaacccgaataccgacccgaaacccgcaacgcccgcacatactatttaccgcgaccgcgaaaaatactaaaaactcaaatacgccccgaacgctcgctccgctcgcgactccgcgacgccgaaaatatcccccttaccccaactacgaaaccactataaaaaaatccccgcgtccgccgaaaacgcgtaaaacccgaaaaaaaaaaaacgcaaccctaaccgcgaaacccgaaaacaatccctcccga

SEQ ID NO: 35063 - DNA, 983 bp, Artificial Sequence
  chemically treated genomic DNA (Homo sapiens) CpG-island No: 35063
ttttaggtcggggatattagagattgagtttttcgcgttggagatttcggcgcgggtggggcgggagggtttcggggttaagagataggttataatggggataggggacgaaaggcgtcgggggttcgggtttcgagtagttttcgtcgtcgttagatttcgtagtcgggagggggatggggtgcgcgtagaggtttcgcggttcgggttggacggaggagtttaggagttatcgtagtcgtcgtacgtttagagtttcgagtttcgttgttagtttaggatatcggggttttgtcgtgggtcgaggggagtcgggcggcgggagaggagtttcggagtttcggagtttcggagtttcgtcgggcgttagtcgagagggcgtttttttcgttttcggagattcgttcgttcggttcgtttcgtttcgagcgcggggagtttattttcgttcgttattatttttttttgtcgtttaggtttattcgagttttttttttcgggtcgttttcgagtacgaagttggcgggagtttataaaagttggtgtcggcgcgattcgcggatatatagtgtaggcgtttaagtcgtcgtcgttagatcggtgtcgatttttgttttgtttcgatcgttagcgcgattatgttttattattgggggtacggtaaatataacggtgagtgtcggcgacggttagcgcgggggcgtttcgattttcgattttcgattttcgattttcgagttcggatgtcggttcggggttcgtagcgttcgtatatgttgtttatcgcggtcgcggggagtgttggaggtttaggtgcgtttcgggcgttcgtttcgttcgcggtttcgcggcgtcggggatgttttttttgttttagttgcgaggttattgtggaggaattttcgcgttcgtcggaggcgcgtagggttcgagggaggggaggcgtagttttggtcgcgggattcgaggatagtttttttcgg

SEQ ID NO: 35064 - DNA, 983 bp, Artificial Sequence
  chemically treated genomic DNA (Homo sapiens) CpG-island No: 35064
ccgaaaaaaactatcctcgaatcccgcgaccaaaactacgcctcccctccctcgaaccctacgcgcctccgacgaacgcgaaaattcctccacaataacctcgcaactaaaacaaaaaaaacatccccgacgccgcgaaaccgcgaacgaaacgaacgcccgaaacgcacctaaacctccaacactccccgcgaccgcgataaacaacatatacgaacgctacgaaccccgaaccgacatccgaactcgaaaatcgaaaatcgaaaatcgaaaatcgaaacgcccccgcgctaaccgtcgccgacactcaccgttatatttaccgtacccccaataataaaacataatcgcgctaacgatcgaaacaaaacaaaaatcgacaccgatctaacgacgacgacttaaacgcctacactatatatccgcgaatcgcgccgacaccaacttttataaactcccgccaacttcgtactcgaaaacgacccgaaaaaaaaaactcgaataaacctaaacgacaaaaaaaaataataacgaacgaaaataaactccccgcgctcgaaacgaaacgaaccgaacgaacgaatctccgaaaacgaaaaaaacgccctctcgactaacgcccgacgaaactccgaaactccgaaactccgaaactcctctcccgccgcccgactcccctcgacccacgacaaaaccccgatatcctaaactaacaacgaaactcgaaactctaaacgtacgacgactacgataactcctaaactcctccgtccaacccgaaccgcgaaacctctacgcgcaccccatccccctcccgactacgaaatctaacgacgacgaaaactactcgaaacccgaacccccgacgcctttcgtcccctatccccattataacctatctcttaaccccgaaaccctcccgccccacccgcgccgaaatctccaacgcgaaaaactcaatctctaatatccccgacctaaaa

SEQ ID NO: 35065 - DNA, 1204 bp, Artificial Sequence
  chemically treated genomic DNA (Homo sapiens) CpG-island No: 35065
ttgcgtcgtgtttgttggaagttttcggtagttgttgaaattttcgtttcggaggtcgtttcggtaaattttgcggatgattttattacggcggaaagacgaaaaggaggtttttaggtattcgggatcgttcgtgtttcgttttttttttcgatgaagtttgacgcggtaggtttttcggtagggttaatgggacggtttggtggggtattgtcggttttttttagttatagataagtttcgcgtttcgattttttagcgtttttagacgttggatgtcgaggtttggttttttatagtcgtcgacgttttatgagcgaagttagttagatgttagtatcgttttcggtttcgtttcgagttagttttttttatattttcgttcggggtacgttttcggttcgtttttattttcgtttcgaatacgtttttagattggtttcgtttcgttttcgttcgtaatttcgtttcgatcggaagaagtcgcggtatttagcgtttatagggtcgggaatgggggtgtcgtcgttgtttagttagttttgcgttcgttgaggttcggttatcgtttcgttgtcgtcgcggcgttttcgtttcgttttttgttcgtatcgttttcggagttagggtcgagttttcgttatgtcggttcggcggttgttgttgttgttgacgttgttgttgttcggtttcggggtgagtgatcggggagcgtggggtggaggatagttcgcgacggtcgggtcggggtcggggtagcgtcgcggcgtcggggttggagttcgagttgggagcgcgacggcggcggttagatgtttcgtgagtttagtcgtgggaggttcgggtcgggcgtaggaggcggtatcgggtcgggagagtttttttgacgggagtcgcggttttatcgaggcgtcggtcgttcgaagagttttttaagttagcgcggttgttacgggtagcggtttttcggatttcgcgggttcgggcgtaatttcgtggcgttttgtacggtatttgggggttttagaaggtttcggtttgaggaggtcgtttatttgcgggattttttttttcgcgggcgggcgtcggcgttgtttggcgggggtcgcggaggagtcgaaagggcgttgggatttaggggaagggtttgttttgcgtttcgaatttttgtttgaattttttaaaaattcgaaaattttgggga

SEQ ID NO: 35066 - DNA, 1204 bp, Artificial Sequence
  chemically treated genomic DNA (Homo sapiens) CpG-island No: 35066
tccccaaaattttcgaatttttaaaaaattcaaacaaaaattcgaaacgcaaaacaaacccttcccctaaatcccaacgccctttcgactcctccgcgacccccgccaaacaacgccgacgcccgcccgcgaaaaaaaaaatcccgcaaataaacgacctcctcaaaccgaaaccttctaaaacccccaaataccgtacaaaacgccacgaaattacgcccgaacccgcgaaatccgaaaaaccgctacccgtaacaaccgcgctaacttaaaaaactcttcgaacgaccgacgcctcgataaaaccgcgactcccgtcaaaaaaactctcccgacccgataccgcctcctacgcccgacccgaacctcccacgactaaactcacgaaacatctaaccgccgccgtcgcgctcccaactcgaactccaaccccgacgccgcgacgctaccccgaccccgacccgaccgtcgcgaactatcctccaccccacgctccccgatcactcaccccgaaaccgaacaacaacaacgtcaacaacaacaacaaccgccgaaccgacataacgaaaactcgaccctaactccgaaaacgatacgaacaaaaaacgaaacgaaaacgccgcgacgacaacgaaacgataaccgaacctcaacgaacgcaaaactaactaaacaacgacgacacccccattcccgaccctataaacgctaaataccgcgacttcttccgatcgaaacgaaattacgaacgaaaacgaaacgaaaccaatctaaaaacgtattcgaaacgaaaataaaaacgaaccgaaaacgtaccccgaacgaaaatataaaaaaaactaactcgaaacgaaaccgaaaacgatactaacatctaactaacttcgctcataaaacgtcgacgactataaaaaaccaaacctcgacatccaacgtctaaaaacgctaaaaaatcgaaacgcgaaacttatctataactaaaaaaaaccgacaataccccaccaaaccgtcccattaaccctaccgaaaaacctaccgcgtcaaacttcatcgaaaaaaaaaacgaaacacgaacgatcccgaatacctaaaaacctccttttcgtctttccgccgtaataaaatcatccgcaaaatttaccgaaacgacctccgaaacgaaaatttcaacaactaccgaaaacttccaacaaacacgacgcaa

SEQ ID NO: 35067 - DNA, 1204 bp, Artificial Sequence
  chemically treated genomic DNA (Homo sapiens) CpG-island No: 35067
tttttaaagttttcgaatttttaaaaagtttaaataaggattcgaagcgtaggatagattttttttttggattttaacgttttttcggttttttcgcggttttcgttaggtagcgtcggcgttcgttcgcgaggaggagggtttcgtaggtgggcggtttttttaggtcggggttttttgggatttttaagtgtcgtgtaggacgttacgaagttgcgttcgagttcgcggggttcggggagtcgttgttcgtgatagtcgcgttggtttgggaggtttttcgggcggtcgacgtttcggtggggtcgcgattttcgttagggaagttttttcggttcggtgtcgttttttacgttcggttcgagttttttacggttgggtttacggggtatttggtcgtcgtcgtcgcgtttttagttcggattttagtttcggcgtcgcgacgttgtttcggtttcgattcggtcgtcgcgagttgttttttattttacgtttttcggttatttatttcgaggtcgggtagtagtagcgttagtagtagtagtagtcgtcgggtcggtatggcgaggattcggttttggtttcgggggcggtacggatagaggacggggcgggggcgtcgcgacgatagcgaggcggtgatcgagttttagcggacgtagaattgattaggtagcggcggtatttttattttcggttttataagcgttgggtgtcgcggtttttttcggtcggggcggagttgcgggcggggacggggcggggttaatttaggggcgtgttcggggcggagatgggggcgggtcgagggcgtgtttcgggcggggatgtgggaggggttggttcggggcggggtcgaaggcggtgttggtatttggttggtttcgtttatgaggcgtcggcggttgtaaaggattaggtttcggtatttagcgtttgggggcgttgggggatcgaggcgcgaagtttgtttgtggttgggaaagatcggtaatgttttattaggtcgttttattaattttgtcgagggatttgtcgcgttagattttatcggggaaaagggcgggatacgggcggtttcgggtgtttagaagtttttttttcgttttttcgtcgtggtggaattattcgtaaggtttatcgaggcgattttcggagcgaaggttttagtagttatcggaggtttttagtaaatacggcgtag

SEQ ID NO: 35068 - DNA, 1204 bp, Artificial Sequence
  chemically treated genomic DNA (Homo sapiens) CpG-island No: 35068
ctacgccgtatttactaaaaacctccgataactactaaaaccttcgctccgaaaatcgcctcgataaaccttacgaataattccaccacgacgaaaaaacgaaaaaaaaacttctaaacacccgaaaccgcccgtatcccgcccttttccccgataaaatctaacgcgacaaatccctcgacaaaattaataaaacgacctaataaaacattaccgatctttcccaaccacaaacaaacttcgcgcctcgatcccccaacgcccccaaacgctaaataccgaaacctaatcctttacaaccgccgacgcctcataaacgaaaccaaccaaataccaacaccgccttcgaccccgccccgaaccaacccctcccacatccccgcccgaaacacgccctcgacccgcccccatctccgccccgaacacgcccctaaattaaccccgccccgtccccgcccgcaactccgccccgaccgaaaaaaaccgcgacacccaacgcttataaaaccgaaaataaaaataccgccgctacctaatcaattctacgtccgctaaaactcgatcaccgcctcgctatcgtcgcgacgcccccgccccgtcctctatccgtaccgcccccgaaaccaaaaccgaatcctcgccataccgacccgacgactactactactactaacgctactactacccgacctcgaaataaataaccgaaaaacgtaaaataaaaaacaactcgcgacgaccgaatcgaaaccgaaacaacgtcgcgacgccgaaactaaaatccgaactaaaaacgcgacgacgacgaccaaataccccgtaaacccaaccgtaaaaaactcgaaccgaacgtaaaaaacgacaccgaaccgaaaaaacttccctaacgaaaatcgcgaccccaccgaaacgtcgaccgcccgaaaaacctcccaaaccaacgcgactatcacgaacaacgactccccgaaccccgcgaactcgaacgcaacttcgtaacgtcctacacgacacttaaaaatcccaaaaaaccccgacctaaaaaaaccgcccacctacgaaaccctcctcctcgcgaacgaacgccgacgctacctaacgaaaaccgcgaaaaaaccgaaaaaacgttaaaatccaaaaaaaaaatctatcctacgcttcgaatccttatttaaactttttaaaaattcgaaaactttaaaaa

SEQ ID NO: 35069 - DNA, 674 bp, Artificial Sequence
  chemically treated genomic DNA (Homo sapiens) CpG-island No: 35069
atttgttattggttaatggtagtaaagttcgtttattagcgttggtttgtttttttaaaagaacgttatcgacgtttttttgttttttagcgtttgtaggtttcgggaggttaggttgtatttttggcgggtcgtttggttgggtgggtttcggaggtcgtggttcgggagtagggaggcgtaggggggtcggtttgttgtgatgatattttaattaaagtacgtgttagattgttgacgcgggtgatgcgaattggagtttgagtttgttcgagcggagttgggagggggttggcgggcgggcgcgcgtatattcgttgatttattattttcgtttttgtagtttttagtcgaggacgtcggatgttatcgtttttgttgttttgttattttattttcgttaataaagtggtttgaatttaattttggtgtcggtgtgtgtcgttggcgacgcgttgtttttgagttttcgtcgagttttttcgtggcgtcgggggttaatttgtagcgttagagtatgtgtttgcgtataattggggtcgtttggtttttcgcgggcggtttttttaatcgcgagcgataagaagtaatttgattgttcggttgttaggttgggtaattttttagttgttttgttacgataggttttaattcgtaatattaaggttggaatg

SEQ ID NO: 35070 - DNA, 674 bp, Artificial Sequence
  chemically treated genomic DNA (Homo sapiens) CpG-island No: 35070
cattccaaccttaatattacgaattaaaacctatcgtaacaaaacaactaaaaaattacccaacctaacaaccgaacaatcaaattacttcttatcgctcgcgattaaaaaaaccgcccgcgaaaaaccaaacgaccccaattatacgcaaacacatactctaacgctacaaattaacccccgacgccacgaaaaaactcgacgaaaactcaaaaacaacgcgtcgccaacgacacacaccgacaccaaaattaaattcaaaccactttattaacgaaaataaaataacaaaacaacaaaaacgataacatccgacgtcctcgactaaaaactacaaaaacgaaaataataaatcaacgaatatacgcgcgcccgcccgccaaccccctcccaactccgctcgaacaaactcaaactccaattcgcatcacccgcgtcaacaatctaacacgtactttaattaaaatatcatcacaacaaaccgacccccctacgcctccctactcccgaaccacgacctccgaaacccacccaaccaaacgacccgccaaaaatacaacctaacctcccgaaacctacaaacgctaaaaaacaaaaaaacgtcgataacgttcttttaaaaaaacaaaccaacgctaataaacgaactttactaccattaaccaataacaaat

SEQ ID NO: 35071 - DNA, 674 bp, Artificial Sequence
  chemically treated genomic DNA (Homo sapiens) CpG-island No: 35071
tattttagttttggtattacggattgaggtttgtcgtggtaaaatagttggaaaattgtttagtttagtagtcggatagttaggttattttttgtcgttcgcggttaaaaaggtcgttcgcgggaggttaggcggttttagttatgcgtaagtatatgttttagcgttgtagattgattttcggcgttacgaggaagttcggcgggggtttaaagatagcgcgtcgttaacgatatatatcgatattagggttgggtttaaattattttattgacgggaatggggtggtaaagtagtaaggacgatgatattcgacgttttcggttgggagttataagaacgagagtgatagattagcgggtgtgcgcgcgttcgttcgttagtttttttttagtttcgttcgggtaggtttagattttagttcgtattattcgcgttagtagtttaatacgtgttttaattggaatgttattatagtaggtcggtttttttacgtttttttgttttcgagttacgattttcggggtttatttagttagacgattcgttaggaatataatttgatttttcggaatttgtaggcgttgaaagataggggagcgtcgatggcgtttttttaaaggagtagattagcgttgatgggcgggttttattgttattaattaatagtaagt

SEQ ID NO: 35072 - DNA, 674 bp, Artificial Sequence
  chemically treated genomic DNA (Homo sapiens) CpG-island No: 35072
acttactattaattaataacaataaaacccgcccatcaacgctaatctactcctttaaaaaaacgccatcgacgctcccctatctttcaacgcctacaaattccgaaaaatcaaattatattcctaacgaatcgtctaactaaataaaccccgaaaatcgtaactcgaaaacaaaaaaacgtaaaaaaaccgacctactataataacattccaattaaaacacgtattaaactactaacgcgaataatacgaactaaaatctaaacctacccgaacgaaactaaaaaaaaactaacgaacgaacgcgcgcacacccgctaatctatcactctcgttcttataactcccaaccgaaaacgtcgaatatcatcgtccttactactttaccaccccattcccgtcaataaaataatttaaacccaaccctaatatcgatatatatcgttaacgacgcgctatctttaaacccccgccgaacttcctcgtaacgccgaaaatcaatctacaacgctaaaacatatacttacgcataactaaaaccgcctaacctcccgcgaacgacctttttaaccgcgaacgacaaaaaataacctaactatccgactactaaactaaacaattttccaactattttaccacgacaaacctcaatccgtaataccaaaactaaaata

SEQ ID NO: 35073 - DNA, 606 bp, Artificial Sequence
  chemically treated genomic DNA (Homo sapiens) CpG-island No: 35073
tttcgcgttagggaggggtcggagtcgtcgtcgaggtcgtcgagcgtagaaagtgcgcgaaagggacgcgttgcgagttttatacgtgacggcgtcgcgtcgaatcgagcgggatttggcggtagcggcggcgggcgtagcggggcggttcggagcggcgcgggcggtttggagtttcgggagcggcgcgcgcggtttcggtttagcggtttttttggtttcgcgttgtatatttttttttggcggcggcgttatttgtagtagcgttcgttcgaatatggcgatacggagtagtaggagggagtcgcgattttcgtttttatttattttggtcgtattgttgtcgttcggagttttttgcgaagtttggacgtagaggttgtacggcggtagcgcgtttttgttttaggatcggggttttttcgtggtgtagggcgattcgcgcgagttgcggttgtgggcgcgcggggatgttaggggggcgagtcgcgcggacgagaagtcgtttcggaggaaacggagcgttgttttgtagttcgagtttattaaggtgtacggataggtgagtagttttgtaattcgtttttttttagttttttttttttt

SEQ ID NO: 35074 - DNA, 606 bp, Artificial Sequence
  chemically treated genomic DNA (Homo sapiens) CpG-island No: 35074
aaaaaaaaaaaaactaaaaaaaaacgaattacaaaactactcacctatccgtacaccttaataaactcgaactacaaaacaacgctccgtttcctccgaaacgacttctcgtccgcgcgactcgcccccctaacatccccgcgcgcccacaaccgcaactcgcgcgaatcgccctacaccacgaaaaaaccccgatcctaaaacaaaaacgcgctaccgccgtacaacctctacgtccaaacttcgcaaaaaactccgaacgacaacaatacgaccaaaataaataaaaacgaaaatcgcgactccctcctactactccgtatcgccatattcgaacgaacgctactacaaataacgccgccgccaaaaaaaaatatacaacgcgaaaccaaaaaaaccgctaaaccgaaaccgcgcgcgccgctcccgaaactccaaaccgcccgcgccgctccgaaccgccccgctacgcccgccgccgctaccgccaaatcccgctcgattcgacgcgacgccgtcacgtataaaactcgcaacgcgtccctttcgcgcactttctacgctcgacgacctcgacgacgactccgacccctccctaacgcgaaa

SEQ ID NO: 35075 - DNA, 606 bp, Artificial Sequence
  chemically treated genomic DNA (Homo sapiens) CpG-island No: 35075
ggagaggaaaaaattggagggaggcgggttgtaaaattgtttatttgttcgtatattttgatgggttcgggttgtagggtagcgtttcgtttttttcggagcggtttttcgttcgcgcggttcgtttttttggtattttcgcgcgtttatagtcgtagttcgcgcgggtcgttttgtattacgaggaagtttcggttttggggtaagggcgcgttgtcgtcgtgtagtttttgcgtttagatttcgtagagagtttcgggcggtagtagtgcgattagggtgaataggaacgggagtcgcgatttttttttgttgtttcgtgtcgttatgttcgggcgaacgttattgtaggtggcgtcgtcgttaggagagaatgtgtagcgcgaggttaggagagtcgttgggtcgggatcgcgcgcgtcgttttcggggttttaggtcgttcgcgtcgtttcgggtcgtttcgttgcgttcgtcgtcgttgtcgttaggtttcgttcggttcggcgcggcgtcgttacgtgtgaggttcgtagcgcgtttttttcgcgtattttttgcgttcggcggtttcggcggcgatttcggtttttttttggcgcgggg

SEQ ID NO: 35076 - DNA, 606 bp, Artificial Sequence
  chemically treated genomic DNA (Homo sapiens) CpG-island No: 35076
ccccgcgccaaaaaaaaaccgaaatcgccgccgaaaccgccgaacgcaaaaaatacgcgaaaaaaacgcgctacgaacctcacacgtaacgacgccgcgccgaaccgaacgaaacctaacgacaacgacgacgaacgcaacgaaacgacccgaaacgacgcgaacgacctaaaaccccgaaaacgacgcgcgcgatcccgacccaacgactctcctaacctcgcgctacacattctctcctaacgacgacgccacctacaataacgttcgcccgaacataacgacacgaaacaacaaaaaaaaatcgcgactcccgttcctattcaccctaatcgcactactaccgcccgaaactctctacgaaatctaaacgcaaaaactacacgacgacaacgcgcccttaccccaaaaccgaaacttcctcgtaatacaaaacgacccgcgcgaactacgactataaacgcgcgaaaataccaaaaaaacgaaccgcgcgaacgaaaaaccgctccgaaaaaaacgaaacgctaccctacaacccgaacccatcaaaatatacgaacaaataaacaattttacaacccgcctccctccaattttttcctctcc

SEQ ID NO: 35077 - DNA, 542 bp, Artificial Sequence
  chemically treated genomic DNA (Homo sapiens) CpG-island No: 35077
gggcgggcgaggggagttcgattcgaattggttgtttttttttgattacgattaattcggagcgcgcgcgtttttttgtttgggaggatttttgatagttacgggcggtcgggcggagtcgcgcggatagaacgaggagttcgacgagaggatagtttcgtttttcgtagtttagtgttttttttcggggattgttttgttaggttatgttttcgtgggcggtcgttttagcgttgttattggcggcgttcgttttgttttttttgcgattttggaagcgcgttgtcggagcgcgaattttagttcgggattacgaggagtaggaggtggcgagcggaggtttcgcggattagtttagcgatcggcgcgaagcgtttttcggaggttgtagttttatttgtaagtcgtcggcgttggtttagtgtttgttgcgcgttttgcgacgttcggcggcgttggaatttagttttcgtttttggttgtcgggattttatttgtaaattttttgttattttattttgttagtcgggttcgggtttgag

SEQ ID NO: 35078 - DNA, 542 bp, Artificial Sequence
  chemically treated genomic DNA (Homo sapiens) CpG-island No: 35078
ctcaaacccgaacccgactaacaaaataaaataacaaaaaatttacaaataaaatcccgacaaccaaaaacgaaaactaaattccaacgccgccgaacgtcgcaaaacgcgcaacaaacactaaaccaacgccgacgacttacaaataaaactacaacctccgaaaaacgcttcgcgccgatcgctaaactaatccgcgaaacctccgctcgccacctcctactcctcgtaatcccgaactaaaattcgcgctccgacaacgcgcttccaaaatcgcaaaaaaaacaaaacgaacgccgccaataacaacgctaaaacgaccgcccacgaaaacataacctaacaaaacaatccccgaaaaaaaacactaaactacgaaaaacgaaactatcctctcgtcgaactcctcgttctatccgcgcgactccgcccgaccgcccgtaactatcaaaaatcctcccaaacaaaaaaacgcgcgcgctccgaattaatcgtaatcaaaaaaaaacaaccaattcgaatcgaactcccctcgcccgccc

SEQ ID NO: 35079 - DNA, 542 bp, Artificial Sequence
  chemically treated genomic DNA (Homo sapiens) CpG-island No: 35079
tttaggttcgggttcgattggtaggatgaagtggtagaaggtttgtaggtggggtttcgatagttaggagcgggggttgggttttagcgtcgtcgagcgtcgtagagcgcgtagtaggtattgggttagcgtcgacggtttgtaaatgaggttgtagttttcggggagcgtttcgcgtcggtcgttgaattgattcgcggggttttcgttcgttattttttgtttttcgtggtttcggattgaggttcgcgtttcgatagcgcgtttttagggtcgtaggaggagtaaggcgagcgtcgttagtagtagcgttagagcggtcgtttacggaggtatggtttggtaggatagttttcggagggaggtattgggttgcggggagcggagttgttttttcgtcgggtttttcgttttgttcgcgcggtttcgttcggtcgttcgtggttgttaagagtttttttaagtaggagggcgcgcgcgtttcggattggtcgtggttaggaggagatagttagttcgggtcgagtttttttcgttcgttt

SEQ ID NO: 35080 - DNA, 542 bp, Artificial Sequence
  chemically treated genomic DNA (Homo sapiens) CpG-island No: 35080
aaacgaacgaaaaaaactcgacccgaactaactatctcctcctaaccacgaccaatccgaaacgcgcgcgccctcctacttaaaaaaactcttaacaaccacgaacgaccgaacgaaaccgcgcgaacaaaacgaaaaacccgacgaaaaaacaactccgctccccgcaacccaatacctccctccgaaaactatcctaccaaaccatacctccgtaaacgaccgctctaacgctactactaacgacgctcgccttactcctcctacgaccctaaaaacgcgctatcgaaacgcgaacctcaatccgaaaccacgaaaaacaaaaaataacgaacgaaaaccccgcgaatcaattcaacgaccgacgcgaaacgctccccgaaaactacaacctcatttacaaaccgtcgacgctaacccaatacctactacgcgctctacgacgctcgacgacgctaaaacccaacccccgctcctaactatcgaaaccccacctacaaaccttctaccacttcatcctaccaatcgaacccgaacctaaa

SEQ ID NO: 35081 - DNA, 714 bp, Artificial Sequence
  chemically treated genomic DNA (Homo sapiens) CpG-island No: 35081
cgaatttttttcgtttttcgtaggttagcggaacgttacggttacggtcgtcgttcgggtttttttttttttttaagtttttttttaaggttcgtttttcgttcgcgtttttcgtcgtattcgggagcgggaaacgcggtcgtcgggcgcgcggggttacggtgtaggtcgtttttttcgtggtcgttttttttttttattttaatcgttttcgttttttattttagggattcgttcggggtcgcgcggtcgttatcgggttatataatttcggcgcggcgcggcgcggagggggaggggcggcgggcggcggtcgttcgtagtgcgggggggattcggaaaagggtcgtagagggtttcggggtagtcgggtcggcgtgtcgtgtggttttcggtattttttttttttcgttttttcgtcggtcggagtcggtgataggaattagtttttaatatggcggataggaagcggtttcgcgaggaggagagaatattttagtttcgtcggtttcgaggcgagcgggttaggggcgtcggtttgcggagaagttttcgcggatagataacggggttcggacgcgtaagacgggcgtttaggggtggaaatgattcgagggacgatagggttttttatatatttagacggtaaattttaaggttataggtgggttcggggcggcgggtgagcgaggacgtttttttaatttagttttt

SEQ ID NO: 35082 - DNA, 714 bp, Artificial Sequence
  chemically treated genomic DNA (Homo sapiens) CpG-island No: 35082
aaaaactaaattaaaaaaacgtcctcgctcacccgccgccccgaacccacctataaccttaaaatttaccgtctaaatatataaaaaaccctatcgtccctcgaatcatttccacccctaaacgcccgtcttacgcgtccgaaccccgttatctatccgcgaaaacttctccgcaaaccgacgcccctaacccgctcgcctcgaaaccgacgaaactaaaatattctctcctcctcgcgaaaccgcttcctatccgccatattaaaaactaattcctatcaccgactccgaccgacgaaaaaacgaaaaaaaaaaaataccgaaaaccacacgacacgccgacccgactaccccgaaaccctctacgacccttttccgaatcccccccgcactacgaacgaccgccgcccgccgcccctccccctccgcgccgcgccgcgccgaaattatataacccgataacgaccgcgcgaccccgaacgaatccctaaaataaaaaacgaaaacgattaaaataaaaaaaaaaaacgaccacgaaaaaaacgacctacaccgtaaccccgcgcgcccgacgaccgcgtttcccgctcccgaatacgacgaaaaacgcgaacgaaaaacgaaccttaaaaaaaaacttaaaaaaaaaaaaaaacccgaacgacgaccgtaaccgtaacgttccgctaacctacgaaaaacgaaaaaaattcg

SEQ ID NO: 35083 - DNA, 714 bp, Artificial Sequence
  chemically treated genomic DNA (Homo sapiens) CpG-island No: 35083
gagggttaagttgaggaagcgttttcgtttattcgtcgtttcgagtttatttgtggttttggggtttgtcgtttgggtgtgtgggggattttatcgtttttcgggttatttttatttttaaacgttcgttttgcgcgttcggatttcgttgtttgttcgcgagggttttttcgtaggtcggcgtttttggttcgttcgtttcggagtcggcgaggttggaatgttttttttttttcgcggggtcgttttttgttcgttatgttggaagttgatttttgttatcgatttcggtcggcggaggagcggagggggaagggtgtcgaaggttatacggtacgtcggttcggttgtttcgggattttttgcggttttttttcgggtttttttcgtattgcgggcggtcgtcgttcgtcgttttttttttttcgcgtcgcgtcgcgtcggggttgtgtaattcggtggcggtcgcgcggtttcgggcgggtttttggggtgaggggcgggggcggttggggtgggggagggaagcggttacgaggggagcggtttgtatcgtggtttcgcgcgttcgacggtcgcgtttttcgttttcgggtgcggcgggaggcgcgggcggggagcgggttttgaagaggagtttgaagggggaaggaggttcgggcggcggtcgtggtcgtagcgtttcgttggtttgcgaggggcgagggggattcg

SEQ ID NO: 35084 - DNA, 714 bp, Artificial Sequence
  chemically treated genomic DNA (Homo sapiens) CpG-island No: 35084
cgaatccccctcgcccctcgcaaaccaacgaaacgctacgaccacgaccgccgcccgaacctccttcccccttcaaactcctcttcaaaacccgctccccgcccgcgcctcccgccgcacccgaaaacgaaaaacgcgaccgtcgaacgcgcgaaaccacgatacaaaccgctcccctcgtaaccgcttccctcccccaccccaaccgcccccgcccctcaccccaaaaacccgcccgaaaccgcgcgaccgccaccgaattacacaaccccgacgcgacgcgacgcgaaaaaaaaaaaacgacgaacgacgaccgcccgcaatacgaaaaaaacccgaaaaaaaaccgcaaaaaatcccgaaacaaccgaaccgacgtaccgtataaccttcgacacccttccccctccgctcctccgccgaccgaaatcgataacaaaaatcaacttccaacataacgaacaaaaaacgaccccgcgaaaaaaaaaaaacattccaacctcgccgactccgaaacgaacgaaccaaaaacgccgacctacgaaaaaaccctcgcgaacaaacaacgaaatccgaacgcgcaaaacgaacgtttaaaaataaaaataacccgaaaaacgataaaatcccccacacacccaaacgacaaaccccaaaaccacaaataaactcgaaacgacgaataaacgaaaacgcttcctcaacttaaccctc

SEQ ID NO: 35085 - DNA, 597 bp, Artificial Sequence
  chemically treated genomic DNA (Homo sapiens) CpG-island No: 35085
ggggggcgcgagcgggggttcggggtcgcgagttggggttcggggagcgcgagcgggggttcggggggcgggggtcgcgggtcgcgaggggggcgggggtcgcgagggggcggggcgtgcgagggggcgggggcgtgcgagggggcgggggcgcgcgagggggcggggcgcgcgagggggcggggcgcgcgagggggcggggcgcgcgagggggcggggcgcgcgagggggcggggcgcgcgagggggcggggcgcgcgagggggcggggcgcgcgagggggcggggcgcgcgagggggcggggcgcgtcgggttcgtttttttcgcggcgtttagtggtagtagggagggtcggtgagatgttagagtaaggtagggttttgtatttggggatcgttgacgtttgggtttttttttcgcggttgttagcgttgcgtggttcgagatttgcggtcgggcggggattaaggttgtttttcggagggtttcggtcgcgtggtcgttttgttagagcggttgatgttaggtagtgttgggaggcgttgtttttcgggttcgttttttttttgttgttttaattttgtatttttttcgggt

SEQ ID NO: 35086 - DNA, 597 bp, Artificial Sequence
  chemically treated genomic DNA (Homo sapiens) CpG-island No: 35086
acccgaaaaaaatacaaaattaaaacaacaaaaaaaaaacgaacccgaaaaacaacgcctcccaacactacctaacatcaaccgctctaacaaaacgaccacgcgaccgaaaccctccgaaaaacaaccttaatccccgcccgaccgcaaatctcgaaccacgcaacgctaacaaccgcgaaaaaaaaacccaaacgtcaacgatccccaaatacaaaaccctaccttactctaacatctcaccgaccctccctactaccactaaacgccgcgaaaaaaacgaacccgacgcgccccgccccctcgcgcgccccgccccctcgcgcgccccgccccctcgcgcgccccgccccctcgcgcgccccgccccctcgcgcgccccgccccctcgcgcgccccgccccctcgcgcgccccgccccctcgcgcgccccgccccctcgcgcgcccccgccccctcgcacgcccccgccccctcgcacgccccgccccctcgcgacccccgcccccctcgcgacccgcgacccccgccccccgaacccccgctcgcgctccccgaaccccaactcgcgaccccgaacccccgctcgcgcccccc

SEQ ID NO: 35087 - DNA, 597 bp, Artificial Sequence
  chemically treated genomic DNA (Homo sapiens) CpG-island No: 35087
attcgggagagatgtagagttaggataataggagagaagcgaattcggagagtaacgttttttagtattgtttgatattaatcgttttggtagggcgattacgcggtcggggtttttcggaaagtagttttaattttcgttcgatcgtaggtttcgggttacgtagcgttaatagtcgcgggagggggatttaaacgttagcggtttttaaatataggattttattttgttttggtattttatcggttttttttgttgttattgagcgtcgcggagaggacgagttcggcgcgtttcgttttttcgcgcgtttcgttttttcgcgcgtttcgttttttcgcgcgtttcgttttttcgcgcgtttcgttttttcgcgcgtttcgttttttcgcgcgtttcgttttttcgcgcgtttcgttttttcgcgcgtttcgttttttcgcgcgttttcgttttttcgtacgttttcgttttttcgtacgtttcgttttttcgcggttttcgtttttttcgcggttcgcggttttcgtttttcggattttcgttcgcgtttttcggattttagttcgcggtttcggattttcgttcgcgtttttt

SEQ ID NO: 35088 - DNA, 597 bp, Artificial Sequence
  chemically treated genomic DNA (Homo sapiens) CpG-island No: 35088
aaaaaacgcgaacgaaaatccgaaaccgcgaactaaaatccgaaaaacgcgaacgaaaatccgaaaaacgaaaaccgcgaaccgcgaaaaaaacgaaaaccgcgaaaaaacgaaacgtacgaaaaaacgaaaacgtacgaaaaaacgaaaacgcgcgaaaaaacgaaacgcgcgaaaaaacgaaacgcgcgaaaaaacgaaacgcgcgaaaaaacgaaacgcgcgaaaaaacgaaacgcgcgaaaaaacgaaacgcgcgaaaaaacgaaacgcgcgaaaaaacgaaacgcgcgaaaaaacgaaacgcgccgaactcgtcctctccgcgacgctcaataacaacaaaaaaaaccgataaaataccaaaacaaaataaaatcctatatttaaaaaccgctaacgtttaaatccccctcccgcgactattaacgctacgtaacccgaaacctacgatcgaacgaaaattaaaactactttccgaaaaaccccgaccgcgtaatcgccctaccaaaacgattaatatcaaacaatactaaaaaacgttactctccgaattcgcttctctcctattatcctaactctacatctctcccgaat

SEQ ID NO: 35089 - DNA, 1063 bp, Artificial Sequence
  chemically treated genomic DNA (Homo sapiens) CpG-island No: 35089
tatgttttcgaatagtttttgtttatcgatcgtacgttttttgggtatgttcgggtagcggtgatttttagttatattttttattagttcggtttcgggtaggcgagcgcgttgtttatcggttattttcgttacgttttttttattttttttattttagttataataatataataatcgtagttatcgcgcggtacgtggaaaggttattttttagtgggttttgtagaaagtaattagatagcggaaggttacgagaaacgttggtgaagttaaatcgatttcgggagcgtagcggtttcggattttttttggaagtttttttcgcgttttcgcgcgtttatttggaggcgtcgcgtttttcgtttgttaagtcggttttcggtttttgttcgtgttttgggttttcggcgggtagcggcggagggaggttaggcgcggtatcgtttttcgtagttgtacgagttatttcgaggtcgcggggtgggcgggcgcgagttaggcgcgcggggttgtggggatttgtcggcgttattgacgttttcgcgcggtatatcgcgttcggttggttcgggaggggattcgatttattcgaagcgttttgttagttgttcggttcggtttcggtcgttgtcgtcgtcgttgaatttttttttttgcgcggtcgtcgcggattcggttttatttttcgtttcggtagtcgcggagtttttagggatttcgggggcggggagtagcggcggcggcggcggttcgggcgggcgggcgtaatagcggttaagtttggcgtttcgtcgtagggtaggttcggcgggggcggttaaggtcgggttggggtcgcggttggtcgcgtattttcgcgttatttacggtttttttgtagtgcgtttttgcgttcgtcggagcggcgttttggtcgaagtttgttattttcggaaggggtcgcgttcggatattaggggcggtttacgcgtgattggatattaagagtcggagaagtttagagattaggatattgtggcgtggttcgagttgtaggagagaggtgtttaatttttatggg

SEQ ID NO: 35090 - DNA, 1063 bp, Artificial Sequence
  chemically treated genomic DNA (Homo sapiens) CpG-island No: 35090
cccataaaaattaaacacctctctcctacaactcgaaccacgccacaatatcctaatctctaaacttctccgactcttaatatccaatcacgcgtaaaccgcccctaatatccgaacgcgaccccttccgaaaataacaaacttcgaccaaaacgccgctccgacgaacgcaaaaacgcactacaaaaaaaccgtaaataacgcgaaaatacgcgaccaaccgcgaccccaacccgaccttaaccgcccccgccgaacctaccctacgacgaaacgccaaacttaaccgctattacgcccgcccgcccgaaccgccgccgccgccgctactccccgcccccgaaatccctaaaaactccgcgactaccgaaacgaaaaataaaaccgaatccgcgacgaccgcgcaaaaaaaaaaattcaacgacgacgacaacgaccgaaaccgaaccgaacaactaacaaaacgcttcgaataaatcgaatcccctcccgaaccaaccgaacgcgatataccgcgcgaaaacgtcaataacgccgacaaatccccacaaccccgcgcgcctaactcgcgcccgcccaccccgcgacctcgaaataactcgtacaactacgaaaaacgataccgcgcctaacctccctccgccgctacccgccgaaaacccaaaacacgaacaaaaaccgaaaaccgacttaacaaacgaaaaacgcgacgcctccaaataaacgcgcgaaaacgcgaaaaaaacttccaaaaaaaatccgaaaccgctacgctcccgaaatcgatttaacttcaccaacgtttctcgtaaccttccgctatctaattactttctacaaaacccactaaaaaataacctttccacgtaccgcgcgataactacgattattatattattataactaaaataaaaaaaataaaaaaaacgtaacgaaaataaccgataaacaacgcgctcgcctacccgaaaccgaactaataaaaaatataactaaaaatcaccgctacccgaacatacccaaaaaacgtacgatcgataaacaaaaactattcgaaaacata

SEQ ID NO: 35091 - DNA, 1063 bp, Artificial Sequence
  chemically treated genomic DNA (Homo sapiens) CpG-island No: 35091
tttatggagattggatattttttttttgtaattcgggttacgttatagtgttttagtttttaaattttttcggtttttggtgtttagttacgcgtaaatcgtttttggtgttcgagcgcggtttttttcgagagtgataggtttcggttagggcgtcgtttcgacgggcgtagggacgtattgtagagaggtcgtgggtgacgcggaggtacgcggttaatcgcgattttagttcggttttggtcgttttcgtcggatttattttgcggcggggcgttaggtttggtcgttgttgcgttcgttcgttcgagtcgtcgtcgtcgtcgttgtttttcgttttcggggtttttggaggtttcgcggttgtcggagcgggaggtggagtcgagttcgcggcggtcgcgtaggagggaaagtttagcgacggcggtagcggtcggagtcgggtcgggtagttagtagggcgtttcgggtgagtcgggttttttttcgggttagtcgggcgcggtgtgtcgcgcgggggcgttagtggcgtcggtagatttttatagtttcgcgcgtttagttcgcgttcgtttatttcgcgatttcggggtggttcgtgtagttgcggaggacggtgtcgcgtttggttttttttcgtcgttgttcgtcgggggtttagggtacgggtaggggtcggggatcggtttggtaggcggagggcgcggcgtttttaggtgggcgcgcggggacgcggagggagtttttagggagggttcggggtcgttgcgttttcggggtcggtttggttttattagcgtttttcgtggtttttcgttgtttgattgttttttgtaaaatttattgaaaagtagtttttttacgtgtcgcgcgatgattgcggttattgtattattgtggttgggatggagagggtggagggggcgtgacgagggtggtcggtgggtagcgcgttcgtttgttcgggatcgggttagtgggggatgtggttgagggttatcgttgttcgaatatgtttaggggacgtgcgatcggtgggtagaagttgttcgagggtatg

SEQ ID NO: 35092 - DNA, 1063 bp, Artificial Sequence
  chemically treated genomic DNA (Homo sapiens) CpG-island No: 35092
cataccctcgaacaacttctacccaccgatcgcacgtcccctaaacatattcgaacaacgataaccctcaaccacatcccccactaacccgatcccgaacaaacgaacgcgctacccaccgaccaccctcgtcacgccccctccaccctctccatcccaaccacaataatacaataaccgcaatcatcgcgcgacacgtaaaaaaactacttttcaataaattttacaaaaaacaatcaaacaacgaaaaaccacgaaaaacgctaataaaaccaaaccgaccccgaaaacgcaacgaccccgaaccctccctaaaaactccctccgcgtccccgcgcgcccacctaaaaacgccgcgccctccgcctaccaaaccgatccccgacccctacccgtaccctaaacccccgacgaacaacgacgaaaaaaaaccaaacgcgacaccgtcctccgcaactacacgaaccaccccgaaatcgcgaaataaacgaacgcgaactaaacgcgcgaaactataaaaatctaccgacgccactaacgcccccgcgcgacacaccgcgcccgactaacccgaaaaaaaacccgactcacccgaaacgccctactaactacccgacccgactccgaccgctaccgccgtcgctaaactttccctcctacgcgaccgccgcgaactcgactccacctcccgctccgacaaccgcgaaacctccaaaaaccccgaaaacgaaaaacaacgacgacgacgacgactcgaacgaacgaacgcaacaacgaccaaacctaacgccccgccgcaaaataaatccgacgaaaacgaccaaaaccgaactaaaatcgcgattaaccgcgtacctccgcgtcacccacgacctctctacaatacgtccctacgcccgtcgaaacgacgccctaaccgaaacctatcactctcgaaaaaaaccgcgctcgaacaccaaaaacgatttacgcgtaactaaacaccaaaaaccgaaaaaatttaaaaactaaaacactataacgtaacccgaattacaaaaaaaaaatatccaatctccataaa

SEQ ID NO: 35093 - DNA, 1077 bp, Artificial Sequence
  chemically treated genomic DNA (Homo sapiens) CpG-island No: 35093
ggggaaagtcggggttttgaaaatagtagcgataaaggtaggcggggtcgcggtcgcgtttcgagggtttcggcggagtttatttggggcgtacgaggtcggtcgggttagtagtagtagttagaggttaggaagtagtagtttcgggcggcggcggcgggcgtagcgggcggaaggtcgtcggtcgttcggtttcggggttagcgcgatttcggcgcggggttttttttttatggtcgcgtttcggcgtcggcgtcgcgttttcggtattttcggtcggcgtttcggttcggtttcgcggtttagcggttttcgggttcgggaggggcggtcgttgcggttgcggttgggacggggcgtcgcgtatcggcgcggagggaggtcggagaggcgggggcgggtcgggtcggaatcgaggataggggcgttagtcgtacgttcgttttgtcgtttcgtttttttcggagtttcggagtcgttgttcggtaacgcgcgggttcgggcgcgggacggcgagtattttttttcggtcggtcggacgtttgtttgtttgtttgtttgtttgtttgcggggcggtcggggtagcgtgcgcggggttcggcgcggtagaggcggtaagggcggcgaggcggcgcggtttagtttttttttaggattcgtttttcggagggagcgcgaggggttcggggggtttgggtcgggcggtgtcgtttcgattcgtatttaatttcgggtttcgtcgcgcgtttttcggggcgttcggattagggtaggtcggtaagtcgggggaggggttttttcgtttttttcgttttttttttttcgtcgattttttgcgggtagtaggtgtgtggggcgtcgcgtttttaggatagtttcggggtcgcggaggggataaagttagataaagtcgggtttttgcgttagagtttagcgtgtaaggtaggggcgagtagagcgtacgtagttttttttcgtttttttgttttaagaaggtgcggttatttttgcgggttttcgggaagcgattttgcgtttagggtttgggaggttcgcgggattttgtatttagtagg

SEQ ID NO: 35094 - DNA, 1077 bp, Artificial Sequence
  chemically treated genomic DNA (Homo sapiens) CpG-island No: 35094
cctactaaatacaaaatcccgcgaacctcccaaaccctaaacgcaaaatcgcttcccgaaaacccgcaaaaataaccgcaccttcttaaaacaaaaaaacgaaaaaaaactacgtacgctctactcgcccctaccttacacgctaaactctaacgcaaaaacccgactttatctaactttatcccctccgcgaccccgaaactatcctaaaaacgcgacgccccacacacctactacccgcaaaaaatcgacgaaaaaaaaaaaacgaaaaaaacgaaaaaacccctcccccgacttaccgacctaccctaatccgaacgccccgaaaaacgcgcgacgaaacccgaaattaaatacgaatcgaaacgacaccgcccgacccaaaccccccgaacccctcgcgctccctccgaaaaacgaatcctaaaaaaaaactaaaccgcgccgcctcgccgcccttaccgcctctaccgcgccgaaccccgcgcacgctaccccgaccgccccgcaaacaaacaaacaaacaaacaaacaaacgtccgaccgaccgaaaaaaaatactcgccgtcccgcgcccgaacccgcgcgttaccgaacaacgactccgaaactccgaaaaaaacgaaacgacaaaacgaacgtacgactaacgcccctatcctcgattccgacccgacccgcccccgcctctccgacctccctccgcgccgatacgcgacgccccgtcccaaccgcaaccgcaacgaccgcccctcccgaacccgaaaaccgctaaaccgcgaaaccgaaccgaaacgccgaccgaaaataccgaaaacgcgacgccgacgccgaaacgcgaccataaaaaaaaaaccccgcgccgaaatcgcgctaaccccgaaaccgaacgaccgacgaccttccgcccgctacgcccgccgccgccgcccgaaactactacttcctaacctctaactactactactaacccgaccgacctcgtacgccccaaataaactccgccgaaaccctcgaaacgcgaccgcgaccccgcctacctttatcgctactattttcaaaaccccgactttcccc

SEQ ID NO: 35095 - DNA, 1077 bp, Artificial Sequence
  chemically treated genomic DNA (Homo sapiens) CpG-island No: 35095
tttgttaagtgtagggtttcgcgggttttttaggttttgagcgtagggtcgtttttcgaagattcgtagaggtggtcgtatttttttaaggtaggaaggcgggggagagttgcgtgcgttttgttcgtttttgttttgtacgttgagttttagcgtaggagttcgattttgtttggttttgtttttttcgcggtttcgaggttgttttgagagcgcggcgttttatatatttgttgttcgtaaggagtcggcgggagaggaggagcgagggaggcgagaggatttttttttcggtttgtcggtttattttgattcgggcgtttcggggaacgcgcggcgggattcggggttgggtgcgggtcggggcggtatcgttcggtttaggtttttcgagtttttcgcgtttttttcggaaggcgggttttgggggagggttgggtcgcgtcgtttcgtcgtttttgtcgtttttgtcgcgtcgagtttcgcgtacgttgtttcggtcgtttcgtaggtaggtaggtaggtaggtaggtaggcgttcggtcggtcgggagggggtgttcgtcgtttcgcgttcgggttcgcgcgttgtcgggtagcggtttcgaggtttcgaagggggcggagcggtaaggcgggcgtgcggttggcgtttttgttttcggtttcggttcggttcgttttcgttttttcggttttttttcgcgtcggtgcgcggcgtttcgttttagtcgtagtcgtagcggtcgtttttttcggattcgagagtcgttgagtcgcgaggtcgggtcggggcgtcggtcgggaatgtcgggggcgcggcgtcgacgtcgaggcgcggttatggaggggaagtttcgcgtcggggtcgcgttggtttcggggtcgagcggtcgacggtttttcgttcgttgcgttcgtcgtcgtcgttcggggttgttgttttttggtttttggttgttgttgttggttcggtcggtttcgtgcgttttaggtaagtttcgtcgagattttcggaacgcggtcgcgatttcgtttgtttttatcgttgttgtttttaaaatttcggtttttttt

SEQ ID NO: 35096 - DNA, 1077 bp, Artificial Sequence
  chemically treated genomic DNA (Homo sapiens) CpG-island No: 35096
aaaaaaaaccgaaattttaaaaacaacaacgataaaaacaaacgaaatcgcgaccgcgttccgaaaatctcgacgaaacttacctaaaacgcacgaaaccgaccgaaccaacaacaacaaccaaaaaccaaaaaacaacaaccccgaacgacgacgacgaacgcaacgaacgaaaaaccgtcgaccgctcgaccccgaaaccaacgcgaccccgacgcgaaacttcccctccataaccgcgcctcgacgtcgacgccgcgcccccgacattcccgaccgacgccccgacccgacctcgcgactcaacgactctcgaatccgaaaaaaacgaccgctacgactacgactaaaacgaaacgccgcgcaccgacgcgaaaaaaaaccgaaaaaacgaaaacgaaccgaaccgaaaccgaaaacaaaaacgccaaccgcacgcccgccttaccgctccgcccccttcgaaacctcgaaaccgctacccgacaacgcgcgaacccgaacgcgaaacgacgaacaccccctcccgaccgaccgaacgcctacctacctacctacctacctacctacgaaacgaccgaaacaacgtacgcgaaactcgacgcgacaaaaacgacaaaaacgacgaaacgacgcgacccaaccctcccccaaaacccgccttccgaaaaaaacgcgaaaaactcgaaaaacctaaaccgaacgataccgccccgacccgcacccaaccccgaatcccgccgcgcgttccccgaaacgcccgaatcaaaataaaccgacaaaccgaaaaaaaaatcctctcgcctccctcgctcctcctctcccgccgactccttacgaacaacaaatatataaaacgccgcgctctcaaaacaacctcgaaaccgcgaaaaaaacaaaaccaaacaaaatcgaactcctacgctaaaactcaacgtacaaaacaaaaacgaacaaaacgcacgcaactctcccccgccttcctaccttaaaaaaatacgaccacctctacgaatcttcgaaaaacgaccctacgctcaaaacctaaaaaacccgcgaaaccctacacttaacaaa

SEQ ID NO: 35097 - DNA, 520 bp, Artificial Sequence
  chemically treated genomic DNA (Homo sapiens) CpG-island No: 35097
tgagtttcgaagttttagttcggatttaattcggtcgcgtcgcgtaggattcgggggggcgggcgggggtagtaatttttttggcgtgggcggttgagacgtttttatggagaggattttcgcgttttttcgtttagttgttggaagcgcgggggaggacgtttaggaaaggtttgcgggagggggtcgtttagtttcgcgttttcggttcggggtaggacgaagttttttttttcgtcgttttcgtttttagtaggacggttaggcgcgcggtagcgtttatagtttcgttcgtcgcgttttttattatagtttcgttggggtattgttagtatgtgcggcgtagagtgtagtgtcgtagttggtttcgcggttggtacggcgtaagcgtaagagaacggtatatttttagcgagtgcgtacggtatacgcggcgcgttggttcggttcgagttttcgtttatttgaagaacgcgtcgggcgagagtcgagcgttcgagtagtgggagtttagattcgt

SEQ ID NO: 35098 - DNA, 520 bp, Artificial Sequence
  chemically treated genomic DNA (Homo sapiens) CpG-island No: 35098
acgaatctaaactcccactactcgaacgctcgactctcgcccgacgcgttcttcaaataaacgaaaactcgaaccgaaccaacgcgccgcgtataccgtacgcactcgctaaaaatataccgttctcttacgcttacgccgtaccaaccgcgaaaccaactacgacactacactctacgccgcacatactaacaataccccaacgaaactataataaaaaacgcgacgaacgaaactataaacgctaccgcgcgcctaaccgtcctactaaaaacgaaaacgacgaaaaaaaaaacttcgtcctaccccgaaccgaaaacgcgaaactaaacgaccccctcccgcaaacctttcctaaacgtcctcccccgcgcttccaacaactaaacgaaaaaacgcgaaaatcctctccataaaaacgtctcaaccgcccacgccaaaaaaattactacccccgcccgcccccccgaatcctacgcgacgcgaccgaattaaatccgaactaaaacttcgaaactca

SEQ ID NO: 35099 - DNA, 520 bp, Artificial Sequence
  chemically treated genomic DNA (Homo sapiens) CpG-island No: 35099
gcgaatttagatttttattattcgagcgttcggttttcgttcggcgcgttttttagatgaacgagagttcggatcgagttagcgcgtcgcgtgtgtcgtgcgtattcgttggaggtgtgtcgtttttttgcgtttgcgtcgtattagtcgcgaggttagttgcgatattgtattttgcgtcgtatatgttggtagtgttttaacgggattgtggtgagaggcgcggcgggcgggattgtgggcgttgtcgcgcgtttggtcgttttgttggaagcgggagcgacgggaaggggggtttcgttttgtttcgggtcggggacgcggggttggacgattttttttcgtaggttttttttgggcgttttttttcgcgtttttagtagttgggcggaaaggcgcgaaggttttttttatggagacgttttaatcgtttacgttagaaaagttgttgttttcgttcgttttttcggattttgcgcgacgcggtcgggttaaattcggattgggatttcggagttta

SEQ ID NO: 35100 - DNA, 520 bp, Artificial Sequence
  chemically treated genomic DNA (Homo sapiens) CpG-island No: 35100
taaactccgaaatcccaatccgaatttaacccgaccgcgtcgcgcaaaatccgaaaaaacgaacgaaaacaacaacttttctaacgtaaacgattaaaacgtctccataaaaaaaaccttcgcgcctttccgcccaactactaaaaacgcgaaaaaaaacgcccaaaaaaaacctacgaaaaaaaatcgtccaaccccgcgtccccgacccgaaacaaaacgaaaccccccttcccgtcgctcccgcttccaacaaaacgaccaaacgcgcgacaacgcccacaatcccgcccgccgcgcctctcaccacaatcccgttaaaacactaccaacatatacgacgcaaaatacaatatcgcaactaacctcgcgactaatacgacgcaaacgcaaaaaaacgacacacctccaacgaatacgcacgacacacgcgacgcgctaactcgatccgaactctcgttcatctaaaaaacgcgccgaacgaaaaccgaacgctcgaataataaaaatctaaattcgc

SEQ ID NO: 35101 - DNA, 656 bp, Artificial Sequence
  chemically treated genomic DNA (Homo sapiens) CpG-island No: 35101
  unsure (213)
acgatttgcgtaggcgtggtttgaggaaacgttcgttgtggcgagttattcgaaaggtttcggtcgggggcgggaataggatcggttcgcgggttggcgtcgataggttgtcgtagagatagggcgggttttgttaagcgacgcgtttcgtcgtggggcggtgtttgcgtttgagtttttacgagagggaaggaacgttgtttcgagtttcgncgtcgcgtcgcgtagattcgcgtcgtcgtcgattttagaggcggggtcggaagcgttacggtttgattttcgagtttttttgttttcgaaggggcggtcgtttttttttcgattcgtttcgtttttttttttttttttttattattcggaggtcgaagtttttagttagggcggggcggcgtagttcgagttttcggattcggaagaagcgttatttttcgtttttattatggagtttatcgtatcgttttttatcgaggaggattttattgaagtgaagaaggacgtgagtaacgtagttgtgtttagggcgggcgggggcggttgtagtttagcgggagacgaaagcggaagtttggagttcgaggataaggaggattttttaggtcggaggagcggaaagttttagtataggaggattgtggcgagttttgtattcgagg

SEQ ID NO: 35102 - DNA, 656 bp, Artificial Sequence
  chemically treated genomic DNA (Homo sapiens) CpG-island No: 35102
  unsure (444)
cctcgaatacaaaactcgccacaatcctcctatactaaaactttccgctcctccgacctaaaaaatcctccttatcctcgaactccaaacttccgctttcgtctcccgctaaactacaaccgcccccgcccgccctaaacacaactacgttactcacgtccttcttcacttcaataaaatcctcctcgataaaaaacgatacgataaactccataataaaaacgaaaaataacgcttcttccgaatccgaaaactcgaactacgccgccccgccctaactaaaaacttcgacctccgaataataaaaaaaaaaaaaaaaaaacgaaacgaatcgaaaaaaaaacgaccgccccttcgaaaacaaaaaaactcgaaaatcaaaccgtaacgcttccgaccccgcctctaaaatcgacgacgacgcgaatctacgcgacgcgacgncgaaactcgaaacaacgttccttccctctcgtaaaaactcaaacgcaaacaccgccccacgacgaaacgcgtcgcttaacaaaacccgccctatctctacgacaacctatcgacgccaacccgcgaaccgatcctattcccgcccccgaccgaaacctttcgaataactcgccacaacgaacgtttcctcaaaccacgcctacgcaaatcgt

SEQ ID NO: 35103 - DNA, 656 bp, Artificial Sequence
  chemically treated genomic DNA (Homo sapiens) CpG-island No: 35103
  unsure (444)
tttcggatgtagggttcgttatagtttttttgtgttaggatttttcgttttttcgatttggaggattttttttgttttcggattttaggttttcgttttcgtttttcgttgggttgtagtcgttttcgttcgttttgggtatagttgcgttatttacgtttttttttattttagtgaggtttttttcggtgagggacggtgcggtgggttttatggtggaggcgggagatggcgtttttttcgggttcgggagttcgggttgcgtcgtttcgttttggttgggggtttcggttttcgggtaatggggaagaaggagaggaggcggagcgggtcgggagaaagacggtcgttttttcgggaatagagggattcgggggttaaatcgtagcgttttcggtttcgtttttgaggtcgacggcgacgcgaatttacgcgacgcgacgncggagttcggagtagcgttttttttttttcgtagaggtttaggcgtaggtatcgttttacggcgaggcgcgtcgtttagtagagttcgttttgtttttgcggtagtttatcgacgttagttcgcgggtcgattttgttttcgttttcgatcggagtttttcgggtggttcgttatagcgggcgtttttttaagttacgtttgcgtaggtcgt

SEQ ID NO: 35104 - DNA, 656 bp, Artificial Sequence
  chemically treated genomic DNA (Homo sapiens) CpG-island No: 35104
  unsure (213)
acgacctacgcaaacgtaacttaaaaaaacgcccgctataacgaaccacccgaaaaactccgatcgaaaacgaaaacaaaatcgacccgcgaactaacgtcgataaactaccgcaaaaacaaaacgaactctactaaacgacgcgcctcgccgtaaaacgatacctacgcctaaacctctacgaaaaaaaaaaaacgctactccgaactccgncgtcgcgtcgcgtaaattcgcgtcgccgtcgacctcaaaaacgaaaccgaaaacgctacgatttaacccccgaatccctctattcccgaaaaaacgaccgtctttctcccgacccgctccgcctcctctccttcttccccattacccgaaaaccgaaacccccaaccaaaacgaaacgacgcaacccgaactcccgaacccgaaaaaaacgccatctcccgcctccaccataaaacccaccgcaccgtccctcaccgaaaaaaacctcactaaaataaaaaaaaacgtaaataacgcaactatacccaaaacgaacgaaaacgactacaacccaacgaaaaacgaaaacgaaaacctaaaatccgaaaacaaaaaaaatcctccaaatcgaaaaaacgaaaaatcctaacacaaaaaaactataacgaaccctacatccgaaa

SEQ ID NO: 35105 - DNA, 861 bp, Artificial Sequence
  chemically treated genomic DNA (Homo sapiens) CpG-island No: 35105
  unsure (519)
ttacgacgtatttgttgtgttagttggcgggtttggattatgtcgttttttagtagatcgcgacgaatttcgtcgattaagtttaggtcgtaggttttacgcgtatcggtaaggatttttgttatttttatggaggttttacgtacgcggaagaattgtataaagtcggagtcgaagtcggtaaagtgataggttaggttaaggttgagtagatgcgagtgtaagcgttttatttttagtagaatggcgcggattatttgcgtacgttttggtatttgaatatttatcgcgttttttatcgacgtggtgtaggcggtgttgtgggtaaagtcgtagatttcgtatatacggttagagaggaaggttatttcgttataattttatacggggttttcgttagtttttttatgtcgcgatggacgtagaatagatcggtagtcggcgtcgataatgttttcgtatcgacgaatacgacggaagtggttcggtttattagaagtgacgtgtagcggattaatncggtacgacgttgttttttttgtcgtttagtatcgttgatgaattcgtaggttttagtatcggtggtcggtgtcggacgttgacgataatttatgttgtttttacgtagcggataaagtttattcggttagttattcggtagtattagacgacgtttattcggtagattaatcggaattaaatcgtatatatcgcgtattttacgttcgttttatatcgtcgtcggaacgcgcggcgttacggacggatatttcggtttgttggcgttaatttcgacgcgaatcgtaatttaatatttagtgtttttttttatcgatagtacgtagtaaacggcgtaatgat

SEQ ID NO: 35106 - DNA, 861 bp, Artificial Sequence
  chemically treated genomic DNA (Homo sapiens) CpG-island No: 35106
  unsure (343)
atcattacgccgtttactacgtactatcgataaaaaaaaacactaaatattaaattacgattcgcgtcgaaattaacgccaacaaaccgaaatatccgtccgtaacgccgcgcgttccgacgacgatataaaacgaacgtaaaatacgcgatatatacgatttaattccgattaatctaccgaataaacgtcgtctaatactaccgaataactaaccgaataaactttatccgctacgtaaaaacaacataaattatcgtcaacgtccgacaccgaccaccgatactaaaacctacgaattcatcaacgatactaaacgacaaaaaaaacaacgtcgtaccgnattaatccgctacacgtcacttctaataaaccgaaccacttccgtcgtattcgtcgatacgaaaacattatcgacgccgactaccgatctattctacgtccatcgcgacataaaaaaactaacgaaaaccccgtataaaattataacgaaataaccttcctctctaaccgtatatacgaaatctacgactttacccacaacaccgcctacaccacgtcgataaaaaacgcgataaatattcaaataccaaaacgtacgcaaataatccgcgccattctactaaaaataaaacgcttacactcgcatctactcaaccttaacctaacctatcactttaccgacttcgactccgactttatacaattcttccgcgtacgtaaaacctccataaaaataacaaaaatccttaccgatacgcgtaaaacctacgacctaaacttaatcgacgaaattcgtcgcgatctactaaaaaacgacataatccaaacccgccaactaacacaacaaatacgtcgtaa

SEQ ID NO: 35107 - DNA, 861 bp, Artificial Sequence
  chemically treated genomic DNA (Homo sapiens) CpG-island No: 35107
  unsure (343)
gttattacgtcgtttattacgtgttgtcgatggagaagggtattaagtgttggattacggttcgcgtcgaagttgacgttaataaatcggaatattcgttcgtgacgtcgcgcgtttcggcggcggtgtggggcgagcgtgaagtgcgcgatatgtacggtttgatttcggttggtttgtcggatgaacgtcgtttggtgttgtcggatgattggtcggatgaattttattcgttgcgtaaagatagtatggattatcgttagcgttcggtatcgattatcgatgttgaaatttacgagtttattaacgatattgggcgataagaaaaataacgtcgtgtcgnattggttcgttgtacgttatttttgatgaatcgggttattttcgtcgtgttcgtcgatgcgaaaatattatcgacgtcgattatcggtttgttttacgtttatcgcggtatggaaaaattggcggaaatttcgtatggggttataacgaagtgatttttttttttgatcgtgtgtgcgggatttgcggttttgtttatagtatcgtttatattacgtcggtggaaaacgcgatgggtatttaggtgttagaacgtgcgtagatgattcgcgttattttgttggaggtagaacgtttgtattcgtatttgtttaattttggtttggtttgttattttatcggtttcgatttcggttttatgtagttttttcgcgtgcgtgaaatttttatgaaaatggtagagatttttatcggtgcgcgtaaaatttacggtttgaatttgatcggcgggattcgtcgcgatttgttgaaagacgatatgatttagattcgttagttggtataatagatgcgtcgtga

SEQ ID NO: 35108 - DNA, 861 bp, Artificial Sequence
  chemically treated genomic DNA (Homo sapiens) CpG-island No: 35108
  unsure (519)
tcacgacgcatctattataccaactaacgaatctaaatcatatcgtctttcaacaaatcgcgacgaatcccgccgatcaaattcaaaccgtaaattttacgcgcaccgataaaaatctctaccattttcataaaaatttcacgcacgcgaaaaaactacataaaaccgaaatcgaaaccgataaaataacaaaccaaaccaaaattaaacaaatacgaatacaaacgttctacctccaacaaaataacgcgaatcatctacgcacgttctaacacctaaatacccatcgcgttttccaccgacgtaatataaacgatactataaacaaaaccgcaaatcccgcacacacgatcaaaaaaaaaaatcacttcgttataaccccatacgaaatttccgccaatttttccataccgcgataaacgtaaaacaaaccgataatcgacgtcgataatattttcgcatcgacgaacacgacgaaaataacccgattcatcaaaaataacgtacaacgaaccaatncgacacgacgttatttttcttatcgcccaatatcgttaataaactcgtaaatttcaacatcgataatcgataccgaacgctaacgataatccatactatctttacgcaacgaataaaattcatccgaccaatcatccgacaacaccaaacgacgttcatccgacaaaccaaccgaaatcaaaccgtacatatcgcgcacttcacgctcgccccacaccgccgccgaaacgcgcgacgtcacgaacgaatattccgatttattaacgtcaacttcgacgcgaaccgtaatccaacacttaatacccttctccatcgacaacacgtaataaacgacgtaataac

SEQ ID NO: 35109 - DNA, 572 bp, Artificial Sequence
  chemically treated genomic DNA (Homo sapiens) CpG-island No: 35109
gtttttttattagttacggttttattttcgggcgaggtttgttatcgattagtagtcgtttcgtttagttcggagtttttttaattttcgagtttaagtagatttcgttggttcgcggtttgtatttttcgtcgggtttacgttttttcggtcgtttagtaggagtttagttttcgttatcggagtcggtcgggagagggtataaaattatcgttatttaagggcggttgttattagagaggagcgaattttagattcgtttgtggaagagatttggggtcgttaaggaaacggcggggaggggagcgaggaggagagacgttgaggatttggcgtcggcgtcgtcgtcgtcgtcgtcgaaataaagagtaggaatttatttgggcgaatcggcgtttgaatttaaggggaggtcgaggtcgttgtggcgagagattataattcgggtcgggagggggggtggttacggtttttttttcgtttttttagtgcggggaatatgtagagtcggggggagattagtcgagaagataaatcgttgtttttttttttttttttttttttttttttta

SEQ ID NO: 35110 - DNA, 572 bp, Artificial Sequence
  chemically treated genomic DNA (Homo sapiens) CpG-island No: 35110
taaaaaaaaaaaaaaaaaaaaaaaaaaaaaacaacgatttatcttctcgactaatctccccccgactctacatattccccgcactaaaaaaacgaaaaaaaaaccgtaaccaccccccctcccgacccgaattataatctctcgccacaacgacctcgacctccccttaaattcaaacgccgattcgcccaaataaattcctactctttatttcgacgacgacgacgacgacgccgacgccaaatcctcaacgtctctcctcctcgctcccctccccgccgtttccttaacgaccccaaatctcttccacaaacgaatctaaaattcgctcctctctaataacaaccgcccttaaataacgataattttataccctctcccgaccgactccgataacgaaaactaaactcctactaaacgaccgaaaaaacgtaaacccgacgaaaaatacaaaccgcgaaccaacgaaatctacttaaactcgaaaattaaaaaaactccgaactaaacgaaacgactactaatcgataacaaacctcgcccgaaaataaaaccgtaactaataaaaaaac

SEQ ID NO: 35111 - DNA, 572 bp, Artificial Sequence
  chemically treated genomic DNA (Homo sapiens) CpG-island No: 35111
tgggagaaggaggaggaggaggaagaagaagtaacgatttgttttttcggttggttttttttcggttttatatgtttttcgtattgaggagacggaagaggagtcgtagttattttttttttcggttcggattatagtttttcgttatagcggtttcggtttttttttggatttagacgtcgattcgtttaggtaaatttttgttttttatttcggcggcggcggcggcggcgtcggcgttaggtttttagcgtttttttttttcgttttttttttcgtcgtttttttagcggttttaggttttttttataggcgagtttagagttcgtttttttttggtggtagtcgtttttgggtagcggtggttttgtattttttttcggtcggtttcggtggcggggattgggtttttgttgggcggtcggggaggcgtaggttcggcggagagtgtaggtcgcgggttagcggaatttatttgagttcggggattaggagagtttcgggttgagcggagcgattgttggtcggtgataggtttcgttcgggagtggagtcgtagttagtggggaggt

SEQ ID NO: 35112 - DNA, 572 bp, Artificial Sequence
  chemically treated genomic DNA (Homo sapiens) CpG-island No: 35112
acctccccactaactacgactccactcccgaacgaaacctatcaccgaccaacaatcgctccgctcaacccgaaactctcctaatccccgaactcaaataaattccgctaacccgcgacctacactctccgccgaacctacgcctccccgaccgcccaacaaaaacccaatccccgccaccgaaaccgaccgaaaaaaaatacaaaaccaccgctacccaaaaacgactaccaccaaaaaaaaacgaactctaaactcgcctataaaaaaaacctaaaaccgctaaaaaaacgacgaaaaaaaaaacgaaaaaaaaaaacgctaaaaacctaacgccgacgccgccgccgccgccgccgaaataaaaaacaaaaatttacctaaacgaatcgacgtctaaatccaaaaaaaaaccgaaaccgctataacgaaaaactataatccgaaccgaaaaaaaaaataactacgactcctcttccgtctcctcaatacgaaaaacatataaaaccgaaaaaaaaccaaccgaaaaaacaaatcgttacttcttcttcctcctcctcctccttctccca

SEQ ID NO: 35113 - DNA, 620 bp, Artificial Sequence
  chemically treated genomic DNA (Homo sapiens) CpG-island No: 35113
ttttcgtcggcgttaaatattaataattatttttttttttttattttattttcgttatcgtcgtagtcgtcgttgtcgttatttgggttcgcgttttcggtcgcgtcgcgcggtattcgggtttagttagtcgggaggcggttagtttttttttacgttcgtttttttagggcggttgtggatgttgttagtattgtcgatgttttagagcgacgtttgttttgcgatataggcgggtcggtttttttttgtttttatttttttggaggtcgataggagcggggttcgagttcggtggtggtcgtgagcgtggggggtatttaggttcggacgggtttttaggtcgtcgacggcggcggttggaggtcgcgttggttgttttaggtcgtcgttagttttagggagtcgattttcgggcggttttatagaggacgttcgcgattcgatggcgatgatgttcgttttaaatggtgtttttgtagtcgggtggatggatggatcgtatattttgttttttgagagtcgggattttacgttcgattgcgtgttatttttgcggaataagaacgtaatttttggaggtgaagacgattgtcggttggattgaattggaatcgtgt

SEQ ID NO: 35114 - DNA, 620 bp, Artificial Sequence
  chemically treated genomic DNA (Homo sapiens) CpG-island No: 35114
acacgattccaattcaatccaaccgacaatcgtcttcacctccaaaaattacgttcttattccgcaaaaataacacgcaatcgaacgtaaaatcccgactctcaaaaaacaaaatatacgatccatccatccacccgactacaaaaacaccatttaaaacgaacatcatcgccatcgaatcgcgaacgtcctctataaaaccgcccgaaaatcgactccctaaaactaacgacgacctaaaacaaccaacgcgacctccaaccgccgccgtcgacgacctaaaaacccgtccgaacctaaataccccccacgctcacgaccaccaccgaactcgaaccccgctcctatcgacctccaaaaaaataaaaacaaaaaaaaaccgacccgcctatatcgcaaaacaaacgtcgctctaaaacatcgacaatactaacaacatccacaaccgccctaaaaaaacgaacgtaaaaaaaaactaaccgcctcccgactaactaaacccgaataccgcgcgacgcgaccgaaaacgcgaacccaaataacgacaacgacgactacgacgataacgaaaataaaataaaaaaaaaaaaataattattaatatttaacgccgacgaaaa

SEQ ID NO: 35115 - DNA, 620 bp, Artificial Sequence
  chemically treated genomic DNA (Homo sapiens) CpG-island No: 35115
atacgattttaatttaatttagtcgatagtcgtttttatttttaaaggttgcgtttttatttcgtagaaataatacgtagtcgggcgtaaggtttcggtttttaaaaggtaaggtgtacgatttatttatttattcggttgtagggatattatttaaaacgggtattatcgttatcgaatcgcgggcgttttttgtggggtcgttcggagatcggttttttaaagttaacgacgatttgggatagttagcgcggtttttagtcgtcgtcgtcggcgatttgagagttcgttcgggtttgagtgttttttacgtttacgattattatcgaattcgggtttcgtttttgtcggtttttaggaaaataaagatagaggagagtcggttcgtttgtgtcgtagggtaaacgtcgttttgaagtatcgataatattggtaatatttatagtcgttttgaggggacgggcgtagaggagagttggtcgtttttcggttggttgggttcgggtgtcgcgcggcgcggtcgaggacgcgagtttaagtggcggtagcggcggttgcggcggtggcggaagtggagtggggaagagggggtggttgttagtgtttggcgtcggcggagg

SEQ ID NO: 35116 - DNA, 620 bp, Artificial Sequence
  chemically treated genomic DNA (Homo sapiens) CpG-island No: 35116
cctccgccgacgccaaacactaacaaccaccccctcttccccactccacttccgccaccgccgcaaccgccgctaccgccacttaaactcgcgtcctcgaccgcgccgcgcgacacccgaacccaaccaaccgaaaaacgaccaactctcctctacgcccgtcccctcaaaacgactataaatattaccaatattatcgatacttcaaaacgacgtttaccctacgacacaaacgaaccgactctcctctatctttattttcctaaaaaccgacaaaaacgaaacccgaattcgataataatcgtaaacgtaaaaaacactcaaacccgaacgaactctcaaatcgccgacgacgacgactaaaaaccgcgctaactatcccaaatcgtcgttaactttaaaaaaccgatctccgaacgaccccacaaaaaacgcccgcgattcgataacgataatacccgttttaaataatatccctacaaccgaataaataaataaatcgtacaccttaccttttaaaaaccgaaaccttacgcccgactacgtattatttctacgaaataaaaacgcaacctttaaaaataaaaacgactatcgactaaattaaattaaaatcgtat

SEQ ID NO: 35117 - DNA, 569 bp, Artificial Sequence
  chemically treated genomic DNA (Homo sapiens) CpG-island No: 35117
ttttcgtaaatggatttattttggggagttgttcggttcgtttggattgtttacgggcgtattgacgttgtggggggaatgttttcgaattgggggtacgaggtcgggggaatcgtttttgagattcgggttagaagttacgagtttgggtttcgggggtgtatgtagacggcgtttagtttcgcgcggaatcgtcggcgggatcgggggtggggttcggaggttcgggggcggggtcggtcgggggcgggggcgggggcggggtcgcggtcgttgtagtagcgcgggtcgggttagggggcgtttcgcgcggtagcgattttggtaggcgttgtagtgaagttggattcgtaggcgggcgtgcgtggagcgggggtcgcggtcgcgtcgtagagatgtgattcgggtcgaaggttagttggagcgtcggcgttgcggggtcgcgggggtcggtaagtgcgagttgcgtcgatgtagtggaggacgttgtggggattttagaaatttttttcgtcgtggatttgggagaattggggggttcgttttttgtgtttttttaagcgtttttt

SEQ ID NO: 35118 - DNA, 569 bp, Artificial Sequence
  chemically treated genomic DNA (Homo sapiens) CpG-island No: 35118
aaaaaacgcttaaaaaaacacaaaaaacgaaccccccaattctcccaaatccacgacgaaaaaaatttctaaaatccccacaacgtcctccactacatcgacgcaactcgcacttaccgacccccgcgaccccgcaacgccgacgctccaactaaccttcgacccgaatcacatctctacgacgcgaccgcgacccccgctccacgcacgcccgcctacgaatccaacttcactacaacgcctaccaaaatcgctaccgcgcgaaacgccccctaacccgacccgcgctactacaacgaccgcgaccccgcccccgcccccgcccccgaccgaccccgcccccgaacctccgaaccccacccccgatcccgccgacgattccgcgcgaaactaaacgccgtctacatacacccccgaaacccaaactcgtaacttctaacccgaatctcaaaaacgattcccccgacctcgtacccccaattcgaaaacattccccccacaacgtcaatacgcccgtaaacaatccaaacgaaccgaacaactccccaaaataaatccatttacgaaaa

SEQ ID NO: 35119 - DNA, 569 bp, Artificial Sequence
  chemically treated genomic DNA (Homo sapiens) CpG-island No: 35119
ggggggcgtttagaaaaatataagaagcggattttttaatttttttaaatttacggcgggaaaagtttttggggtttttatagcgttttttattgtatcggcgtagttcgtatttatcgattttcgcggtttcgtagcgtcgacgttttagttggttttcggttcgagttatatttttgcggcgcggtcgcggttttcgttttacgtacgttcgtttgcgggtttagttttattgtagcgtttgttagagtcgttgtcgcgcgaggcgttttttggttcggttcgcgttgttgtagcggtcgcggtttcgttttcgttttcgttttcggtcggtttcgttttcgggttttcgagttttattttcggtttcgtcggcggtttcgcgcggggttaggcgtcgtttgtatgtattttcggagtttaagttcgtagtttttagttcggattttagagacgattttttcgatttcgtgtttttaattcggggatattttttttataacgttagtgcgttcgtaagtagtttagacgagtcgggtaattttttagggtagatttatttgcgggaa

SEQ ID NO: 35120 - DNA, 569 bp, Artificial Sequence
  chemically treated genomic DNA (Homo sapiens) CpG-island No: 35120
ttcccgcaaataaatctaccctaaaaaattacccgactcgtctaaactacttacgaacgcactaacgttataaaaaaaatatccccgaattaaaaacacgaaatcgaaaaaatcgtctctaaaatccgaactaaaaactacgaacttaaactccgaaaatacatacaaacgacgcctaaccccgcgcgaaaccgccgacgaaaccgaaaataaaactcgaaaacccgaaaacgaaaccgaccgaaaacgaaaacgaaaacgaaaccgcgaccgctacaacaacgcgaaccgaaccaaaaaacgcctcgcgcgacaacgactctaacaaacgctacaataaaactaaacccgcaaacgaacgtacgtaaaacgaaaaccgcgaccgcgccgcaaaaatataactcgaaccgaaaaccaactaaaacgtcgacgctacgaaaccgcgaaaatcgataaatacgaactacgccgatacaataaaaaacgctataaaaaccccaaaaacttttcccgccgtaaatttaaaaaaattaaaaaatccgcttcttatatttttctaaacgcccccc

SEQ ID NO: 35121 - DNA, 1126 bp, Artificial Sequence
  chemically treated genomic DNA (Homo sapiens) CpG-island No: 35121
gtgtcgttgcgttttttttttttttgcggttgtttttgcgttcgttttttttttcggttttttttcgggttttggtgtttgttcgtagttatcggtttttttttttttttcggttttttcgtttttttttttcgttatttttgttcgttttttttttttttcgtgtttcgttttgtttgttttcgttttttattttcgttttttttttttatttattttttcgtgtttttgcgtttgttgtgttcgttttttcgtttgagcgtttcgtcgtcggtgcgggttttttcgtgcgttttattcgcgttcgtcggtcggttcgcgcgtgtcgtgcgtcgttcgcgttttgcgtttttttcgttttgtttttcgtttttttgtgcgtttcggttttcgagcgtcgcgcgttttgcgttttggcgtcggtttgtttttcgtcgtgtttggttatttcgcgtgatttcgtcgtttcggcgtgcgtttttgcgtcgcgtcgtggtgcgttcggcgcgtcgtttttggcgtcgtttttattacgtttgtcgtttttgtgttcgtagttcgcgcggttgagtttgtttgtttcgtgttgtttttttgtttttttttttcgttcgttttgttcgtgttgtttttgtgtttttttcgcggtttcggtttgcgtggtcgtttttcgttttttcgcgtgtcggggttggtcgttttgttcgtttgttgtttttagttcgcgtttttcgtttttcgcgttttcgcgttcgcgtattttcgcggtcgtcgagttcgtgtcgtttcgacggcgcgcgttttttcgttcgtttcgtcgttcgtcgttttgttcgttttttttcgttgtttgcggttgtttgtcgtttcgttggttttttttttttttttttttttttttttcgcgcgtgttcgtttgtttcgtttttgttttttttttcgttgcgtttgtcgtcgtcggtgcgtgtgtttcgtgtttttgttgtcgcgtttttcgtgtttttcgtttggcggtcgtcgttcgttttttgtttcgcgtcgtttttgtgtgttttgttcggcgtttcgtttcgtttttttttcgtttttgttttttttttgttgtttcgtttcgcgtgttatttgt

SEQ ID NO: 35122 - DNA, 1126 bp, Artificial Sequence
  chemically treated genomic DNA (Homo sapiens) CpG-island No: 35122
acaaataacacgcgaaacgaaacaacaaaaaaaaaacaaaaacgaaaaaaaaacgaaacgaaacgccgaacaaaacacacaaaaacgacgcgaaacaaaaaacgaacgacgaccgccaaacgaaaaacacgaaaaacgcgacaacaaaaacacgaaacacacgcaccgacgacgacaaacgcaacgaaaaaaaaaacaaaaacgaaacaaacgaacacgcgcgaaaaaaaaaaaaaaaaaaaaaaaaaaaaccaacgaaacgacaaacaaccgcaaacaacgaaaaaaaacgaacaaaacgacgaacgacgaaacgaacgaaaaaacgcgcgccgtcgaaacgacacgaactcgacgaccgcgaaaatacgcgaacgcgaaaacgcgaaaaacgaaaaacgcgaactaaaaacaacaaacgaacaaaacgaccaaccccgacacgcgaaaaaacgaaaaacgaccacgcaaaccgaaaccgcgaaaaaaacacaaaaacaacacgaacaaaacgaacgaaaaaaaaaaacaaaaaaacaacacgaaacaaacaaactcaaccgcgcgaactacgaacacaaaaacgacaaacgtaataaaaacgacgccaaaaacgacgcgccgaacgcaccacgacgcgacgcaaaaacgcacgccgaaacgacgaaatcacgcgaaataaccaaacacgacgaaaaacaaaccgacgccaaaacgcaaaacgcgcgacgctcgaaaaccgaaacgcacaaaaaaacgaaaaacaaaacgaaaaaaacgcaaaacgcgaacgacgcacgacacgcgcgaaccgaccgacgaacgcgaataaaacgcacgaaaaaacccgcaccgacgacgaaacgctcaaacgaaaaaacgaacacaacaaacgcaaaaacacgaaaaaataaataaaaaaaaaaaacgaaaataaaaaacgaaaacaaacaaaacgaaacacgaaaaaaaaaaaaaacgaacaaaaataacgaaaaaaaaaaacgaaaaaaccgaaaaaaaaaaaaaaaccgataactacgaacaaacaccaaaacccgaaaaaaaaccgaaaaaaaaaacgaacgcaaaaacaaccgcaaaaaaaaaaaaaacgcaacgacac

SEQ ID NO: 35123 - DNA, 1126 bp, Artificial Sequence
  chemically treated genomic DNA (Homo sapiens) CpG-island No: 35123
gtaggtgatacgcgggacgaagtagtaagagaagaatagagacggaggggaggcggaacgaggcgtcggatagagtatatagaaacgacgcgagatagaagacgaacgacggtcgttaggcggagggtacgaaggacgcgataataggagtacgaggtatacgtatcgacgacggtagacgtaacgggagagagaatagaagcgaaatagacggatacgcgcggggagaaagagagaggaggagagggaagttaacgagacggtaggtaatcgtaaatagcggaaagaagcgagtagagcggcgagcggcgagacggacgaaaggacgcgcgtcgtcggagcggtacggattcgacggtcgcgaggatgcgcgagcgcggaggcgcgagagacgagaggcgcgaattgaaagtaataaacgagtagaacgattagtttcgatacgcgaaggagcgggaggcggttacgtaagtcgaggtcgcgagagagatatagggatagtacggataaggcggacggaaggaagagataggagagtagtacgagataggtaggtttagtcgcgcgggttacggatataggagcgataggcgtagtggagacgacgttaggggcgacgcgtcgagcgtattacgacgcggcgtaggagcgtacgtcggggcggcggggttacgcgaggtggttaagtacgacgggaggtagatcgacgttagggcgtaaggcgcgcgacgttcgggagtcgggacgtatagaaggacggagggtaggacgaaggagacgtaggacgcggacggcgtacgatacgcgcggatcggtcggcgggcgcgagtaggacgtacgagagagttcgtatcgacgacgaaacgtttaggcgagggagcgagtataataagcgtagaagtacgagaagatgagtggaggaagaaggcggagatgaaaggcgaagataggtagaacgagatacgaagaagggagggagcgaatagagatgacgggaggagagaacgaggagatcgagagagagagagaggtcggtagttgcggataggtattaaggttcgagagggagtcgggggaggaggcgagcgtaggggtagtcgtagggaggagaagggcgtagcgatat

SEQ ID NO: 35124 - DNA, 1126 bp, Artificial Sequence
  chemically treated genomic DNA (Homo sapiens) CpG-island No: 35124
atatcgctacgcccttctcctccctacgactacccctacgctcgcctcctcccccgactccctctcgaaccttaatacctatccgcaactaccgacctctctctctctctcgatctcctcgttctctcctcccgtcatctctattcgctccctcccttcttcgtatctcgttctacctatcttcgcctttcatctccgccttcttcctccactcatcttctcgtacttctacgcttattatactcgctccctcgcctaaacgtttcgtcgtcgatacgaactctctcgtacgtcctactcgcgcccgccgaccgatccgcgcgtatcgtacgccgtccgcgtcctacgtctccttcgtcctaccctccgtccttctatacgtcccgactcccgaacgtcgcgcgccttacgccctaacgtcgatctacctcccgtcgtacttaaccacctcgcgtaaccccgccgccccgacgtacgctcctacgccgcgtcgtaatacgctcgacgcgtcgcccctaacgtcgtctccactacgcctatcgctcctatatccgtaacccgcgcgactaaacctacctatctcgtactactctcctatctcttccttccgtccgccttatccgtactatccctatatctctctcgcgacctcgacttacgtaaccgcctcccgctccttcgcgtatcgaaactaatcgttctactcgtttattactttcaattcgcgcctctcgtctctcgcgcctccgcgctcgcgcatcctcgcgaccgtcgaatccgtaccgctccgacgacgcgcgtcctttcgtccgtctcgccgctcgccgctctactcgcttctttccgctatttacgattacctaccgtctcgttaacttccctctcctcctctctctttctccccgcgcgtatccgtctatttcgcttctattctctctcccgttacgtctaccgtcgtcgatacgtatacctcgtactcctattatcgcgtccttcgtaccctccgcctaacgaccgtcgttcgtcttctatctcgcgtcgtttctatatactctatccgacgcctcgttccgcctcccctccgtctctattcttctcttactacttcgtcccgcgtatcacctac

SEQ ID NO: 35125 - DNA, 870 bp, Artificial Sequence
  chemically treated genomic DNA (Homo sapiens) CpG-island No: 35125
gggcggttcggcgaggcggatcgcgtggcggcggcgtacgggtattttaatttgggttaggtgagtgcggtcggtttcgcgcgtttaaaattttttcggcggttttcgggcgcgcgaggggggcgttttcgtagttttgttcgttcggtttcggtttcgcgcgcgcgtgggaaggtttcgggatcgtttggggacggcgggcggtcggggcgtttgcggggggggggtgtcgttcgggggggcgtcgcgcgggatattcggcggggtgggggggattggggtttcgcgtggggcgtttacgtaggttcggcgcgtcgatcgtaagtttttcggtagtgtcgtttaatttcgcgttcggaagtgtggttttagaagtcggggcggcgcggatatttgtcgggtttcgggggagtttgggttgttttagcgtcgcgcgtcgttcgtcgttgggttttgggcgtttattcggttttttttcgcggagcggtttttttgttttcgacgggcggcgcgagtttcggattcggtgcgcgcgtaaggggtcggtcgttgtttgggtgatatgagcgtggttcggcgtttcggggattcgcgttttttcggtgttcgcggttttcgggggtagatggtcgggagtttgtattttggagttcggtcgtcgtcggagaggttttgggatagcgtagggtcgggggttttgggtttaaaatttttttaggagcggagggagggcgttttgtgtgggggtttttgtcgcggttttgatggtcgagcggtgtgatttttggtaagtcgtttttttgataagtttttttgtagttagtggtaatgtttatatcgttgggttgtcggaaagatttaatgttgcgt

SEQ ID NO: 35126 - DNA, 870 bp, Artificial Sequence
  chemically treated genomic DNA (Homo sapiens) CpG-island No: 35126
acgcaacattaaatctttccgacaacccaacgatataaacattaccactaactacaaaaaaacttatcaaaaaaacgacttaccaaaaatcacaccgctcgaccatcaaaaccgcgacaaaaacccccacacaaaacgccctccctccgctcctaaaaaaattttaaacccaaaacccccgaccctacgctatcccaaaacctctccgacgacgaccgaactccaaaatacaaactcccgaccatctacccccgaaaaccgcgaacaccgaaaaaacgcgaatccccgaaacgccgaaccacgctcatatcacccaaacaacgaccgaccccttacgcgcgcaccgaatccgaaactcgcgccgcccgtcgaaaacaaaaaaaccgctccgcgaaaaaaaaccgaataaacgcccaaaacccaacgacgaacgacgcgcgacgctaaaacaacccaaactcccccgaaacccgacaaatatccgcgccgccccgacttctaaaaccacacttccgaacgcgaaattaaacgacactaccgaaaaacttacgatcgacgcgccgaacctacgtaaacgccccacgcgaaaccccaatcccccccaccccgccgaatatcccgcgcgacgcccccccgaacgacaccccccccccgcaaacgccccgaccgcccgccgtccccaaacgatcccgaaaccttcccacgcgcgcgcgaaaccgaaaccgaacgaacaaaactacgaaaacgcccccctcgcgcgcccgaaaaccgccgaaaaaattttaaacgcgcgaaaccgaccgcactcacctaacccaaattaaaatacccgtacgccgccgccacgcgatccgcctcgccgaaccgccc

SEQ ID NO: 35127 - DNA, 870 bp, Artificial Sequence
  chemically treated genomic DNA (Homo sapiens) CpG-island No: 35127
acgtagtattagattttttcgataatttagcggtgtagatattgttattgattgtaaaggagtttgttaggggagcgatttgttaaaggttatatcgttcggttattagaatcgcggtagaagtttttatataaagcgtttttttttcgtttttggagaggttttaaatttaggattttcggttttgcgttgttttaaggttttttcgacggcggtcgggttttagggtgtaggttttcggttatttattttcgggagtcgcggatatcgagggagcgcgagttttcgagacgtcgggttacgtttatgttatttaagtagcggtcggttttttgcgcgcgtatcgggttcggagttcgcgtcgttcgtcgagggtagaggggtcgtttcgcgggggagagtcgggtgggcgtttaggatttagcggcggacggcgcgcgacgttgaggtagtttagattttttcggagttcggtaggtgttcgcgtcgtttcggtttttgaggttatattttcgagcgcggggttgggcggtattgtcgggggatttgcggtcggcgcgtcggatttgcgtgggcgttttacgcgggattttagttttttttatttcgtcgagtgtttcgcgcggcgttttttcgggcgatatttttttttcgtaggcgtttcggtcgttcgtcgtttttaagcggtttcggagtttttttacgcgcgcgcggggtcggggtcgggcggataggattgcggaggcgtttttttcgcgcgttcggaggtcgtcgggaaagttttgggcgcgcggggtcggtcgtatttatttggtttaagttgaggtattcgtgcgtcgtcgttacgcggttcgtttcgtcgggtcgttt

SEQ ID NO: 35128 - DNA, 870 bp, Artificial Sequence
  chemically treated genomic DNA (Homo sapiens) CpG-island No: 35128
aaacgacccgacgaaacgaaccgcgtaacgacgacgcacgaatacctcaacttaaaccaaataaatacgaccgaccccgcgcgcccaaaactttcccgacgacctccgaacgcgcgaaaaaaacgcctccgcaatcctatccgcccgaccccgaccccgcgcgcgcgtaaaaaaactccgaaaccgcttaaaaacgacgaacgaccgaaacgcctacgaaaaaaaaatatcgcccgaaaaaacgccgcgcgaaacactcgacgaaataaaaaaaactaaaatcccgcgtaaaacgcccacgcaaatccgacgcgccgaccgcaaatcccccgacaataccgcccaaccccgcgctcgaaaatataacctcaaaaaccgaaacgacgcgaacacctaccgaactccgaaaaaatctaaactacctcaacgtcgcgcgccgtccgccgctaaatcctaaacgcccacccgactctcccccgcgaaacgacccctctaccctcgacgaacgacgcgaactccgaacccgatacgcgcgcaaaaaaccgaccgctacttaaataacataaacgtaacccgacgtctcgaaaactcgcgctccctcgatatccgcgactcccgaaaataaataaccgaaaacctacaccctaaaacccgaccgccgtcgaaaaaaccttaaaacaacgcaaaaccgaaaatcctaaatttaaaacctctccaaaaacgaaaaaaaaacgctttatataaaaacttctaccgcgattctaataaccgaacgatataacctttaacaaatcgctcccctaacaaactcctttacaatcaataacaatatctacaccgctaaattatcgaaaaaatctaatactacgt

SEQ ID NO: 35129 - DNA, 961 bp, Artificial Sequence
  chemically treated genomic DNA (Homo sapiens) CpG-island No: 35129
gcgtagttttttttcgcgggtagcgtattatgttgttcgggtgggcgtttttgttgttgtgcgcgtttcgtttgtttttggtcgcggtcggtttcgtcgcgatatttgtttaggataaagtcgggtagttttcgattgttgtagtagtcgtttagtttcgtcggcggtagggggaggaggtgtaggagcgagtcgagtttttcggttattcgtattttttggcgtagcggcgtaggagtaaggggttggtgtagaatatcgattaattttatttcggcggcggtaaggtgggttatttcgtttacgcgggcggtcggaggttttttttggatttggagcgagatggttcggtgggtattgttggtttcgtgttcgtaggaggcgggacgagtgcgttttggcgttatcggagttattgtttttatcggggtatagtggacgttagttttcgttttttggttgtttttgatttttgtgggggtttcgacggttttttcgcggttaagtacgcgcgttatattttaaagttattgttgcgcggattttgggcggaggaagaaaaggggcgcgtgtacggggatgggttcgtacggattttgtacgtttatattcgcgagggttttagttttgaggttttgtcgtcgcgcgttagttgcgaaattttcgcgtttatatcggaggtttacgagtatgtttcggcgtatagtaattcgagcggacgcgtagtattggtttcgtagtttttggattagttcgttttttcgttcgttgggggtttaggatcgtagacgtggtggcggcggcggcgtcgttttatttttcgggttcgttaggtggagttgtttttggtggttgacgcgtttatggcgcggttgtatggtcggggtttgtagtattatttgttgattttggtttttatcgttaataggttgtatagttatgttagtatcgagaattatat

SEQ ID NO: 35130 - DNA, 961 bp, Artificial Sequence
  chemically treated genomic DNA (Homo sapiens) CpG-island No: 35130
atataattctcgatactaacataactatacaacctattaacgataaaaaccaaaatcaacaaataatactacaaaccccgaccatacaaccgcgccataaacgcgtcaaccaccaaaaacaactccacctaacgaacccgaaaaataaaacgacgccgccgccgccaccacgtctacgatcctaaacccccaacgaacgaaaaaacgaactaatccaaaaactacgaaaccaatactacgcgtccgctcgaattactatacgccgaaacatactcgtaaacctccgatataaacgcgaaaatttcgcaactaacgcgcgacgacaaaacctcaaaactaaaaccctcgcgaatataaacgtacaaaatccgtacgaacccatccccgtacacgcgccccttttcttcctccgcccaaaatccgcgcaacaataactttaaaatataacgcgcgtacttaaccgcgaaaaaaccgtcgaaacccccacaaaaatcaaaaacaaccaaaaaacgaaaactaacgtccactataccccgataaaaacaataactccgataacgccaaaacgcactcgtcccgcctcctacgaacacgaaaccaacaatacccaccgaaccatctcgctccaaatccaaaaaaaacctccgaccgcccgcgtaaacgaaataacccaccttaccgccgccgaaataaaattaatcgatattctacaccaaccccttactcctacgccgctacgccaaaaaatacgaataaccgaaaaactcgactcgctcctacacctcctccccctaccgccgacgaaactaaacgactactacaacaatcgaaaactacccgactttatcctaaacaaatatcgcgacgaaaccgaccgcgaccaaaaacaaacgaaacgcgcacaacaacaaaaacgcccacccgaacaacataatacgctacccgcgaaaaaaaactacgc

SEQ ID NO: 35131 - DNA, 961 bp, Artificial Sequence
  chemically treated genomic DNA (Homo sapiens) CpG-island No: 35131
atgtggttttcgatgttagtatggttgtatagtttattggcgatggaggttagggttagtaggtaatgttgtaggtttcggttatataatcgcgttatggacgcgttagttattaaaagtagttttatttggcgggttcgggagatggagcggcgtcgtcgtcgttattacgtttgcggttttgagtttttagcgggcgaaagagcggattggtttaaaagttgcgaggttaatgttgcgcgttcgttcgggttgttgtgcgtcggaatatgttcgtgggttttcggtgtggacgcgggggtttcgtagttggcgcgcggcggtagggttttaaagttgaagttttcgcgggtgtagacgtgtaggattcgtgcggatttattttcgtatacgcgtttttttttttttttcgtttagggttcgcgtagtagtggttttagggtgtagcgcgcgtgtttgatcgcgaagaagtcgtcgagatttttatagaggttaaagatagttagagagcggggattagcgtttattgtgtttcgatagaagtagtggtttcggtggcgttagggcgtattcgtttcgttttttgcgggtacgaagttagtaatgtttatcgaattatttcgttttaggtttaagaggaattttcggtcgttcgcgtagacgaggtagtttattttgtcgtcgtcggagtagagttggtcgatgttttgtattagttttttgtttttgcgtcgttgcgttagggggtgcgggtggtcgggaggttcggttcgtttttgtattttttttttttgtcgtcggcggggttgggcggttgttgtagtagtcggaggttgttcggttttattttgggtaggtgtcgcggcggggtcgatcgcggttaggggtaggcggaacgcgtatagtagtagggacgtttattcgagtagtatagtgcgttgttcgcggggaggggttgcgt

SEQ ID NO: 35132 - DNA, 961 bp, Artificial Sequence
  chemically treated genomic DNA (Homo sapiens) CpG-island No: 35132
acgcaacccctccccgcgaacaacgcactatactactcgaataaacgtccctactactatacgcgttccgcctacccctaaccgcgatcgaccccgccgcgacacctacccaaaataaaaccgaacaacctccgactactacaacaaccgcccaaccccgccgacgacaaaaaaaaaaaatacaaaaacgaaccgaacctcccgaccacccgcaccccctaacgcaacgacgcaaaaacaaaaaactaatacaaaacatcgaccaactctactccgacgacgacaaaataaactacctcgtctacgcgaacgaccgaaaattcctcttaaacctaaaacgaaataattcgataaacattactaacttcgtacccgcaaaaaacgaaacgaatacgccctaacgccaccgaaaccactacttctatcgaaacacaataaacgctaatccccgctctctaactatctttaacctctataaaaatctcgacgacttcttcgcgatcaaacacgcgcgctacaccctaaaaccactactacgcgaaccctaaacgaaaaaaaaaaaaaaacgcgtatacgaaaataaatccgcacgaatcctacacgtctacacccgcgaaaacttcaactttaaaaccctaccgccgcgcgccaactacgaaacccccgcgtccacaccgaaaacccacgaacatattccgacgcacaacaacccgaacgaacgcgcaacattaacctcgcaacttttaaaccaatccgctctttcgcccgctaaaaactcaaaaccgcaaacgtaataacgacgacgacgccgctccatctcccgaacccgccaaataaaactacttttaataactaacgcgtccataacgcgattatataaccgaaacctacaacattacctactaaccctaacctccatcgccaataaactatacaaccatactaacatcgaaaaccacat

SEQ ID NO: 35133 - DNA, 957 bp, Artificial Sequence
  chemically treated genomic DNA (Homo sapiens) CpG-island No: 35133
gcgttatggacgcgttagttattaaaagtagttttatttggcgggttcgggagatggagcggcgtcgtcgtcgttattacgtttgcggttttgagtttttagcgggcgaaagagcggattggtttaagagttgcgaggttagtgttgcgcgttcgttcgggttgttgtgcgtcggagtatgttcgtgggttttcggtgtggacgcgggggtttcgtagttggcgcgcggcggtagggtttcgaagttgaagttttcgcgggtgtagacgtgtaggattcgtgcggatttattttcgtatacgcgtttttttttttttttcgtttagggttcgcgtagtagtggttttagggtgtagcgcgcgtgtttgatcgcgaagaagtcgtcgagatttttatagaggttaaagatagttagagagcggggattagcgtttattgtgtttcgatagaagtagtggtttcggtggcgttagggcgtattcgtttcgttttttgcgggtacgaagttagtaatgtttatcgaattatttcgttttaggtttaagaggaattttcggtcgttcgcgtagacgaggtagttttttttgtcgtcgtcggagtagagttggtcgatgttttgtattagttttttgtttttgcgtcgttgcgttagggggtgcgggtggtcgggaggttcggttcgtttttgtattttttttttttgtcgtcggcggggttgggcggttgttgtagtagtcggaggttgttcggttttattttgggtaggtgtcgcggcggggtcgatcgcggttaggggtaggcggaacgcgtatagtagtagggacgtttattcgagtagtatagtgcgttgttcgcggggaggggttgcgcgattgggattttatgggtatttgttatttgttatgaagttaacggggcgggggatggggatatatatatatttgtttgtaggattga

SEQ ID NO: 35134 - DNA, 957 bp, Artificial Sequence
  chemically treated genomic DNA (Homo sapiens) CpG-island No: 35134
tcaatcctacaaacaaatatatatatatccccatcccccgccccgttaacttcataacaaataacaaatacccataaaatcccaatcgcgcaacccctccccgcgaacaacgcactatactactcgaataaacgtccctactactatacgcgttccgcctacccctaaccgcgatcgaccccgccgcgacacctacccaaaataaaaccgaacaacctccgactactacaacaaccgcccaaccccgccgacgacaaaaaaaaaaaatacaaaaacgaaccgaacctcccgaccacccgcaccccctaacgcaacgacgcaaaaacaaaaaactaatacaaaacatcgaccaactctactccgacgacgacaaaaaaaactacctcgtctacgcgaacgaccgaaaattcctcttaaacctaaaacgaaataattcgataaacattactaacttcgtacccgcaaaaaacgaaacgaatacgccctaacgccaccgaaaccactacttctatcgaaacacaataaacgctaatccccgctctctaactatctttaacctctataaaaatctcgacgacttcttcgcgatcaaacacgcgcgctacaccctaaaaccactactacgcgaaccctaaacgaaaaaaaaaaaaaaacgcgtatacgaaaataaatccgcacgaatcctacacgtctacacccgcgaaaacttcaacttcgaaaccctaccgccgcgcgccaactacgaaacccccgcgtccacaccgaaaacccacgaacatactccgacgcacaacaacccgaacgaacgcgcaacactaacctcgcaactcttaaaccaatccgctctttcgcccgctaaaaactcaaaaccgcaaacgtaataacgacgacgacgccgctccatctcccgaacccgccaaataaaactacttttaataactaacgcgtccataacgc

SEQ ID NO: 35135 - DNA, 957 bp, Artificial Sequence
  chemically treated genomic DNA (Homo sapiens) CpG-island No: 35135
ttaattttgtaagtaagtgtgtgtgtgtttttatttttcgtttcgttaattttatagtaaataataaatatttataaagttttagtcgcgtagttttttttcgcgggtagcgtattatgttgttcgggtgggcgtttttgttgttgtgcgcgtttcgtttgtttttggtcgcggtcggtttcgtcgcgatatttgtttaggataaagtcgggtagttttcgattgttgtagtagtcgtttagtttcgtcggcggtagggggaggaggtgtaggagcgagtcgagtttttcggttattcgtattttttggcgtagcggcgtaggagtaaggggttggtgtaaaatatcgattaattttatttcggcggcggtaaggggggttatttcgtttacgcgggcggtcggaggttttttttggatttggagcgagatggttcggtgggtattgttggtttcgtgttcgtaggaggcgggacgagtgcgttttggcgttatcggagttattgtttttatcggggtatagtggacgttagttttcgttttttggttgtttttgatttttgtgggggtttcgacggttttttcgcggttaagtacgcgcgttatattttaaagttattgttgcgcggattttgggcggaggaagaaaaggggcgcgtgtacggggatgggttcgtacggattttgtacgtttatattcgcgagggttttagtttcgaggttttgtcgtcgcgcgttagttgcgaaattttcgcgtttatatcggaggtttacgagtatgtttcggcgtatagtaattcgagcggacgcgtagtattggtttcgtagtttttggattagttcgttttttcgttcgttgggggtttaggatcgtaaacgtggtggcggcggcggcgtcgttttatttttcgggttcgttaggtggagttgtttttggtggttgacgcgtttatggcgt

SEQ ID NO: 35136 - DNA, 957 bp, Artificial Sequence
  chemically treated genomic DNA (Homo sapiens) CpG-island No: 35136
acgccataaacgcgtcaaccaccaaaaacaactccacctaacgaacccgaaaaataaaacgacgccgccgccgccaccacgtttacgatcctaaacccccaacgaacgaaaaaacgaactaatccaaaaactacgaaaccaatactacgcgtccgctcgaattactatacgccgaaacatactcgtaaacctccgatataaacgcgaaaatttcgcaactaacgcgcgacgacaaaacctcgaaactaaaaccctcgcgaatataaacgtacaaaatccgtacgaacccatccccgtacacgcgccccttttcttcctccgcccaaaatccgcgcaacaataactttaaaatataacgcgcgtacttaaccgcgaaaaaaccgtcgaaacccccacaaaaatcaaaaacaaccaaaaaacgaaaactaacgtccactataccccgataaaaacaataactccgataacgccaaaacgcactcgtcccgcctcctacgaacacgaaaccaacaatacccaccgaaccatctcgctccaaatccaaaaaaaacctccgaccgcccgcgtaaacgaaataaccccccttaccgccgccgaaataaaattaatcgatattttacaccaaccccttactcctacgccgctacgccaaaaaatacgaataaccgaaaaactcgactcgctcctacacctcctccccctaccgccgacgaaactaaacgactactacaacaatcgaaaactacccgactttatcctaaacaaatatcgcgacgaaaccgaccgcgaccaaaaacaaacgaaacgcgcacaacaacaaaaacgcccacccgaacaacataatacgctacccgcgaaaaaaaactacgcgactaaaactttataaatatttattatttactataaaattaacgaaacgaaaaataaaaacacacacacacttacttacaaaattaa

SEQ ID NO: 35137 - DNA, 739 bp, Artificial Sequence
  chemically treated genomic DNA (Homo sapiens) CpG-island No: 35137
gtcgagttcgttttcgtaattttttttattttgtttggggtttcgtcgtttcggtttttattgttatgtttcgcgtttcggtgtttttattttagatttgttgttattattttcgggttcggcgtcgtcgtcgtcgtttttttttttatatttgtttttgagtcgtttttttgtggtttgtttttcggcggatttttgggttcggtcgttgagtgtcggattcggttgtgcgtagtttttgttcgcggtttcggcgttgcgttttattttttacgtaggatttcgtcgttcggcgttataaggattttttcgcggtcgtcgtcgttgttgttgttcgaggtgcggtttttgttaggggtggttaatcgtatcggattgcgtcgagtacgtttcgttttatcgttttagttcgttcgttttttgtttcggattacgttttaagttcggttttaataggttttttattgattttttttgatcgcggggtatagggtcggggtcgtatataggtatttgattgatggagtttgggaagtcgagcggtcgatggaattcgaggattggcggagttgtcgatgggcgggatagggtagggcggggtttttttagacgcggaagattttgtaattttagtaatttacgggttcgtttggggtgcggttagttttgtttgtgttgtttttcggttaaagtttatggcgtttttttttacgtttttattttttttgggagattttta

SEQ ID NO: 35138 - DNA, 739 bp, Artificial Sequence
  chemically treated genomic DNA (Homo sapiens) CpG-island No: 35138
taaaaatctcccaaaaaaaataaaaacgtaaaaaaaaacgccataaactttaaccgaaaaacaacacaaacaaaactaaccgcaccccaaacgaacccgtaaattactaaaattacaaaatcttccgcgtctaaaaaaaccccgccctaccctatcccgcccatcgacaactccgccaatcctcgaattccatcgaccgctcgacttcccaaactccatcaatcaaatacctatatacgaccccgaccctataccccgcgatcaaaaaaaatcaataaaaaacctattaaaaccgaacttaaaacgtaatccgaaacaaaaaacgaacgaactaaaacgataaaacgaaacgtactcgacgcaatccgatacgattaaccacccctaacaaaaaccgcacctcgaacaacaacaacgacgacgaccgcgaaaaaatccttataacgccgaacgacgaaatcctacgtaaaaaataaaacgcaacgccgaaaccgcgaacaaaaactacgcacaaccgaatccgacactcaacgaccgaacccaaaaatccgccgaaaaacaaaccacaaaaaaacgactcaaaaacaaatataaaaaaaaaaacgacgacgacgacgccgaacccgaaaataataacaacaaatctaaaataaaaacaccgaaacgcgaaacataacaataaaaaccgaaacgacgaaaccccaaacaaaataaaaaaaattacgaaaacgaactcgac

SEQ ID NO: 35139 - DNA, 739 bp, Artificial Sequence
  chemically treated genomic DNA (Homo sapiens) CpG-island No: 35139
tgggaattttttaagaaaagtaaaggcgtggggagaagcgttatgaattttgatcggagagtagtataaataagattgatcgtattttaggcgggttcgtaggttattaaagttgtaaggtttttcgcgtttgaggagatttcgttttgttttgtttcgtttatcgataatttcgttaattttcgggttttatcgatcgttcggttttttaggttttattaattaaatatttatatacggtttcggttttgtgtttcgcgattagggaaggttagtagagagtttattggagtcgagtttggggcgtggttcggggtagggggcgggcggattgagacggtggggcggggcgtgttcggcgtagttcggtgcgattggttatttttggtaggagtcgtatttcggatagtagtagcggcggcggtcgcgggagggtttttgtggcgtcgggcggcggggttttgcgtggagagtgggacgtaacgtcgagatcgcgagtagaggttgcgtatagtcggattcggtatttagcgatcggatttaaggattcgtcggggaataagttataggagagcgatttaggaataagtgtgggagaggaagcggcggcggcggcgtcgggttcgggggtggtgatagtaggtttgaggtgagagtatcggggcgcggggtatgatagtgggagtcgaggcggcgggattttaggtagagtgaggggagttgcgggagcgggttcgat

SEQ ID NO: 35140 - DNA, 739 bp, Artificial Sequence
  chemically treated genomic DNA (Homo sapiens) CpG-island No: 35140
atcgaacccgctcccgcaactcccctcactctacctaaaatcccgccgcctcgactcccactatcataccccgcgccccgatactctcacctcaaacctactatcaccacccccgaacccgacgccgccgccgccgcttcctctcccacacttattcctaaatcgctctcctataacttattccccgacgaatccttaaatccgatcgctaaataccgaatccgactatacgcaacctctactcgcgatctcgacgttacgtcccactctccacgcaaaaccccgccgcccgacgccacaaaaaccctcccgcgaccgccgccgctactactatccgaaatacgactcctaccaaaaataaccaatcgcaccgaactacgccgaacacgccccgccccaccgtctcaatccgcccgccccctaccccgaaccacgccccaaactcgactccaataaactctctactaaccttccctaatcgcgaaacacaaaaccgaaaccgtatataaatatttaattaataaaacctaaaaaaccgaacgatcgataaaacccgaaaattaacgaaattatcgataaacgaaacaaaacaaaacgaaatctcctcaaacgcgaaaaaccttacaactttaataacctacgaacccgcctaaaatacgatcaatcttatttatactactctccgatcaaaattcataacgcttctccccacgcctttacttttcttaaaaaattccca

SEQ ID NO: 35141 - DNA, 974 bp, Artificial Sequence
  chemically treated genomic DNA (Homo sapiens) CpG-island No: 35141
gagtgtaacgtatttagggttttttcgttattttagtacggatgggggtaattttttcgagtttcgtaattttcggcggtttttttacgtagttttaggtttcggaggtcgtttcgtttttttttcgaatagttttattttttttcgtagcggttttattttcgtttcgggcggtcggtcgagcggtaggatttattttcgttcgattcgcggtttcgatagttgcgttcgtcgttttcggcgttttttagttttttatttttttcggggtagtattcgggggtcggcggcgttttagtttgggtcggggtcggggttagtagttcgcggtatttatgtcgtttttgatcgtagttgagcgtggtttacggatatcgcggttattcgcgttcggtattcgtcgtttgtttagtagtgttcgcggtagtttttaattcgaggatcggtagttacggcgatttttttttcgttttcgtcgagtttcgtttttcgcgttcgcgttcggtaacgggggtttcgcgtcgcgagcgattttcgggtcgagagttgttcgataacggtttgatttcgttatttttgggggagtggagatgtcgttggacgttttcgtcgttataattttagtttttttatcgtcgttttaaaatttttaacgtatagtgggggaggggcggagttaggttcgttagagttaggtaaatttacgggtaggtttagtagcggttaggatttcgaggttcgtaggcgattttcggagatagtcgttaggcggcgtttggagttagaattaaagcggtgatcgttagcgatttaggggcggagggtttgaagggtttttggtaggtggaggtggtttttaatttaagtagggaacgacgcgatttgtttttttattaggtcggaaaatttagacgtttagagtgtgcgtgattatgtagtttggttttttttgtgattagttagagttttattaa

SEQ ID NO: 35142 - DNA, 974 bp, Artificial Sequence
  chemically treated genomic DNA (Homo sapiens) CpG-island No: 35142
ttaataaaactctaactaatcacaaaaaaaaccaaactacataatcacgcacactctaaacgtctaaattttccgacctaataaaaaaacaaatcgcgtcgttccctacttaaattaaaaaccacctccacctaccaaaaacccttcaaaccctccgcccctaaatcgctaacgatcaccgctttaattctaactccaaacgccgcctaacgactatctccgaaaatcgcctacgaacctcgaaatcctaaccgctactaaacctacccgtaaatttacctaactctaacgaacctaactccgcccctcccccactatacgttaaaaattttaaaacgacgataaaaaaactaaaattataacgacgaaaacgtccaacgacatctccactcccccaaaaataacgaaatcaaaccgttatcgaacaactctcgacccgaaaatcgctcgcgacgcgaaacccccgttaccgaacgcgaacgcgaaaaacgaaactcgacgaaaacgaaaaaaaaatcgccgtaactaccgatcctcgaattaaaaactaccgcgaacactactaaacaaacgacgaataccgaacgcgaataaccgcgatatccgtaaaccacgctcaactacgatcaaaaacgacataaataccgcgaactactaaccccgaccccgacccaaactaaaacgccgccgacccccgaatactaccccgaaaaaaataaaaaactaaaaaacgccgaaaacgacgaacgcaactatcgaaaccgcgaatcgaacgaaaataaatcctaccgctcgaccgaccgcccgaaacgaaaataaaaccgctacgaaaaaaaataaaactattcgaaaaaaaaacgaaacgacctccgaaacctaaaactacgtaaaaaaaccgccgaaaattacgaaactcgaaaaaattacccccatccgtactaaaataacgaaaaaaccctaaatacgttacactc

SEQ ID NO: 35143 - DNA, 974 bp, Artificial Sequence
  chemically treated genomic DNA (Homo sapiens) CpG-island No: 35143
ttaataaagttttaattagttataggaggagttaggttgtatgattacgtatattttggacgtttaggtttttcgatttaataagggggtaggtcgcgtcgttttttgtttaaattagagattatttttatttgttaagggttttttaaatttttcgtttttaggtcgttaacgattatcgttttagttttagttttaggcgtcgtttggcggttgttttcggaagtcgtttgcgagtttcggggttttgatcgttgttgggtttgttcgtagatttgtttgattttagcgaatttggtttcgttttttttttattatacgttgaggattttaagacggcgatgaaagggttgaggttgtggcgacgggggcgtttagcggtatttttatttttttaaggatggcggaattaggtcgttgtcgggtagttttcgattcggaagtcgttcgcggcgcgaggttttcgttgtcgagcgcgggcgcggggggcggagttcggcggagacggggaaggggtcgtcgtggttgtcggttttcgagttgggggttgtcgcggatattgttaggtagacggcgagtatcgagcgcgggtggtcgcggtgttcgtgggttacgtttagttgcggttagaggcgatatgagtgtcgcgggttgttggtttcggtttcggtttaggttggagcgtcgtcggttttcgagtattatttcgaggaggatgaagagttggagagcgtcgaggacgacgagcgtagttgtcggggtcgcgagtcggacgaaggtgagttttgtcgttcggtcggtcgttcggagcggaggtgggatcgttgcgggagggggtggggttgttcgggagaggggcgggacggttttcggggtttggggttgcgtggaggggtcgtcgggagttgcggggttcggggaagttatttttattcgtgttggagtagcggggaagttttgggtgcgttatattt

SEQ ID NO: 35144 - DNA, 974 bp, Artificial Sequence
  chemically treated genomic DNA (Homo sapiens) CpG-island No: 35144
aaatataacgcacccaaaacttccccgctactccaacacgaataaaaataacttccccgaaccccgcaactcccgacgacccctccacgcaaccccaaaccccgaaaaccgtcccgcccctctcccgaacaaccccaccccctcccgcaacgatcccacctccgctccgaacgaccgaccgaacgacaaaactcaccttcgtccgactcgcgaccccgacaactacgctcgtcgtcctcgacgctctccaactcttcatcctcctcgaaataatactcgaaaaccgacgacgctccaacctaaaccgaaaccgaaaccaacaacccgcgacactcatatcgcctctaaccgcaactaaacgtaacccacgaacaccgcgaccacccgcgctcgatactcgccgtctacctaacaatatccgcgacaacccccaactcgaaaaccgacaaccacgacgaccccttccccgtctccgccgaactccgccccccgcgcccgcgctcgacaacgaaaacctcgcgccgcgaacgacttccgaatcgaaaactacccgacaacgacctaattccgccatccttaaaaaaataaaaataccgctaaacgcccccgtcgccacaacctcaaccctttcatcgccgtcttaaaatcctcaacgtataataaaaaaaaaacgaaaccaaattcgctaaaatcaaacaaatctacgaacaaacccaacaacgatcaaaaccccgaaactcgcaaacgacttccgaaaacaaccgccaaacgacgcctaaaactaaaactaaaacgataatcgttaacgacctaaaaacgaaaaatttaaaaaacccttaacaaataaaaataatctctaatttaaacaaaaaacgacgcgacctacccccttattaaatcgaaaaacctaaacgtccaaaatatacgtaatcatacaacctaactcctcctataactaattaaaactttattaa

SEQ ID NO: 35145 - DNA, 712 bp, Artificial Sequence
  chemically treated genomic DNA (Homo sapiens) CpG-island No: 35145
atcggcgcggtacgttcgggcgcgttttaggagaggtcggcgcgtagtagtcgcgcgtgtacgtattttcggtttagcgttttggtttgggttattagttttttgtttgtgggcgagcggttaaaggcgtttatgatttcggcggcgaagatcgaggagcgtcgtagtatttttatggcggcgacgcgggtggggggcgtcgtatttgcgggtataagcgtttagtcgggtggagggaggcggcgcggggaacggggcgcgcggggcgtcgggttgggcgtggttttcgggaagggtcgtagtcggcgtcgggttcgttttcgttttttgtgttttaaatttttaaaaatttagcgttatttttttttagagttcgaatttagttatagatatttttcgaggttgttagggatcggtggggtcgcggggagacggcggtttgtttcggggtcgtcgggttcgttttcgaagacgagtgcgtgggcggcgggggcggagggtatagtttagcgcgttttttacggcgattgttaggattcggtttttttcgtttcggttcggggtcgtttattttcgtcgttggcgttttgcgcgcgtgttttcggtttcgtcgttttcgtggtatttcgggtatttcggtacggacgttacgttcgtcgcgtttatttttttcgtcgtatggcgcgggcgtcggggtggagttttggtttta

SEQ ID NO: 35146 - DNA, 712 bp, Artificial Sequence
  chemically treated genomic DNA (Homo sapiens) CpG-island No: 35146
taaaaccaaaactccaccccgacgcccgcgccatacgacgaaaaaaataaacgcgacgaacgtaacgtccgtaccgaaatacccgaaataccacgaaaacgacgaaaccgaaaacacgcgcgcaaaacgccaacgacgaaaataaacgaccccgaaccgaaacgaaaaaaaccgaatcctaacaatcgccgtaaaaaacgcgctaaactataccctccgcccccgccgcccacgcactcgtcttcgaaaacgaacccgacgaccccgaaacaaaccgccgtctccccgcgaccccaccgatccctaacaacctcgaaaaatatctataactaaattcgaactctaaaaaaaaataacgctaaatttttaaaaatttaaaacacaaaaaacgaaaacgaacccgacgccgactacgacccttcccgaaaaccacgcccaacccgacgccccgcgcgccccgttccccgcgccgcctccctccacccgactaaacgcttatacccgcaaatacgacgccccccacccgcgtcgccgccataaaaatactacgacgctcctcgatcttcgccgccgaaatcataaacgcctttaaccgctcgcccacaaacaaaaaactaataacccaaaccaaaacgctaaaccgaaaatacgtacacgcgcgactactacgcgccgacctctcctaaaacgcgcccgaacgtaccgcgccgat

SEQ ID NO: 35147 - DNA, 712 bp, Artificial Sequence
  chemically treated genomic DNA (Homo sapiens) CpG-island No: 35147
tgaagttagaattttatttcggcgttcgcgttatgcggcgggagaggtgagcgcggcgggcgtggcgttcgtgtcggggtgttcggggtgttacgggaacggcgaggtcggggatacgcgcgtaggacgttagcggcggaggtgggcggtttcgggtcggggcggggagggtcgggttttggtagtcgtcgtgggggacgcgttgggttgtgtttttcgttttcgtcgtttacgtattcgttttcgagggcgggttcggcggtttcggagtaaatcgtcgttttttcgcggttttatcggtttttggtagtttcggggaatgtttgtagttgaattcgggttttgaaagaaggtggcgttgggtttttaaagatttggggtataaaaaacgagagcggattcggcgtcggttacggtttttttcgagggttacgtttagttcggcgtttcgcgcgtttcgtttttcgcgtcgtttttttttattcggttgagcgtttgtgttcgtaggtgcggcgttttttattcgcgtcgtcgttatggaggtgttgcggcgtttttcggttttcgtcgtcgagattatggacgtttttgatcgttcgtttatagataaggagttggtggtttaggttaaggcgttgggtcgggagtacgtgtacgcgcggttgttgcgcgtcggttttttttggagcgcgttcgagcgtgtcgcgtcggt

SEQ ID NO: 35148 - DNA, 712 bp, Artificial Sequence
  chemically treated genomic DNA (Homo sapiens) CpG-island No: 35148
accgacgcgacacgctcgaacgcgctccaaaaaaaaccgacgcgcaacaaccgcgcgtacacgtactcccgacccaacgccttaacctaaaccaccaactccttatctataaacgaacgatcaaaaacgtccataatctcgacgacgaaaaccgaaaaacgccgcaacacctccataacgacgacgcgaataaaaaacgccgcacctacgaacacaaacgctcaaccgaataaaaaaaaacgacgcgaaaaacgaaacgcgcgaaacgccgaactaaacgtaaccctcgaaaaaaaccgtaaccgacgccgaatccgctctcgttttttataccccaaatctttaaaaacccaacgccaccttctttcaaaacccgaattcaactacaaacattccccgaaactaccaaaaaccgataaaaccgcgaaaaaacgacgatttactccgaaaccgccgaacccgccctcgaaaacgaatacgtaaacgacgaaaacgaaaaacacaacccaacgcgtcccccacgacgactaccaaaacccgaccctccccgccccgacccgaaaccgcccacctccgccgctaacgtcctacgcgcgtatccccgacctcgccgttcccgtaacaccccgaacaccccgacacgaacgccacgcccgccgcgctcacctctcccgccgcataacgcgaacgccgaaataaaattctaacttca

SEQ ID NO: 35149 - DNA, 757 bp, Artificial Sequence
  chemically treated genomic DNA (Homo sapiens) CpG-island No: 35149
ggcgttttaaggttagtgttcgaggtcggttcgtagtcgttgtcgagatcgggtaagatggatcgggtatttcggggcggtttttcgagtttgggagttatcgagttcggagtttttttacgggtcggttttaatgttatttggtttcgaggtttattcggtgttttttgttgaagtcgagcggttaggttgcggacgtgtagatttgatggttttcggtttttcgattcggttcggtttggcggcgtcgtatcggttattttttgttttatttgtcgttattgttcgtcgcgatcgttttttatattcggtgtttcgcgatcggaagagagtaaggtcgcgtcgcggagtattacgggatcgaggaagatttcgttcgtattcggtcgtacggaggttatcgtggagcggaaaagggtagcgttgcgaacgtcgtaaaatgtcgggtcgggttgtttttcggtaggcgttggagaggttgtttttcggcggcgtcgggcgagaagcgcgattggagtttggggttgcggttttttagaggcgcgagtcgtttttttaggagtcgaggtttaaacggggtcgggtttgaagggtttttcggttagttcgcggtcgcgttattaatcgtcgtcgtttcgtttcgtttttcggttgaggcgtcgcgcggttaggtagcgggtttaggttttagtcgcgcgtttaggggttttcggggttttttcgggttagtatgttcggggtgaaattgattatttag

SEQ ID NO: 35150 - DNA, 757 bp, Artificial Sequence
  chemically treated genomic DNA (Homo sapiens) CpG-island No: 35150
ctaaataatcaatttcaccccgaacatactaacccgaaaaaaccccgaaaacccctaaacgcgcgactaaaacctaaacccgctacctaaccgcgcgacgcctcaaccgaaaaacgaaacgaaacgacgacgattaataacgcgaccgcgaactaaccgaaaaacccttcaaacccgaccccgtttaaacctcgactcctaaaaaaacgactcgcgcctctaaaaaaccgcaaccccaaactccaatcgcgcttctcgcccgacgccgccgaaaaacaacctctccaacgcctaccgaaaaacaacccgacccgacattttacgacgttcgcaacgctacccttttccgctccacgataacctccgtacgaccgaatacgaacgaaatcttcctcgatcccgtaatactccgcgacgcgaccttactctcttccgatcgcgaaacaccgaatataaaaaacgatcgcgacgaacaataacgacaaataaaacaaaaaataaccgatacgacgccgccaaaccgaaccgaatcgaaaaaccgaaaaccatcaaatctacacgtccgcaacctaaccgctcgacttcaacaaaaaacaccgaataaacctcgaaaccaaataacattaaaaccgacccgtaaaaaaactccgaactcgataactcccaaactcgaaaaaccgccccgaaatacccgatccatcttacccgatctcgacaacgactacgaaccgacctcgaacactaaccttaaaacgcc

SEQ ID NO: 35151 - DNA, 757 bp, Artificial Sequence
  chemically treated genomic DNA (Homo sapiens) CpG-island No: 35151
ttgggtggttagttttatttcgggtatgttgattcgggagggtttcggaggtttttgggcgcgcggttgaggtttggattcgttgtttggtcgcgcggcgttttagtcgagaagcgggacgaggcggcggcgattgatggcgcggtcgcgggttggtcgggggattttttaggttcggtttcgtttgggtttcggtttttggaaaagcgattcgcgtttttgggaagtcgtagttttagattttagtcgcgtttttcgttcggcgtcgtcggaaagtagtttttttaacgtttgtcggaaagtagttcggttcggtattttacgacgttcgtagcgttattttttttcgttttacggtgattttcgtgcggtcgggtgcgggcggagtttttttcgatttcgtggtgtttcgcggcgcggttttgttttttttcggtcgcgggatatcgggtgtagagggcggtcgcggcgggtagtggcggtaggtgagataggaggtggtcggtgcggcgtcgttaggtcgggtcgggtcggggggtcgggagttattaagtttgtacgttcgtagtttggtcgttcggttttagtaggaagtatcgaatgggtttcggagttaggtgatattgaggtcggttcgtgggggaatttcgggttcggtggtttttaggttcggggggtcgtttcgaagtgttcggtttattttattcggtttcgatagcggttgcggatcggtttcgggtattgattttggagcgtt

SEQ ID NO: 35152 - DNA, 757 bp, Artificial Sequence
  chemically treated genomic DNA (Homo sapiens) CpG-island No: 35152
aacgctccaaaatcaatacccgaaaccgatccgcaaccgctatcgaaaccgaataaaataaaccgaacacttcgaaacgaccccccgaacctaaaaaccaccgaacccgaaattcccccacgaaccgacctcaatatcacctaactccgaaacccattcgatacttcctactaaaaccgaacgaccaaactacgaacgtacaaacttaataactcccgaccccccgacccgacccgacctaacgacgccgcaccgaccacctcctatctcacctaccgccactacccgccgcgaccgccctctacacccgatatcccgcgaccgaaaaaaaacaaaaccgcgccgcgaaacaccacgaaatcgaaaaaaactccgcccgcacccgaccgcacgaaaatcaccgtaaaacgaaaaaaaataacgctacgaacgtcgtaaaataccgaaccgaactactttccgacaaacgttaaaaaaactactttccgacgacgccgaacgaaaaacgcgactaaaatctaaaactacgacttcccaaaaacgcgaatcgcttttccaaaaaccgaaacccaaacgaaaccgaacctaaaaaatcccccgaccaacccgcgaccgcgccatcaatcgccgccgcctcgtcccgcttctcgactaaaacgccgcgcgaccaaacaacgaatccaaacctcaaccgcgcgcccaaaaacctccgaaaccctcccgaatcaacatacccgaaataaaactaaccacccaa

SEQ ID NO: 35153 - DNA, 1468 bp, Artificial Sequence
  chemically treated genomic DNA (Homo sapiens) CpG-island No: 35153
ttcgcgttgggatcggattttcgaaaaattcggaagcggcgggcgagggatttcgcgggtttgttcggtttggggtcgttcggatagatttttcgttcgttcggtagttcggcgtttttcgtttgttattttttttagtattttgtttcggtagtagcgttttttagtcgtggggtcgacgataattcgcgagattttcggtttcgagtgcgaatggtggtgatggtggtgaggggtcgtcgggggtatttgcgtttgggattgaggtggttgcgatttttcggggggttgcggcggtcgtttttttttcgagttcgtttcgtaatttttgtttagcgtttgttcgtatattttggtgttggcggttggttggtaggtgatagttcgtaaaagttttatggtcgttttgtcgtttcgtattgttcgttgttattttttaggcgcggttatacgttcgagtcggtcgtggttttcgtatttttgtttttggtgtcgattagtatttaatatttcggtttatttgtgcgagtgagagcgttcggcgaagttttatatacggggaggcgggaagggggcggagattcgatacgcgatattacgttacggtttatgtttcgttttacggtcggtcgagcgcgcgtggtcgggaagtaagttttgtttcgttattcgggtttcgttttttagcggagtcgcgcgttttaaacgtcggtcgtcgagattttttgcggtcgcgggaaggtttttagagtcgttcgtgggtttcgttgtttcgtttttcgaaggtttcgagttttagcgtataaaatagaatcgcgagggtcgacgtttggttttattttcgttttagtcgtttggtggtagggtagtgtcgtgattcgagcgagtcgggcgcgggtgtagacgtagtttttttttcgtatagtttttttcggtcgttcggggttttttgtgttaaggtattagggtgttcggagttcgtcgtacgggtaggcgaggtttttttcggtcgtatgatagggttcgtttgtagttgtttcgtagtgtttgttcgcgttgtgacgagttcgttggtgtttagttggggtagtgtcgagaggtcgtgggggtgaaaggtcgggattcgtggagtcgggtattcgagtttatcgcgttagggtagatacgggttcgtagtcgggatttcgggtcgatcggttaatcgtgttaggattttattcgaggttcgtttggttttcgtttatgtttttagagcgagtttttgtttgaggtcggtttttgaattttgtagagcgaggtcggcgttttggtaaggcgtttttcgttcgtagttcgaagattggaaagtaagggcgttattttgtggaatgtttcggaatgtcgttaggtgtcgaagtgggtagcggttgataatcgtgggtttttgatagttattagtattaaatatcgatgtcgattgtgagttttt

SEQ ID NO: 35154 - DNA, 1468 bp, Artificial Sequence
  chemically treated genomic DNA (Homo sapiens) CpG-island No: 35154
aaaaactcacaatcgacatcgatatttaatactaataactatcaaaaacccacgattatcaaccgctacccacttcgacacctaacgacattccgaaacattccacaaaataacgcccttactttccaatcttcgaactacgaacgaaaaacgccttaccaaaacgccgacctcgctctacaaaattcaaaaaccgacctcaaacaaaaactcgctctaaaaacataaacgaaaaccaaacgaacctcgaataaaatcctaacacgattaaccgatcgacccgaaatcccgactacgaacccgtatctaccctaacgcgataaactcgaatacccgactccacgaatcccgacctttcacccccacgacctctcgacactaccccaactaaacaccaacgaactcgtcacaacgcgaacaaacactacgaaacaactacaaacgaaccctatcatacgaccgaaaaaaacctcgcctacccgtacgacgaactccgaacaccctaataccttaacacaaaaaaccccgaacgaccgaaaaaaactatacgaaaaaaaaactacgtctacacccgcgcccgactcgctcgaatcacgacactaccctaccaccaaacgactaaaacgaaaataaaaccaaacgtcgaccctcgcgattctattttatacgctaaaactcgaaaccttcgaaaaacgaaacaacgaaacccacgaacgactctaaaaaccttcccgcgaccgcaaaaaatctcgacgaccgacgtttaaaacgcgcgactccgctaaaaaacgaaacccgaataacgaaacaaaacttacttcccgaccacgcgcgctcgaccgaccgtaaaacgaaacataaaccgtaacgtaatatcgcgtatcgaatctccgcccccttcccgcctccccgtatataaaacttcgccgaacgctctcactcgcacaaataaaccgaaatattaaatactaatcgacaccaaaaacaaaaatacgaaaaccacgaccgactcgaacgtataaccgcgcctaaaaaataacaacgaacaatacgaaacgacaaaacgaccataaaacttttacgaactatcacctaccaaccaaccgccaacaccaaaatatacgaacaaacgctaaacaaaaattacgaaacgaactcgaaaaaaaaacgaccgccgcaaccccccgaaaaatcgcaaccacctcaatcccaaacgcaaatacccccgacgacccctcaccaccatcaccaccattcgcactcgaaaccgaaaatctcgcgaattatcgtcgaccccacgactaaaaaacgctactaccgaaacaaaatactaaaaaaaataacaaacgaaaaacgccgaactaccgaacgaacgaaaaatctatccgaacgaccccaaaccgaacaaacccgcgaaatccctcgcccgccgcttccgaatttttcgaaaatccgatcccaacgcgaa

SEQ ID NO: 35155 - DNA, 1468 bp, Artificial Sequence
  chemically treated genomic DNA (Homo sapiens) CpG-island No: 35155
ggaaatttataatcggtatcgatgtttagtattagtaattgttaaaggtttacggttgttaatcgttgtttatttcgatatttaacggtatttcggaatattttataagatggcgtttttgttttttaattttcgggttacgggcggaggacgttttgttaggacgtcgatttcgttttgtaaggtttaggggtcgattttagatagaggttcgttttaggggtatgggcgggggttagacgggtttcgagtgggattttggtacggttggtcgatcggttcgggatttcggttgcgggttcgtgtttgttttagcgcgatgggttcgaatgttcggttttacgaatttcggttttttatttttacggtttttcggtattgttttagttagatattagcgagttcgttatagcgcgggtaggtattgcggggtagttgtagacgagttttgttatacggtcggaggaggtttcgtttgttcgtgcggcgggtttcgggtattttgatattttgatataggaggtttcgggcggtcgggaagggttgtgcgggggagggattgcgtttatattcgcgttcgattcgttcgggttacggtattgttttgttattaggcggttggggcgggggtgaggttaggcgtcggttttcgcgattttgttttgtacgttgaggttcggagttttcgaagaacgggatagcggggtttacggacggttttgaaggttttttcgcggtcgtaagagatttcggcggtcggcgtttgaggcgcgcggtttcgttgggaagcgagattcgggtggcgggataagatttgtttttcggttacgcgcgttcggtcggtcgtggggcggggtataggtcgtgacgtgatgtcgcgtatcgagttttcgtttttttttcgttttttcgtatataagatttcgtcgagcgtttttattcgtataagtggatcggggtgttgggtgttagtcggtattagaggtaagggtgcgaggattacggtcggttcggacgtgtgatcgcgtttagggggtggtagcgggtagtgcggggcggtaaggcgattatggagtttttgcggattattatttattagttagtcgttagtattaaaatgtgcgagtaggcgttgggtaagggttgcggagcggattcgaagaagaagcggtcgtcgtagtttttcgaggaatcgtagttattttagttttaggcgtaagtgttttcggcggttttttattattattattattattcgtattcggggtcggagatttcgcggattatcgtcgattttacgattgggaagcgttattgtcggggtaaagtgttgggaaaggtgataagcggagggcgtcgggttgtcgggcgggcgggaggtttgttcgggcgattttaagtcgggtaagttcgcggggtttttcgttcgtcgttttcgggtttttcgggggttcgattttagcgcgag

SEQ ID NO: 35156 - DNA, 1468 bp, Artificial Sequence
  chemically treated genomic DNA (Homo sapiens) CpG-island No: 35156
ctcgcgctaaaatcgaacccccgaaaaacccgaaaacgacgaacgaaaaaccccgcgaacttacccgacttaaaatcgcccgaacaaacctcccgcccgcccgacaacccgacgccctccgcttatcacctttcccaacactttaccccgacaataacgcttcccaatcgtaaaatcgacgataatccgcgaaatctccgaccccgaatacgaataataataataataataaaaaaccgccgaaaacacttacgcctaaaactaaaataactacgattcctcgaaaaactacgacgaccgcttcttcttcgaatccgctccgcaacccttacccaacgcctactcgcacattttaatactaacgactaactaataaataataatccgcaaaaactccataatcgccttaccgccccgcactacccgctaccaccccctaaacgcgatcacacgtccgaaccgaccgtaatcctcgcacccttacctctaataccgactaacacccaacaccccgatccacttatacgaataaaaacgctcgacgaaatcttatatacgaaaaaacgaaaaaaaaacgaaaactcgatacgcgacatcacgtcacgacctataccccgccccacgaccgaccgaacgcgcgtaaccgaaaaacaaatcttatcccgccacccgaatctcgcttcccaacgaaaccgcgcgcctcaaacgccgaccgccgaaatctcttacgaccgcgaaaaaaccttcaaaaccgtccgtaaaccccgctatcccgttcttcgaaaactccgaacctcaacgtacaaaacaaaatcgcgaaaaccgacgcctaacctcacccccgccccaaccgcctaataacaaaacaataccgtaacccgaacgaatcgaacgcgaatataaacgcaatccctcccccgcacaacccttcccgaccgcccgaaacctcctatatcaaaatatcaaaatacccgaaacccgccgcacgaacaaacgaaacctcctccgaccgtataacaaaactcgtctacaactaccccgcaatacctacccgcgctataacgaactcgctaatatctaactaaaacaataccgaaaaaccgtaaaaataaaaaaccgaaattcgtaaaaccgaacattcgaacccatcgcgctaaaacaaacacgaacccgcaaccgaaatcccgaaccgatcgaccaaccgtaccaaaatcccactcgaaacccgtctaacccccgcccatacccctaaaacgaacctctatctaaaatcgacccctaaaccttacaaaacgaaatcgacgtcctaacaaaacgtcctccgcccgtaacccgaaaattaaaaaacaaaaacgccatcttataaaatattccgaaataccgttaaatatcgaaataaacaacgattaacaaccgtaaacctttaacaattactaatactaaacatcgataccgattataaatttcc

SEQ ID NO: 35157 - DNA, 852 bp, Artificial Sequence
  chemically treated genomic DNA (Homo sapiens) CpG-island No: 35157
ttgagtgtattggcgagcgtttggtttttcggtggagtgggattgcgtgtattggtgagcgtttggtttttttgtggagtgggattgcgtgtattggcgagtgttcggtttttcggtggagtgggattgcgtgtattgattagcgtttggtttttcggtggagtgggattgcgtgtattggcgagtgtttggtttttcggtggagtgggattgagtgtattgacgagcgtttggtttttcggtggagtgggattggtgtgtgttggcgagtgttcggttttttggtgggagtgggtttgcgtgtattgattagcgtttggtttttcggtggagtgggattgagtgtattgattagcgtttggtttttcggtggagtgggattgagtgtattggcgagcgtttggtttttcggtggagtgggattgagtgtattggcgagcgtttggtttttcggtggagtgggattgcgtgtattggcgagcgtttggtttttcggtggagtgggattgcgtgtattggtgagcgtttggtttttcggtggagtgggattgcgtgtattggcgagtgttcggtttttcggtggagtgggattgagtgtattggcgagcgtttggtttttcggtggagtgggattgcgtgtattggcgagcgtttggtttttcggtggagtgggattgcgtgtattggtgagtatttggtttttcggtggagtgggattgcgtgtattggcgagtgttcggtttttcggtggagtgggattgagtgtattggcgagcgtttggttttttggtagagtgggattgcgtgtattggtgagcgtttggtttttaggtggagtgggattgtagtatg

SEQ ID NO: 35158 - DNA, 852 bp, Artificial Sequence
  chemically treated genomic DNA (Homo sapiens) CpG-island No: 35158
catactacaatcccactccacctaaaaaccaaacgctcaccaatacacgcaatcccactctaccaaaaaaccaaacgctcgccaatacactcaatcccactccaccgaaaaaccgaacactcgccaatacacgcaatcccactccaccgaaaaaccaaatactcaccaatacacgcaatcccactccaccgaaaaaccaaacgctcgccaatacacgcaatcccactccaccgaaaaaccaaacgctcgccaatacactcaatcccactccaccgaaaaaccgaacactcgccaatacacgcaatcccactccaccgaaaaaccaaacgctcaccaatacacgcaatcccactccaccgaaaaaccaaacgctcgccaatacacgcaatcccactccaccgaaaaaccaaacgctcgccaatacactcaatcccactccaccgaaaaaccaaacgctcgccaatacactcaatcccactccaccgaaaaaccaaacgctaatcaatacactcaatcccactccaccgaaaaaccaaacgctaatcaatacacgcaaacccactcccaccaaaaaaccgaacactcgccaacacacaccaatcccactccaccgaaaaaccaaacgctcgtcaatacactcaatcccactccaccgaaaaaccaaacactcgccaatacacgcaatcccactccaccgaaaaaccaaacgctaatcaatacacgcaatcccactccaccgaaaaaccgaacactcgccaatacacgcaatcccactccacaaaaaaaccaaacgctcaccaatacacgcaatcccactccaccgaaaaaccaaacgctcgccaatacactcaa

SEQ ID NO: 35159 - DNA, 852 bp, Artificial Sequence
  chemically treated genomic DNA (Homo sapiens) CpG-island No: 35159
tatattgtaattttattttatttggagattaggcgtttattaatatacgtaattttattttattaggagattaggcgttcgttaatatatttaattttattttatcgggagatcgggtattcgttaatatacgtaattttattttatcgggagattaggtgtttattagtatacgtaattttattttatcgggagattaggcgttcgttaatatacgtaattttattttatcgggagattaggcgttcgttaatatatttaattttattttatcgggagatcgggtattcgttaatatacgtaattttattttatcgggagattaggcgtttattagtatacgtaattttattttatcgggagattaggcgttcgttaatatacgtaattttattttatcgggagattaggcgttcgttaatatatttaattttattttatcgggagattaggcgttcgttaatatatttaattttattttatcgggagattaggcgttagttaatatatttaattttattttatcgggagattaggcgttagttaatatacgtaaatttatttttattaggagatcgggtattcgttaatatatattaattttattttatcgggagattaggcgttcgttaatatatttaattttattttatcgggagattaggtattcgttaatatacgtaattttattttatcgggagattaggcgttagttaatatacgtaattttattttatcgggagatcgggtattcgttaatatacgtaattttattttatagggagattaggcgtttattagtatacgtaattttattttatcgggagattaggcgttcgttaatatatttaa

SEQ ID NO: 35160 - DNA, 852 bp, Artificial Sequence
  chemically treated genomic DNA (Homo sapiens) CpG-island No: 35160
ttaaatatattaacgaacgcctaatctcccgataaaataaaattacgtatactaataaacgcctaatctccctataaaataaaattacgtatattaacgaatacccgatctcccgataaaataaaattacgtatattaactaacgcctaatctcccgataaaataaaattacgtatattaacgaatacctaatctcccgataaaataaaattaaatatattaacgaacgcctaatctcccgataaaataaaattaatatatattaacgaatacccgatctcctaataaaaataaatttacgtatattaactaacgcctaatctcccgataaaataaaattaaatatattaactaacgcctaatctcccgataaaataaaattaaatatattaacgaacgcctaatctcccgataaaataaaattaaatatattaacgaacgcctaatctcccgataaaataaaattacgtatattaacgaacgcctaatctcccgataaaataaaattacgtatactaataaacgcctaatctcccgataaaataaaattacgtatattaacgaatacccgatctcccgataaaataaaattaaatatattaacgaacgcctaatctcccgataaaataaaattacgtatattaacgaacgcctaatctcccgataaaataaaattacgtatactaataaacacctaatctcccgataaaataaaattacgtatattaacgaatacccgatctcccgataaaataaaattaaatatattaacgaacgcctaatctcctaataaaataaaattacgtatattaataaacgcctaatctccaaataaaataaaattacaatata

SEQ ID NO: 35161 - DNA, 595 bp, Artificial Sequence
  chemically treated genomic DNA (Homo sapiens) CpG-island No: 35161
  unsure (253)
tattagtatacgtaattttattttatcgggaggattaggcgtatcgttaatatacgtaattttattttatcggggagattacggtcgtttagttttaatatacgttaatttcgtacgttcgatcgggggaagtattaggtcggttacgattaatatagcgttaatatttattttacgcgggagattaggtcggttagtgtaatatatttaattttattttatcgggagattaggcgttagattaattatacgntaatattcgattattattaggagatcgggtattcgttaatatatataattttattttatcgggagattaggcgttcgttaatatatttaattttattttatcgggagattaggcgttcgttaatatatttaattttattttatcgggagattaggtattcgttaatatatataattttattttatcgggagattagacgttagttaatatacgtaattttattttatcgggagatcgggcgttcgttaatatatgtaattttattttatcgggagattaggcgttagttaatatacgtaattttattttattaggagattagggtattcgtttaatatatat

SEQ ID NO: 35162 - DNA, 595 bp, Artificial Sequence
  chemically treated genomic DNA (Homo sapiens) CpG-island No: 35162
  unsure (343)
atatatattaaacgaataccctaatctcctaataaaataaaattacgtatattaactaacgcctaatctcccgataaaataaaattacatatattaacgaacgcccgatctcccgataaaataaaattacgtatattaactaacgtctaatctcccgataaaataaaattatatatattaacgaatacctaatctcccgataaaataaaattaaatatattaacgaacgcctaatctcccgataaaataaaattaaatatattaacgaacgcctaatctcccgataaaataaaattatatatattaacgaatacccgatctcctaataataatcgaatattancgtataattaatctaacgcctaatctcccgataaaataaaattaaatatattacactaaccgacctaatctcccgcgtaaaataaatattaacgctatattaatcgtaaccgacctaatacttcccccgatcgaacgtacgaaattaacgtatattaaaactaaacgaccgtaatctccccgataaaataaaattacgtatattaacgatacgcctaatcctcccgataaaataaaattacgtatactaata

SEQ ID NO: 35163 - DNA, 595 bp, Artificial Sequence
  chemically treated genomic DNA (Homo sapiens) CpG-island No: 35163
  unsure (343)
gtgtgtgttgggcgagtgttttggttttttggtggagtgggattgcgtgtattgattagcgtttggtttttcggtggagtgggattgtatgtattggcgagcgttcggtttttcggtggagtgggattgcgtgtattgattagcgtttggtttttcggtggagtgggattgtgtgtgttggcgagtgtttggtttttcggtggagtgggattgagtgtattggcgagcgtttggtttttcggtggagtgggattgagtgtattggcgagcgtttggtttttcggtggagtgggattgtgtgtgttggcgagtgttcggttttttggtggtagtcgggtattgncgtgtagttgatttagcgtttggtttttcggtggagtgggattgagtgtattgtattagtcggtttggtttttcgcgtggagtgggtattgacgttgtattggtcgtagtcgatttggtgtttttttcggtcggacgtgcggaattgacgtgtattagggttgagcggtcgtggttttttcggtggagtgggattgcgtgtattggcgatgcgtttggttttttcggtggagtgggattgcgtgtattggtg

SEQ ID NO: 35164 - DNA, 595 bp, Artificial Sequence
  chemically treated genomic DNA (Homo sapiens) CpG-island No: 35164
  unsure (253)
caccaatacacgcaatcccactccaccgaaaaaaccaaacgcatcgccaatacacgcaatcccactccaccgaaaaaaccacgaccgctcaaccctaatacacgtcaattccgcacgtccgaccgaaaaaaacaccaaatcgactacgaccaatacaacgtcaatacccactccacgcgaaaaaccaaaccgactaatacaatacactcaatcccactccaccgaaaaaccaaacgctaaatcaactacacgncaatacccgactaccaccaaaaaaccgaacactcgccaacacacacaatcccactccaccgaaaaaccaaacgctcgccaatacactcaatcccactccaccgaaaaaccaaacgctcgccaatacactcaatcccactccaccgaaaaaccaaacactcgccaacacacacaatcccactccaccgaaaaaccaaacgctaatcaatacacgcaatcccactccaccgaaaaaccgaacgctcgccaatacatacaatcccactccaccgaaaaaccaaacgctaatcaatacacgcaatcccactccaccaaaaaaccaaaacactcgcccaacacacac

SEQ ID NO: 35165 - DNA, 1502 bp, Artificial Sequence
  chemically treated genomic DNA (Homo sapiens) CpG-island No: 35165
taggcgttcgttaatatatttaattttattttatcgggagattaggcgttcgttaatatatttaattttattttatcgggagattaggtattcgttaatatatataattttattttattaggagattaggcgttcgttaatatacgtaattttattttatcgggagattaggcgttcgttaatatatttaattttattttatcgggagattaggtattcgttaatatatataattttattttattaggagattaggcgttcgttaatatatttaattttattttatcgggagattaggcgttagttaatatacgtaattttattttattaggagatcgggtattcgttaatatatataattttattttatcgggagattaggcgttcgttaatatatttaattttattttatcgggagattaggtatttattaatatacgtaattttattttatcgggagattaggcgttagttaatatacgtaattttattttatcgggagattagacgttagttaatatacgtaattttattttattaggagatcgggtattcgttaatatacgtaattttattttatcgggagattaggcgttagttaatatacgtaattttattttattaggagatcgggtattcgttaatatatataattttattttatcgggagattaggcgttcgttaatatatttaattttattttatcgggagattaggcgttcgttaatatatttaattttattttatcgggagattaggtattcgttaatatatataattttattttattaggagattaggcgttcgttaatatacgtaattttattttattaggagattaggcgttcgttaatatatttaattttattttatcgggagattaggcgttagttaatatacgtaattttattttattaggagatcgggtattcgttaatatatataattttattttatcgggagattaggcgttcgttaatatatttaattttattttatcgggagattaggcgttagttaatatacgtaattttattttattaggagatcgggtattcgttaatatatataattttattttatcgggagattaggcgttcgttaatatatttaattttattttatcgggagattaggcgttcgttaatatatttaattttattttatcgggagattaggtattcgttaatatatataattttattttatcgggagattagacgttagttaatatacgtaattttattttatcgggagatcgggcgttcgttaatatacgtaattttattttatcgggagattaggcgttagttaatatacgtaattttattttattaggagatcgggtattcgttaatatatataattttattttatcgggagattaggcgttcgttaatatatttaattttattttatcgggagattaggtattcgttaatatatttaatttttatttatcgggagattaggtattcgttaatatatataattttatttt

SEQ ID NO: 35166 - DNA, 1502 bp, Artificial Sequence
  chemically treated genomic DNA (Homo sapiens) CpG-island No: 35166
aaaataaaattatatatattaacgaatacctaatctcccgataaataaaaattaaatatattaacgaatacctaatctcccgataaaataaaattaaatatattaacgaacgcctaatctcccgataaaataaaattatatatattaacgaatacccgatctcctaataaaataaaattacgtatattaactaacgcctaatctcccgataaaataaaattacgtatattaacgaacgcccgatctcccgataaaataaaattacgtatattaactaacgtctaatctcccgataaaataaaattatatatattaacgaatacctaatctcccgataaaataaaattaaatatattaacgaacgcctaatctcccgataaaataaaattaaatatattaacgaacgcctaatctcccgataaaataaaattatatatattaacgaatacccgatctcctaataaaataaaattacgtatattaactaacgcctaatctcccgataaaataaaattaaatatattaacgaacgcctaatctcccgataaaataaaattatatatattaacgaatacccgatctcctaataaaataaaattacgtatattaactaacgcctaatctcccgataaaataaaattaaatatattaacgaacgcctaatctcctaataaaataaaattacgtatattaacgaacgcctaatctcctaataaaataaaattatatatattaacgaatacctaatctcccgataaaataaaattaaatatattaacgaacgcctaatctcccgataaaataaaattaaatatattaacgaacgcctaatctcccgataaaataaaattatatatattaacgaatacccgatctcctaataaaataaaattacgtatattaactaacgcctaatctcccgataaaataaaattacgtatattaacgaatacccgatctcctaataaaataaaattacgtatattaactaacgtctaatctcccgataaaataaaattacgtatattaactaacgcctaatctcccgataaaataaaattacgtatattaataaatacctaatctcccgataaaataaaattaaatatattaacgaacgcctaatctcccgataaaataaaattatatatattaacgaatacccgatctcctaataaaataaaattacgtatattaactaacgcctaatctcccgataaaataaaattaaatatattaacgaacgcctaatctcctaataaaataaaattatatatattaacgaatacctaatctcccgataaaataaaattaaatatattaacgaacgcctaatctcccgataaaataaaattacgtatattaacgaacgcctaatctcctaataaaataaaattatatatattaacgaatacctaatctcccgataaaataaaattaaatatattaacgaacgcctaatctcccgataaaataaaattaaatatattaacgaacgccta

SEQ ID NO: 35167 - DNA, 1502 bp, Artificial Sequence
  chemically treated genomic DNA (Homo sapiens) CpG-island No: 35167
gaagtgggattgtgtgtgttggcgagtgtttggtttttcggtgagtggggattgagtgtattggcgagtgtttggtttttcggtggagtgggattgagtgtattgacgagcgtttggtttttcggtggagtgggattgtgtgtgttggcgagtgttcggttttttggtggagtgggattgcgtgtattgattagcgtttggtttttcggtggagtgggattgcgtgtattggcgagcgttcggtttttcggtggagtgggattgcgtgtattgattagcgtttggtttttcggtggagtgggattgtgtgtgttggcgagtgtttggtttttcggtggagtgggattgagtgtattggcgagcgtttggtttttcggtggagtgggattgagtgtattgacgagcgtttggtttttcggtggagtgggattgtgtgtgttggcgagtgttcggttttttggtggagtgggattgcgtgtattgattagcgtttggtttttcggtggagtgggattgagtgtattggcgagcgtttggtttttcggtggagtgggattgtgtgtgttggcgagtgttcggttttttggtagagtgggattgcgtgtattgattagcgtttggtttttcggtggagtgggattgagtgtattggcgagcgtttggttttttggtggagtgggattgcgtgtattggcgagcgtttggttttttggtggagtgggattgtgtgtgttggcgagtgtttggtttttcggtggagtgggattgagtgtattggcgagcgtttggtttttcggtggagtgggattgagtgtattgacgagcgtttggtttttcggtggagtgggattgtgtgtgttggcgagtgttcggttttttggtggagtgggattgcgtgtattgattagcgtttggtttttcggtggagtgggattgcgtgtattggcgagtgttcggttttttggtggagtgggattgcgtgtattgattagcgtttggtttttcggtggagtgggattgcgtgtattgattagcgtttggtttttcggtggagtgggattgcgtgtattggtgagtgtttggtttttcggtggagtgggattgagtgtattgacgagcgtttggtttttcggtggagtgggattgtgtgtattggcgagtgttcggttttttggtagagtgggattgcgtgtattgattagcgtttggtttttcggtggagtgggattgagtgtattggcgagcgtttggttttttggtggagtgggattgtgtgtgttggcgagtgtttggtttttcggtggagtgggattgagtgtattggcgagcgtttggtttttcggtggagtgggattgcgtgtattggcgagcgtttggttttttggtggagtgggattgtgtgtgttggcgagtgtttggtttttcggtggagtgggattgagtgtattggcgagcgtttggtttttcggtggagtgggattgagtgtattgacgagcgtttg

SEQ ID NO: 35168 - DNA, 1502 bp, Artificial Sequence
  chemically treated genomic DNA (Homo sapiens) CpG-island No: 35168
caaacgctcgtcaatacactcaatcccactccaccgaaaaaccaaacgctcgccaatacactcaatcccactccaccgaaaaaccaaacactcgccaacacacacaatcccactccaccaaaaaaccaaacgctcgccaatacacgcaatcccactccaccgaaaaaccaaacgctcgccaatacactcaatcccactccaccgaaaaaccaaacactcgccaacacacacaatcccactccaccaaaaaaccaaacgctcgccaatacactcaatcccactccaccgaaaaaccaaacgctaatcaatacacgcaatcccactctaccaaaaaaccgaacactcgccaatacacacaatcccactccaccgaaaaaccaaacgctcgtcaatacactcaatcccactccaccgaaaaaccaaacactcaccaatacacgcaatcccactccaccgaaaaaccaaacgctaatcaatacacgcaatcccactccaccgaaaaaccaaacgctaatcaatacacgcaatcccactccaccaaaaaaccgaacactcgccaatacacgcaatcccactccaccgaaaaaccaaacgctaatcaatacacgcaatcccactccaccaaaaaaccgaacactcgccaacacacacaatcccactccaccgaaaaaccaaacgctcgtcaatacactcaatcccactccaccgaaaaaccaaacgctcgccaatacactcaatcccactccaccgaaaaaccaaacactcgccaacacacacaatcccactccaccaaaaaaccaaacgctcgccaatacacgcaatcccactccaccaaaaaaccaaacgctcgccaatacactcaatcccactccaccgaaaaaccaaacgctaatcaatacacgcaatcccactctaccaaaaaaccgaacactcgccaacacacacaatcccactccaccgaaaaaccaaacgctcgccaatacactcaatcccactccaccgaaaaaccaaacgctaatcaatacacgcaatcccactccaccaaaaaaccgaacactcgccaacacacacaatcccactccaccgaaaaaccaaacgctcgtcaatacactcaatcccactccaccgaaaaaccaaacgctcgccaatacactcaatcccactccaccgaaaaaccaaacactcgccaacacacacaatcccactccaccgaaaaaccaaacgctaatcaatacacgcaatcccactccaccgaaaaaccgaacgctcgccaatacacgcaatcccactccaccgaaaaaccaaacgctaatcaatacacgcaatcccactccaccaaaaaaccgaacactcgccaacacacacaatcccactccaccgaaaaaccaaacgctcgtcaatacactcaatcccactccaccgaaaaaccaaacactcgccaatacactcaatccccactcaccgaaaaaccaaacactcgccaacacacacaatcccacttc

SEQ ID NO: 35169 - DNA, 732 bp, Artificial Sequence
  chemically treated genomic DNA (Homo sapiens) CpG-island No: 35169
cgcgcgttcgtttgttgtttggagtttttaattcggcggaatttaggttaggacgcgtcgtcgttttgacgtgttgtcggtcgggaggcgcgggcgttaggttttaacgattagggtgggtggtcgcggggtaggggttggatttgaattcgtttttcgggggttttggatgcgggatgcgggatgcgggatgcgggttcgattttttcgttgttggtcgaggagcgttttgagagtttttttttcgcgcgcgaggataaatatgcgcggtttgttagttagtgcggcgttgttttttagttgatagggtgacgtttcgtttggaggtttggagattggttttttgatttggtttttttcggtagtttaatgggtaaagtttttcgttcgtttagaaattagttttttcgcgcgttttttttgcgcgcggcgaggtcgagacgtttttcgcggtgatagcgtgtaaggcggagattcggcgcgtttttagtttagggaaagtttaggcgacgcgatcgtaagttcgagtttaggtttttcggagtcgttagggcgcgtcgggttgtttgtttttttgtttttttttgtaggaatttttcgtcgttcgcggtcgggatttcgggtttttttcgggcgtagattttagttatcgttttgggtcggggtttttttttttttgaaattcgtgcggaaggatttttttcggggtttttcgttttggttttagatatt

SEQ ID NO: 35170 - DNA, 732 bp, Artificial Sequence
  chemically treated genomic DNA (Homo sapiens) CpG-island No: 35170
aatatctaaaaccaaaacgaaaaaccccgaaaaaaatccttccgcacgaatttcaaaaaaaaaaaaaccccgacccaaaacgataactaaaatctacgcccgaaaaaaacccgaaatcccgaccgcgaacgacgaaaaattcctacaaaaaaaaacaaaaaaacaaacaacccgacgcgccctaacgactccgaaaaacctaaactcgaacttacgatcgcgtcgcctaaactttccctaaactaaaaacgcgccgaatctccgccttacacgctatcaccgcgaaaaacgtctcgacctcgccgcgcgcaaaaaaaacgcgcgaaaaaactaatttctaaacgaacgaaaaactttacccattaaactaccgaaaaaaaccaaatcaaaaaaccaatctccaaacctccaaacgaaacgtcaccctatcaactaaaaaacaacgccgcactaactaacaaaccgcgcatatttatcctcgcgcgcgaaaaaaaaactctcaaaacgctcctcgaccaacaacgaaaaaatcgaacccgcatcccgcatcccgcatcccgcatccaaaacccccgaaaaacgaattcaaatccaacccctaccccgcgaccacccaccctaatcgttaaaacctaacgcccgcgcctcccgaccgacaacacgtcaaaacgacgacgcgtcctaacctaaattccgccgaattaaaaactccaaacaacaaacgaacgcgcg

SEQ ID NO: 35171 - DNA, 732 bp, Artificial Sequence
  chemically treated genomic DNA (Homo sapiens) CpG-island No: 35171
ggtgtttggggttagggcgaggggtttcgggaggggttttttcgtacggattttagaaagagggaaatttcgatttagagcggtgattggaatttacgttcgggagaggttcggagtttcggtcgcgggcggcgggggatttttgtaggaaggggtaggaaggtaagtagttcggcgcgttttggcggtttcgagggatttgggttcgggtttgcggtcgcgtcgtttgggttttttttgggttgggagcgcgtcgggttttcgttttgtacgttgttatcgcgggagacgtttcggtttcgtcgcgcgtagaggggacgcgcggagaggttggtttttgggcgagcggagagttttgtttattaagttgtcggaagaagttaaattaaaaagttaatttttaagtttttaaacggaacgttattttattagttgggagatagcgtcgtattgattgataagtcgcgtatatttattttcgcgcgcggaggggagatttttagaacgtttttcgattagtagcgaggaagtcgagttcgtatttcgtatttcgtatttcgtatttagagttttcgagggacgaatttagatttaatttttgtttcgcggttatttattttagtcgttggagtttggcgttcgcgtttttcggtcggtagtacgttaaaacggcggcgcgttttgatttggatttcgtcgagttgggagttttaggtagtaggcgggcgcgcg

SEQ ID NO: 35172 - DNA, 732 bp, Artificial Sequence
  chemically treated genomic DNA (Homo sapiens) CpG-island No: 35172
cgcgcgcccgcctactacctaaaactcccaactcgacgaaatccaaatcaaaacgcgccgccgttttaacgtactaccgaccgaaaaacgcgaacgccaaactccaacgactaaaataaataaccgcgaaacaaaaattaaatctaaattcgtccctcgaaaactctaaatacgaaatacgaaatacgaaatacgaactcgacttcctcgctactaatcgaaaaacgttctaaaaatctcccctccgcgcgcgaaaataaatatacgcgacttatcaatcaatacgacgctatctcccaactaataaaataacgttccgtttaaaaacttaaaaattaactttttaatttaacttcttccgacaacttaataaacaaaactctccgctcgcccaaaaaccaacctctccgcgcgtcccctctacgcgcgacgaaaccgaaacgtctcccgcgataacaacgtacaaaacgaaaacccgacgcgctcccaacccaaaaaaaacccaaacgacgcgaccgcaaacccgaacccaaatccctcgaaaccgccaaaacgcgccgaactacttaccttcctaccccttcctacaaaaatcccccgccgcccgcgaccgaaactccgaacctctcccgaacgtaaattccaatcaccgctctaaatcgaaatttccctctttctaaaatccgtacgaaaaaacccctcccgaaacccctcgccctaaccccaaacacc

SEQ ID NO: 35173 - DNA, 649 bp, Artificial Sequence
  chemically treated genomic DNA (Homo sapiens) CpG-island No: 35173
  unsure (356, 515, 587)
cgtagtcgtcgtcgtttcgggtagagtttgcgtttttgttttgcgtttcgggcgttgaagtcgggcgggcgatgttcgcggcgtgaaagcgttcgcggcgggcgtcgatttttgttttagttttttgtttttttcgtttcgtttgtttcgtgtttttgtgattttggttttggcgtcgtcgtttaggcgtttcgtaatgtagttgtttttgcgtttcggcgggaggcgttttgtttcgcgagcgttcggggttcgtagttcggtttgggggtttagtcgagttcgggcggggtcggggtcgcggtggcgatgtatcgggttcgttagcgttaggagcgttaggtagttgaggcggngggtaagttttttttcggaggagtcgcgttttcggtttcgtcggtttcgtcgcgatgttgttttatagtttgtcgggtttcgaggtgtacggggttatcgacgagatggatcgtagggttaagagcgaggttttcgttattaggttcggtatcgatcgnggaatttcggagacgtaggcgcgcgggtgtggggtcggggttgaaagtttggaatgggttcgggtaggacgngttttttgttttttaaatttggggaggcgtttttcgggtcgttatgggattgggggcgtggg

SEQ ID NO: 35174 - DNA, 649 bp, Artificial Sequence
  chemically treated genomic DNA (Homo sapiens) CpG-island No: 35174
  unsure (63, 135, 294)
cccacgcccccaatcccataacgacccgaaaaacgcctccccaaatttaaaaaacaaaaaacncgtcctacccgaacccattccaaactttcaaccccgaccccacacccgcgcgcctacgtctccgaaattccncgatcgataccgaacctaataacgaaaacctcgctcttaaccctacgatccatctcgtcgataaccccgtacacctcgaaacccgacaaactataaaacaacatcgcgacgaaaccgacgaaaccgaaaacgcgactcctccgaaaaaaaacttacccnccgcctcaactacctaacgctcctaacgctaacgaacccgatacatcgccaccgcgaccccgaccccgcccgaactcgactaaacccccaaaccgaactacgaaccccgaacgctcgcgaaacaaaacgcctcccgccgaaacgcaaaaacaactacattacgaaacgcctaaacgacgacgccaaaaccaaaatcacaaaaacacgaaacaaacgaaacgaaaaaaacaaaaaactaaaacaaaaatcgacgcccgccgcgaacgctttcacgccgcgaacatcgcccgcccgacttcaacgcccgaaacgcaaaacaaaaacgcaaactctacccgaaacgacgacgactacg

SEQ ID NO: 35175 - DNA, 649 bp, Artificial Sequence
  chemically treated genomic DNA (Homo sapiens) CpG-island No: 35175
  unsure (63, 135, 294)
tttacgtttttagttttatggcggttcgaaggacgtttttttaaatttgggggataaaaggtncgttttgttcgggtttattttaagtttttagtttcgattttatattcgcgcgtttacgttttcggggttttncggtcgatgtcgaatttgatggcgggagtttcgtttttggttttgcggtttatttcgtcgatgatttcgtgtatttcggggttcgatagattgtggaatagtatcgcggcgggatcggcggggtcgggggcgcggttttttcgagggagggtttgtttntcgttttagttgtttggcgtttttggcgttaacgggttcggtgtatcgttatcgcggtttcggtttcgttcgagttcggttgagtttttaggtcgagttacgggtttcgggcgttcgcggggtaggacgtttttcgtcgaggcgtaggggtagttatattgcggggcgtttgggcgacggcgttaaagttagggttataagggtacgggataagcggggcggggggagtaggagattaggatagaggtcggcgttcgtcgcgggcgtttttacgtcgcgggtatcgttcgttcggttttagcgttcggggcgtaaagtaagggcgtaaattttgttcgaggcggcgacggttgcg

SEQ ID NO: 35176 - DNA, 649 bp, Artificial Sequence
  chemically treated genomic DNA (Homo sapiens) CpG-island No: 35176
  unsure (356, 515, 587)
cgcaaccgtcgccgcctcgaacaaaatttacgcccttactttacgccccgaacgctaaaaccgaacgaacgatacccgcgacgtaaaaacgcccgcgacgaacgccgacctctatcctaatctcctactccccccgccccgcttatcccgtacccttataaccctaactttaacgccgtcgcccaaacgccccgcaatataactacccctacgcctcgacgaaaaacgtcctaccccgcgaacgcccgaaacccgtaactcgacctaaaaactcaaccgaactcgaacgaaaccgaaaccgcgataacgatacaccgaacccgttaacgccaaaaacgccaaacaactaaaacganaaacaaaccctccctcgaaaaaaccgcgcccccgaccccgccgatcccgccgcgatactattccacaatctatcgaaccccgaaatacacgaaatcatcgacgaaataaaccgcaaaaccaaaaacgaaactcccgccatcaaattcgacatcgaccgnaaaaccccgaaaacgtaaacgcgcgaatataaaatcgaaactaaaaacttaaaataaacccgaacaaaacgnaccttttatcccccaaatttaaaaaaacgtccttcgaaccgccataaaactaaaaacgtaaa

SEQ ID NO: 35177 - DNA, 898 bp, Artificial Sequence
  chemically treated genomic DNA (Homo sapiens) CpG-island No: 35177
tagtttcgttttgtatcgttatcgttacgtataaggcggtgtgtgggtagttcggacgtggtatttgtttttagttgtttaatttcgggcgtcgcgacggttacgtgtatagcggtaggtttttttgtttcgttttcgcggttcggtttttgcgtgggttcggtttcgtttatagttcgcgtagtttcgcgagtttggtttcggcggttttagtttttaaggagttcgtgagggttaggttgcgtttgcgtcgggcggttggtgggcggggcgagggtcgttggggtcgcgaagtggggcggtcgggtgggttacgagtcgggtttgggttgaggggcgcggtttcgcggtggattttagttcggtaacgggaaggcgagtttttttttatcgtttaaagtaaattttgtcgtttttttcgcggcgttttcgagttttcgtcgtcgtcgggtcgtcgtagttcgcgaagagtcgttttgcgttagggtttttttttttgtttcggcgcggggttattgcgttatggacgttatagtattggagcgggacgttgtgtagttcgttcgtttggcggtttagcgcgattacgaaggtcgttatttcgaggcggtgttttattataaggtagggtcgggttcggcgtttcggtcggagttgtttagtcggagtgcggttcgggtttgcggtcgaggggcgggattcgggtgcggaggttagcggtttcggttttgtttttttttcgttcgtttttcggttttttttttgttgggagcggtaagttcgagtgtagaggtcgacgttgaggttgcggggaggttgggtcgcggttgtagtcgtcgtttttttatttgtagttttgattggtaaatgtttatcgttgagtcgttttggggggtag

SEQ ID NO: 35178 - DNA, 898 bp, Artificial Sequence
  chemically treated genomic DNA (Homo sapiens) CpG-island No: 35178
ctaccccccaaaacgactcaacgataaacatttaccaatcaaaactacaaataaaaaaacgacgactacaaccgcgacccaacctccccgcaacctcaacgtcgacctctacactcgaacttaccgctcccaacaaaaaaaaaaccgaaaaacgaacgaaaaaaaaacaaaaccgaaaccgctaacctccgcacccgaatcccgcccctcgaccgcaaacccgaaccgcactccgactaaacaactccgaccgaaacgccgaacccgaccctaccttataataaaacaccgcctcgaaataacgaccttcgtaatcgcgctaaaccgccaaacgaacgaactacacaacgtcccgctccaatactataacgtccataacgcaataaccccgcgccgaaacaaaaaaaaaaaccctaacgcaaaacgactcttcgcgaactacgacgacccgacgacgacgaaaactcgaaaacgccgcgaaaaaaacgacaaaatttactttaaacgataaaaaaaaactcgccttcccgttaccgaactaaaatccaccgcgaaaccgcgcccctcaacccaaacccgactcgtaacccacccgaccgccccacttcgcgaccccaacgaccctcgccccgcccaccaaccgcccgacgcaaacgcaacctaaccctcacgaactccttaaaaactaaaaccgccgaaaccaaactcgcgaaactacgcgaactataaacgaaaccgaacccacgcaaaaaccgaaccgcgaaaacgaaacaaaaaaacctaccgctatacacgtaaccgtcgcgacgcccgaaattaaacaactaaaaacaaataccacgtccgaactacccacacaccgccttatacgtaacgataacgatacaaaacgaaacta

SEQ ID NO: 35179 - DNA, 898 bp, Artificial Sequence
  chemically treated genomic DNA (Homo sapiens) CpG-island No: 35179
ttgttttttaaagcggtttaacggtgggtatttgttagttaggattataggtggaggagcggcggttgtagtcgcgatttagttttttcgtagttttagcgtcggtttttgtattcgggtttgtcgtttttaataagaggagggtcgggaggcggacgagggaaaagtaaagtcggggtcgttagttttcgtattcggatttcgtttttcggtcgtaggttcgggtcgtatttcgattgagtaatttcgatcgaagcgtcgggttcggttttattttgtaataaaatatcgtttcggagtagcggttttcgtggtcgcgttgaatcgttagacgggcgaattgtatagcgtttcgttttagtgttgtggcgtttatggcgtagtggtttcgcgtcggggtagggaaggaggttttgacgtaggacggtttttcgcggattgcggcggttcggcggcggcgaggattcgggagcgtcgcggaaggagcggtaaagtttattttggacggtggaggagagttcgttttttcgttgtcgggttggggtttatcgcgaagtcgcgttttttagtttagattcggttcgtagtttattcggtcgttttatttcgcggttttagcggttttcgtttcgtttattagtcgttcgacgtaggcgtagtttggtttttacgagttttttagaagttggggtcgtcgaggttaggttcgcgggattgcgcgggttgtgggcggggtcgggtttacgtaggagtcgggtcgcgggggcggggtaaaaaggtttgtcgttgtgtacgtgatcgtcgcggcgttcgggattgagtagttgagggtaggtgttacgttcgagttgtttatatatcgttttatgcgtggcggtggcggtgtagggcgaggttg

SEQ ID NO: 35180 - DNA, 898 bp, Artificial Sequence
  chemically treated genomic DNA (Homo sapiens) CpG-island No: 35180
caacctcgccctacaccgccaccgccacgcataaaacgatatataaacaactcgaacgtaacacctaccctcaactactcaatcccgaacgccgcgacgatcacgtacacaacgacaaacctttttaccccgcccccgcgacccgactcctacgtaaacccgaccccgcccacaacccgcgcaatcccgcgaacctaacctcgacgaccccaacttctaaaaaactcgtaaaaaccaaactacgcctacgtcgaacgactaataaacgaaacgaaaaccgctaaaaccgcgaaataaaacgaccgaataaactacgaaccgaatctaaactaaaaaacgcgacttcgcgataaaccccaacccgacaacgaaaaaacgaactctcctccaccgtccaaaataaactttaccgctccttccgcgacgctcccgaatcctcgccgccgccgaaccgccgcaatccgcgaaaaaccgtcctacgtcaaaacctccttccctaccccgacgcgaaaccactacgccataaacgccacaacactaaaacgaaacgctatacaattcgcccgtctaacgattcaacgcgaccacgaaaaccgctactccgaaacgatattttattacaaaataaaaccgaacccgacgcttcgatcgaaattactcaatcgaaatacgacccgaacctacgaccgaaaaacgaaatccgaatacgaaaactaacgaccccgactttacttttccctcgtccgcctcccgaccctcctcttattaaaaacgacaaacccgaatacaaaaaccgacgctaaaactacgaaaaaactaaatcgcgactacaaccgccgctcctccacctataatcctaactaacaaatacccaccgttaaaccgctttaaaaaacaa

SEQ ID NO: 35181 - DNA, 598 bp, Artificial Sequence
  chemically treated genomic DNA (Homo sapiens) CpG-island No: 35181
agtagcgtagcgtagcgagtttcgtggtcgcgttttaatagcgttcgatagttttcgatagtttaaatcgcggttttagtttcggtcgtatttttagttcgcgttagtatgatgaataatagcggttatttagacgtcggtttcggtttgggcgatgagatagacgagatgtcgtttacggagaaggatttggcggaggacgcgtcgtggaagaagatttagtagaatatatttacgcgttggtgtaatgagtattttaagtgcgtgggtaagcgtttgatcgatttgtagcgcgattttagcgacgggtttcggtttatcgcgttgttcgaggtgtttagttagaagcgtatgtatcgtaagttttattcgcgttttaattttcgttaaatgaagttggagaacgtgttcgtggttttcgagtttttcgagcgcgagtatattaagttcgtgtttataggttagtgtcgggggcgagggtacgggcgttgcggggatagggtcgttttatggggtaggggtataggtgcggggtgggcgcgcggggagttgaggagatagggacggagaggtatttttcggatatagagagaagatt

SEQ ID NO: 35182 - DNA, 598 bp, Artificial Sequence
  chemically treated genomic DNA (Homo sapiens) CpG-island No: 35182
aatcttctctctatatccgaaaaatacctctccgtccctatctcctcaactccccgcgcgcccaccccgcacctatacccctaccccataaaacgaccctatccccgcaacgcccgtaccctcgcccccgacactaacctataaacacgaacttaatatactcgcgctcgaaaaactcgaaaaccacgaacacgttctccaacttcatttaacgaaaattaaaacgcgaataaaacttacgatacatacgcttctaactaaacacctcgaacaacgcgataaaccgaaacccgtcgctaaaatcgcgctacaaatcgatcaaacgcttacccacgcacttaaaatactcattacaccaacgcgtaaatatattctactaaatcttcttccacgacgcgtcctccgccaaatccttctccgtaaacgacatctcgtctatctcatcgcccaaaccgaaaccgacgtctaaataaccgctattattcatcatactaacgcgaactaaaaatacgaccgaaactaaaaccgcgatttaaactatcgaaaactatcgaacgctattaaaacgcgaccacgaaactcgctacgctacgctact

SEQ ID NO: 35183 - DNA, 598 bp, Artificial Sequence
  chemically treated genomic DNA (Homo sapiens) CpG-island No: 35183
ggttttttttttatattcggggggtgttttttcgtttttgtttttttagtttttcgcgcgtttatttcgtatttgtgtttttgttttatgggacgattttattttcgtagcgttcgtgttttcgttttcggtattgatttatggatacgagtttgatgtgttcgcgttcgaggaattcgagggttacggatacgttttttagttttatttggcggaagttggggcgcggatggaatttgcggtatatgcgtttttggttgagtatttcgagtagcgcgatgagtcggagttcgtcgttgaggtcgcgttgtaggtcggttaggcgtttgtttacgtatttgaggtgtttattgtattagcgcgtgaatgtgttttgttggatttttttttacggcgcgtttttcgttaggttttttttcgtggacggtatttcgtttgttttatcgtttaggtcgaggtcggcgtttgagtagtcgttgttgtttattatgttggcgcgggttgggggtgcggtcggggttagggtcgcggtttgggttatcgggggttgtcgggcgttgttggggcgcgattacgggattcgttgcgttgcgttgtt

SEQ ID NO: 35184 - DNA, 598 bp, Artificial Sequence
  chemically treated genomic DNA (Homo sapiens) CpG-island No: 35184
aacaacgcaacgcaacgaatcccgtaatcgcgccccaacaacgcccgacaacccccgataacccaaaccgcgaccctaaccccgaccgcacccccaacccgcgccaacataataaacaacaacgactactcaaacgccgacctcgacctaaacgataaaacaaacgaaataccgtccacgaaaaaaaacctaacgaaaaacgcgccgtaaaaaaaaatccaacaaaacacattcacgcgctaatacaataaacacctcaaatacgtaaacaaacgcctaaccgacctacaacgcgacctcaacgacgaactccgactcatcgcgctactcgaaatactcaaccaaaaacgcatataccgcaaattccatccgcgccccaacttccgccaaataaaactaaaaaacgtatccgtaaccctcgaattcctcgaacgcgaacacatcaaactcgtatccataaatcaataccgaaaacgaaaacacgaacgctacgaaaataaaatcgtcccataaaacaaaaacacaaatacgaaataaacgcgcgaaaaactaaaaaaacaaaaacgaaaaaacaccccccgaatataaaaaaaaaacc

SEQ ID NO: 35185 - DNA, 793 bp, Artificial Sequence
  chemically treated genomic DNA (Homo sapiens) CpG-island No: 35185
cgttaatacgtatataagaatatcgaggatatataattttttatattagacgagattaataacgtattaagaagagagcggagtaataaaagtatacgttacgagaagtagttcgagtattaagagatagatgggtagaatagtatgagagcgagatagagagaggcggagaattataggggaggtaagcgacgcggaggaaggtagtattgagtagcgttttgggtagatacggagaagatagagtcgaacgaattagaggagatatagtcgataaaagaggagcggagaagaaagtatggaggtttgagtagaatacggagcgggcgtcgagggggagtaatagaatgatgttggagacgcgtagagacgtacggattcgagcggaacggagtaggagaggagggtagtagaaatcggaggaaggacgcgcgcgtaggcgagtaggggcgagagataggagcgaaggaagggcgagaacggatagaagagagaacgagtagggcgcgcgagcgaggaggaaacgttaagggtagatgcgcgttcgagcgaagcgacgacgtgtattagaggcggatcgttatagttcggtaggcgcgttacgacgtacgagtacggagaggatatagagaagaggtaagacgaggtagaaagcgagagagtacgggagagaagggaggcgaaggaggagggacggcgagagcgggcgcgggcggaacgtaagaacggcgagatcggagtatatcgatagagggaggacgaacgagaggatgacgagcgcgtaggggaggga

SEQ ID NO: 35186 - DNA, 793 bp, Artificial Sequence
  chemically treated genomic DNA (Homo sapiens) CpG-island No: 35186
tccctcccctacgcgctcgtcatcctctcgttcgtcctccctctatcgatatactccgatctcgccgttcttacgttccgcccgcgcccgctctcgccgtccctcctccttcgcctcccttctctcccgtactctctcgctttctacctcgtcttacctcttctctatatcctctccgtactcgtacgtcgtaacgcgcctaccgaactataacgatccgcctctaatacacgtcgtcgcttcgctcgaacgcgcatctacccttaacgtttcctcctcgctcgcgcgccctactcgttctctcttctatccgttctcgcccttccttcgctcctatctctcgcccctactcgcctacgcgcgcgtccttcctccgatttctactaccctcctctcctactccgttccgctcgaatccgtacgtctctacgcgtctccaacatcattctattactccccctcgacgcccgctccgtattctactcaaacctccatactttcttctccgctcctcttttatcgactatatctcctctaattcgttcgactctatcttctccgtatctacccaaaacgctactcaatactaccttcctccgcgtcgcttacctcccctataattctccgcctctctctatctcgctctcatactattctacccatctatctcttaatactcgaactacttctcgtaacgtatacttttattactccgctctcttcttaatacgttattaatctcgtctaatataaaaaattatatatcctcgatattcttatatacgtattaacg

SEQ ID NO: 35187 - DNA, 793 bp, Artificial Sequence
  chemically treated genomic DNA (Homo sapiens) CpG-island No: 35187
ttttttttttacgcgttcgttattttttcgttcgttttttttttgtcggtgtgtttcggtttcgtcgtttttacgtttcgttcgcgttcgttttcgtcgttttttttttttcgttttttttttttttcgtattttttcgttttttgtttcgttttgttttttttttgtgtttttttcgtattcgtgcgtcgtggcgcgtttgtcgagttgtggcggttcgtttttggtgtacgtcgtcgtttcgttcgagcgcgtatttgtttttgacgtttttttttcgttcgcgcgttttgttcgtttttttttttgttcgttttcgtttttttttcgtttttgtttttcgtttttgttcgtttgcgcgcgcgtttttttttcggtttttgttattttttttttttgtttcgtttcgttcgagttcgtgcgtttttgcgcgtttttagtattattttgttgttttttttcggcgttcgtttcgtgttttatttaagtttttatgttttttttttcgttttttttttgtcggttgtgttttttttggttcgttcggttttgtttttttcgtgtttgtttagggcgttgtttagtgttgttttttttcgcgtcgtttattttttttgtggtttttcgtttttttttgtttcgtttttatattattttatttatttgttttttggtgttcgggttgtttttcgtggcgtgtgtttttattgtttcgttttttttttggtgcgttattggtttcgtttgatgtagggggttgtgtgttttcgatgtttttgtgtgcgtgttggcg

SEQ ID NO: 35188 - DNA, 793 bp, Artificial Sequence
  chemically treated genomic DNA (Homo sapiens) CpG-island No: 35188
cgccaacacgcacacaaaaacatcgaaaacacacaaccccctacatcaaacgaaaccaataacgcaccaaaaaaaaaacgaaacaataaaaacacacgccacgaaaaacaacccgaacaccaaaaaacaaataaataaaataatataaaaacgaaacaaaaaaaaacgaaaaaccacaaaaaaaataaacgacgcgaaaaaaaacaacactaaacaacgccctaaacaaacacgaaaaaaacaaaaccgaacgaaccaaaaaaaacacaaccgacaaaaaaaaaacgaaaaaaaaaacataaaaacttaaataaaacacgaaacgaacgccgaaaaaaaacaacaaaataatactaaaaacgcgcaaaaacgcacgaactcgaacgaaacgaaacaaaaaaaaaaaataacaaaaaccgaaaaaaaaacgcgcgcgcaaacgaacaaaaacgaaaaacaaaaacgaaaaaaaaacgaaaacgaacaaaaaaaaaaacgaacaaaacgcgcgaacgaaaaaaaaacgtcaaaaacaaatacgcgctcgaacgaaacgacgacgtacaccaaaaacgaaccgccacaactcgacaaacgcgccacgacgcacgaatacgaaaaaaacacaaaaaaaaaacaaaacgaaacaaaaaacgaaaaaatacgaaaaaaaaaaaaaacgaaaaaaaaaaaacgacgaaaacgaacgcgaacgaaacgtaaaaacgacgaaaccgaaacacaccgacaaaaaaaaaacgaacgaaaaaataacgaacgcgtaaaaaaaaaa

SEQ ID NO: 35189 - DNA, 583 bp, Artificial Sequence
  chemically treated genomic DNA (Homo sapiens) CpG-island No: 35189
ggaaaacgcggtagtagtttgaggtcgtttttcggcggggacgagtgaattacgaataaagatcgggtttcgagaagatcgggaaaaagaaaaatttttaaacgattaaggacgagagtttaaaaaatatcggagcgagatataattaggagaggggtaaatttttaaggacggtcgacgaggaattacgatggaatataaataattaaatacgataataggggatataagtttattatattagaacggaatatattgcgtttttgggagaaggcgacgaaattacgcgtaagtaaagagagatatagtagaaaaggatcgagcgatcgtaagggtatttttcgtattagtagaggagagagatataacgcgggagatacgacgataacgtataataaattataatagtgtaagatagatttaatataggatagcgagtaacgaagcgcgtagaagataattataaggaataaagcgtcgagaagaattcgttattataagaaaaaggtagagacgacgtattaataagaaagagggacgaggattcgaagacgcgggagggaagacgataataaataagagt

SEQ ID NO: 35190 - DNA, 583 bp, Artificial Sequence
  chemically treated genomic DNA (Homo sapiens) CpG-island No: 35190
actcttatttattatcgtcttccctcccgcgtcttcgaatcctcgtccctctttcttattaatacgtcgtctctacctttttcttataataacgaattcttctcgacgctttattccttataattatcttctacgcgcttcgttactcgctatcctatattaaatctatcttacactattataatttattatacgttatcgtcgtatctcccgcgttatatctctctcctctactaatacgaaaaatacccttacgatcgctcgatccttttctactatatctctctttacttacgcgtaatttcgtcgccttctcccaaaaacgcaatatattccgttctaatataataaacttatatcccctattatcgtatttaattatttatattccatcgtaattcctcgtcgaccgtccttaaaaatttacccctctcctaattatatctcgctccgatattttttaaactctcgtccttaatcgtttaaaaatttttctttttcccgatcttctcgaaacccgatctttattcgtaattcactcgtccccgccgaaaaacgacctcaaactactaccgcgttttcc

SEQ ID NO: 35191 - DNA, 583 bp, Artificial Sequence
  chemically treated genomic DNA (Homo sapiens) CpG-island No: 35191
gtttttgtttgttgtcgttttttttttcgcgttttcggattttcgttttttttttttgttggtgcgtcgtttttgttttttttttgtggtgacgggtttttttcggcgttttgttttttgtggttgttttttgcgcgtttcgttgttcgttgttttgtgttggatttgttttgtattgttgtggtttgttgtgcgttgtcgtcgtatttttcgcgttgtgttttttttttttgttggtgcggggggtgtttttgcggtcgttcggtttttttttgttgtatttttttttgtttgcgcgtggtttcgtcgtttttttttagggacgtagtgtgtttcgttttggtgtggtgagtttgtgttttttgttgtcgtgtttgattgtttgtattttatcgtggtttttcgtcggtcgtttttgggggtttgttttttttttggttgtgtttcgtttcggtgttttttgggttttcgtttttggtcgtttgggggtttttttttttttcgattttttcggggttcggtttttgttcgtggtttattcgttttcgtcggggggcggttttaggttgttgtcgcgtttttt

SEQ ID NO: 35192 - DNA, 583 bp, Artificial Sequence
  chemically treated genomic DNA (Homo sapiens) CpG-island No: 35192
aaaaaacgcgacaacaacctaaaaccgccccccgacgaaaacgaataaaccacgaacaaaaaccgaaccccgaaaaaatcgaaaaaaaaaaaaacccccaaacgaccaaaaacgaaaacccaaaaaacaccgaaacgaaacacaaccaaaaaaaaaacaaacccccaaaaacgaccgacgaaaaaccacgataaaatacaaacaatcaaacacgacaacaaaaaacacaaactcaccacaccaaaacgaaacacactacgtccctaaaaaaaaacgacgaaaccacgcgcaaacaaaaaaaaatacaacaaaaaaaaaccgaacgaccgcaaaaacaccccccgcaccaacaaaaaaaaaaaacacaacgcgaaaaatacgacgacaacgcacaacaaaccacaacaatacaaaacaaatccaacacaaaacaacgaacaacgaaacgcgcaaaaaacaaccacaaaaaacaaaacgccgaaaaaaacccgtcaccacaaaaaaaaaacaaaaacgacgcaccaacaaaaaaaaaaaacgaaaatccgaaaacgcgaaaaaaaaaacgacaacaaacaaaaac

SEQ ID NO: 35193 - DNA, 1752 bp, Artificial Sequence
  chemically treated genomic DNA (Homo sapiens) CpG-island No: 35193
gcgtggcggggtttttaggagcggtagttcgtgcggtttgggggcggtttttttttcgtatcgtagcggggcgtgtaaagcgtttgcggttgtagtgtgggcgtttattttacgtgttcggcggcgtgcgaggagtagtaatattttttgtgggcgatgaaggtggataggttgttgaatttgatgttgtaaagacggtagtatcggtggttgtcgttgggtagcggcgtcggcgtgtttttgttgggagtttggacgtttttgttcgagtaggaggggggcgtcggcgggggcggtacggtttcgggcgcggcggtcggggacgggggcgggtcgggcggcggtttttggggtttcgggtcgaggtcgtttcgggggttacgggattcgggttgcggggaggcggcgggggcgggagcgggcgaggggtcgcggtcggtcggcgttcgggtttcgattttcgggtcggttaggggcgcgtcgagtagtaggtcgtgcgttaggcggaaatgttttagtaggttttcgcgtatcgggtcgttcggggggtagtaggggtaggcggcggcgggtaggtcgagcgcgtcgggcggtggcgtagcggggtacgagtattttttgtgcgttaggtaggtttcgaggttgtggaagtttacgcggtaggtcgtgtattcgtggtagtcggttagcgtcggtgtcggggtttcggggagcgggcgtcgcggttttttgtttaggtcgatggggtcgtcggtcgcggggtcgggcgagcgcgtaggggcgaggtcggggtcgttttcgttttcgttttcgggtcgcggcgattcgggcgcgggggcgtggtcgggcggcggggggggcggggcgtcggtcgcgtgtagttcgtagagtttgcggcgtttgcgcgtgcgtataggcgcggcgggagagggggtcgggggcgcggtcggtttagggggtttcgggggcgcggtcggtcggcgcggcggcgggtcgtggcgcgaggcgtagtagtatcgtttgtgtacggtgtaggtttcgtggcggttgaagcggatgttgtaggtttcgtatagcgtgcggttggggtcgtttttcgcgtcgtttacggagttattcgggttttggttgttttcgttgtttcggtcgttcgcgtcgttttcgggcgtggtcgcgtttttagtttttttttcgcgcgtttcggggttcggggacgagcgcggcgcgtcgggttcggcgggttggtcggggggcgcgcgggtcgggtcggggggcgttttgggtttgcgcgcggtaggcgcgttttcgggcgtacggcggtttgaatagtagaggcgtttgtgtacgtagtagttgttgacgttgttgaaggtgatttcgtattcgaagtacgtagcgtttttgggggtttcggggaagagttcggtttgcgcgtcgtcggcgttcgcgttcgcgttttgttgtagtcggttgtgtattagttcggatattttggttaggattttcgaggcggggggcgtcgcgtcgggttcgaatacgtattgcggaaggaatagggtttcggttaggtttagttcgtcgggtatcgggttggagttcggcgtggggttggatagttcggttttgatttggtcggggcggggttgcgcggcgacggcgttcgcgacggggtttggggtttaggtttttcggggtttaggatgggggtcgttttcggtttttttatcgtttttattttgatgtttttggggg

SEQ ID NO: 35194 - DNA, 1752 bp, Artificial Sequence
  chemically treated genomic DNA (Homo sapiens) CpG-island No: 35194
cccccaaaaacatcaaaataaaaacgataaaaaaaccgaaaacgacccccatcctaaaccccgaaaaacctaaaccccaaaccccgtcgcgaacgccgtcgccgcgcaaccccgccccgaccaaatcaaaaccgaactatccaaccccacgccgaactccaacccgatacccgacgaactaaacctaaccgaaaccctattccttccgcaatacgtattcgaacccgacgcgacgccccccgcctcgaaaatcctaaccaaaatatccgaactaatacacaaccgactacaacaaaacgcgaacgcgaacgccgacgacgcgcaaaccgaactcttccccgaaacccccaaaaacgctacgtacttcgaatacgaaatcaccttcaacaacgtcaacaactactacgtacacaaacgcctctactattcaaaccgccgtacgcccgaaaacgcgcctaccgcgcgcaaacccaaaacgccccccgacccgacccgcgcgccccccgaccaacccgccgaacccgacgcgccgcgctcgtccccgaaccccgaaacgcgcgaaaaaaaaactaaaaacgcgaccacgcccgaaaacgacgcgaacgaccgaaacaacgaaaacaaccaaaacccgaataactccgtaaacgacgcgaaaaacgaccccaaccgcacgctatacgaaacctacaacatccgcttcaaccgccacgaaacctacaccgtacacaaacgatactactacgcctcgcgccacgacccgccgccgcgccgaccgaccgcgcccccgaaaccccctaaaccgaccgcgcccccgaccccctctcccgccgcgcctatacgcacgcgcaaacgccgcaaactctacgaactacacgcgaccgacgccccgccccccccgccgcccgaccacgcccccgcgcccgaatcgccgcgacccgaaaacgaaaacgaaaacgaccccgacctcgcccctacgcgctcgcccgaccccgcgaccgacgaccccatcgacctaaacaaaaaaccgcgacgcccgctccccgaaaccccgacaccgacgctaaccgactaccacgaatacacgacctaccgcgtaaacttccacaacctcgaaacctacctaacgcacaaaaaatactcgtaccccgctacgccaccgcccgacgcgctcgacctacccgccgccgcctacccctactaccccccgaacgacccgatacgcgaaaacctactaaaacatttccgcctaacgcacgacctactactcgacgcgcccctaaccgacccgaaaatcgaaacccgaacgccgaccgaccgcgacccctcgcccgctcccgcccccgccgcctccccgcaacccgaatcccgtaacccccgaaacgacctcgacccgaaaccccaaaaaccgccgcccgacccgcccccgtccccgaccgccgcgcccgaaaccgtaccgcccccgccgacgcccccctcctactcgaacaaaaacgtccaaactcccaacaaaaacacgccgacgccgctacccaacgacaaccaccgatactaccgtctttacaacatcaaattcaacaacctatccaccttcatcgcccacaaaaaatattactactcctcgcacgccgccgaacacgtaaaataaacgcccacactacaaccgcaaacgctttacacgccccgctacgatacgaaaaaaaaaccgcccccaaaccgcacgaactaccgctcctaaaaaccccgccacgc

SEQ ID NO: 35195 - DNA, 1752 bp, Artificial Sequence
  chemically treated genomic DNA (Homo sapiens) CpG-island No: 35195
tttttaggagtattaaggtggaggcggtggaggagtcggaggcggtttttattttgggtttcggagagtttgggttttaggtttcgtcgcggacgtcgtcgtcgcgtagtttcgtttcggttaggttaaggtcgagttgtttagttttacgtcgggttttagttcggtgttcggcgagttgggtttggtcggggttttgtttttttcgtagtacgtgttcgggttcgacgcggcgtttttcgtttcggagattttggttaagatgttcgagttggtgtatagtcggttgtagtagggcgcgggcgcgggcgtcggcggcgcgtagatcgggttttttttcggggtttttaagggcgttacgtgtttcgagtgcgagattatttttagtaacgttaataattattacgtgtataagcgtttttattgtttaggtcgtcgtgcgttcgaggacgcgtttgtcgcgcgtaggtttaaggcgtttttcggttcggttcgcgcgtttttcggttagttcgtcgaattcgacgcgtcgcgttcgttttcgggtttcggagcgcgcgaggagggggttgggggcgcggttacgttcgaggacggcgcgggcggtcggggtagcgagggtagttagagttcgggtagtttcgtggacgacgcggaggacgattttagtcgtacgttgtgcgaggtttgtaatattcgttttagtcgttacgagatttatatcgtgtataagcggtattattgcgtttcgcgttacgattcgtcgtcgcgtcgatcggtcgcgttttcgggattttttgggtcggtcgcgttttcggttttttttttcgtcgcgtttgtgcgtacgcgtagacgtcgtaagttttacgagttgtacgcggtcggcgtttcgtttttttcgtcgttcggttacgttttcgcgttcgagtcgtcgcggttcggaagcggaagcggaagcggtttcggtttcgtttttgcgcgttcgttcggtttcgcggtcgacggttttatcgatttgagtaagaagtcgcggcgttcgtttttcggagtttcggtatcggcgttggtcgattattacgagtgtacggtttgtcgcgtgagtttttatagtttcgaggtttatttggcgtataagaagtattcgtgtttcgttgcgttatcgttcggcgcgttcggtttgttcgtcgtcgtttgtttttattgtttttcgaacggttcggtgcgcggggatttgttggagtattttcgtttggcgtacggtttgttgttcggcgcgtttttggtcggttcgggggtcgaggttcggacgtcggtcgatcgcggtttttcgttcgttttcgttttcgtcgttttttcgtagttcgggtttcgtggttttcgggacggtttcggttcggagttttaggagtcgtcgttcggttcgttttcgttttcggtcgtcgcgttcgaggtcgtgtcgttttcgtcggcgttttttttttattcggataagggcgtttagatttttagtaagggtacgtcggcgtcgttgtttaacggtaattatcggtattgtcgtttttgtaatattaagtttagtagtttgtttatttttatcgtttataagaagtattattgtttttcgtacgtcgtcgagtacgtgaagtgagcgtttatattatagtcgtagacgttttgtacgtttcgttgcgatgcggggagggggtcgtttttaggtcgtacggattgtcgtttttgggaatttcgttacgt

SEQ ID NO: 35196 - DNA, 1752 bp, Artificial Sequence
  chemically treated genomic DNA (Homo sapiens) CpG-island No: 35196
acgtaacgaaattcccaaaaacgacaatccgtacgacctaaaaacgaccccctccccgcatcgcaacgaaacgtacaaaacgtctacgactataatataaacgctcacttcacgtactcgacgacgtacgaaaaacaataatacttcttataaacgataaaaataaacaaactactaaacttaatattacaaaaacgacaataccgataattaccgttaaacaacgacgccgacgtacccttactaaaaatctaaacgcccttatccgaataaaaaaaaaacgccgacgaaaacgacacgacctcgaacgcgacgaccgaaaacgaaaacgaaccgaacgacgactcctaaaactccgaaccgaaaccgtcccgaaaaccacgaaacccgaactacgaaaaaacgacgaaaacgaaaacgaacgaaaaaccgcgatcgaccgacgtccgaacctcgacccccgaaccgaccaaaaacgcgccgaacaacaaaccgtacgccaaacgaaaatactccaacaaatccccgcgcaccgaaccgttcgaaaaacaataaaaacaaacgacgacgaacaaaccgaacgcgccgaacgataacgcaacgaaacacgaatacttcttatacgccaaataaacctcgaaactataaaaactcacgcgacaaaccgtacactcgtaataatcgaccaacgccgataccgaaactccgaaaaacgaacgccgcgacttcttactcaaatcgataaaaccgtcgaccgcgaaaccgaacgaacgcgcaaaaacgaaaccgaaaccgcttccgcttccgcttccgaaccgcgacgactcgaacgcgaaaacgtaaccgaacgacgaaaaaaacgaaacgccgaccgcgtacaactcgtaaaacttacgacgtctacgcgtacgcacaaacgcgacgaaaaaaaaaaccgaaaacgcgaccgacccaaaaaatcccgaaaacgcgaccgatcgacgcgacgacgaatcgtaacgcgaaacgcaataataccgcttatacacgatataaatctcgtaacgactaaaacgaatattacaaacctcgcacaacgtacgactaaaatcgtcctccgcgtcgtccacgaaactacccgaactctaactaccctcgctaccccgaccgcccgcgccgtcctcgaacgtaaccgcgcccccaaccccctcctcgcgcgctccgaaacccgaaaacgaacgcgacgcgtcgaattcgacgaactaaccgaaaaacgcgcgaaccgaaccgaaaaacgccttaaacctacgcgcgacaaacgcgtcctcgaacgcacgacgacctaaacaataaaaacgcttatacacgtaataattattaacgttactaaaaataatctcgcactcgaaacacgtaacgcccttaaaaaccccgaaaaaaaacccgatctacgcgccgccgacgcccgcgcccgcgccctactacaaccgactatacaccaactcgaacatcttaaccaaaatctccgaaacgaaaaacgccgcgtcgaacccgaacacgtactacgaaaaaaacaaaaccccgaccaaacccaactcgccgaacaccgaactaaaacccgacgtaaaactaaacaactcgaccttaacctaaccgaaacgaaactacgcgacgacgacgtccgcgacgaaacctaaaacccaaactctccgaaacccaaaataaaaaccgcctccgactcctccaccgcctccaccttaatactcctaaaaa

SEQ ID NO: 35197 - DNA, 936 bp, Artificial Sequence
  chemically treated genomic DNA (Homo sapiens) CpG-island No: 35197
cgttttaagtttttattcgttttagtcgcggcgttttcgcgttgttttttaattcggtcgggtttggtggttaaagataaggttttttatcgtttttggcgatcgttatcgggtcgatcggttaggtttttatcggagtttatatcgattcgggcgggaggaaaatttagcgggttgggggcgtcgggggtttcgagttgtttcggtttcgcgtttttcgtcggtagttcggtttatcgttttcgttatttggtcggttaaggtcgcgttttcgtttcgttttgttttcgtttttacgtttgaagttaataaatggaagcgtttattttagttattatcggttgcgcgttttattagcgcggtatatttattttcgtacggaataaaaggcgtatagaggcgcgggtagttgcgttagggttttgatgggggcgcgggtggggggtgggcggttcgaagcgttcggtttttttcgttttgtattcgcggttcggtcgtaggtgaggttagggtagcgggtaggtataggcgttggtaagagggcgggcgggcgggcgtcgtcgtttggtgataattagttttcgtattttaacgtgttgagatttgttatggggaggaggcgtttcgggtcgcgagcgatagggagggttcgcggttttgtttttttcgttcgggttttttttttgtttcggtttcgggtcgtaacgaggatgggtcgcggtggtttatcgtgtattcgtcgcggttttagtttttaaagtgcgcgcgttttgttcgtttcgttgggttgggttacgggttttcgttggcgttggcggttttattagcgttggagatcggtttttaatttgcgatttttttgttcgagttatttgtattttttattatagtgaaatattatatatatatatatatatatatatatatatatatata

SEQ ID NO: 35198 - DNA, 936 bp, Artificial Sequence
  chemically treated genomic DNA (Homo sapiens) CpG-island No: 35198
tatatatatatatatatatatatatatatatatatataatatttcactataataaaaaatacaaataactcgaacaaaaaaatcgcaaattaaaaaccgatctccaacgctaataaaaccgccaacgccaacgaaaacccgtaacccaacccaacgaaacgaacaaaacgcgcgcactttaaaaactaaaaccgcgacgaatacacgataaaccaccgcgacccatcctcgttacgacccgaaaccgaaacaaaaaaaaaacccgaacgaaaaaaacaaaaccgcgaaccctccctatcgctcgcgacccgaaacgcctcctccccataacaaatctcaacacgttaaaatacgaaaactaattatcaccaaacgacgacgcccgcccgcccgccctcttaccaacgcctatacctacccgctaccctaacctcacctacgaccgaaccgcgaatacaaaacgaaaaaaaccgaacgcttcgaaccgcccaccccccacccgcgcccccatcaaaaccctaacgcaactacccgcgcctctatacgccttttattccgtacgaaaataaatataccgcgctaataaaacgcgcaaccgataataactaaaataaacgcttccatttattaacttcaaacgtaaaaacgaaaacaaaacgaaacgaaaacgcgaccttaaccgaccaaataacgaaaacgataaaccgaactaccgacgaaaaacgcgaaaccgaaacaactcgaaacccccgacgcccccaacccgctaaattttcctcccgcccgaatcgatataaactccgataaaaacctaaccgatcgacccgataacgatcgccaaaaacgataaaaaaccttatctttaaccaccaaacccgaccgaattaaaaaacaacgcgaaaacgccgcgactaaaacgaataaaaacttaaaacg

SEQ ID NO: 35199 - DNA, 936 bp, Artificial Sequence
  chemically treated genomic DNA (Homo sapiens) CpG-island No: 35199
tgtgtgtgtgtgtgtgtgtgtgtgtgtgtgtgtgtgtggtgttttattgtgatgagaaatgtagatagttcggatagggagatcgtaggttggaaatcgatttttagcgttgataaggtcgttagcgttagcgagagttcgtagtttagtttagcggggcgggtagagcgcgcgtattttgggaattgggatcgcggcgggtgtacggtgagttatcgcggtttattttcgttgcggttcgggatcggggtagagaaagggttcggacgaggaaggtagggtcgcggattttttttgtcgttcgcggttcggggcgttttttttttatggtagattttagtacgttaagatgcgaaggttgattgttattaagcggcggcgttcgttcgttcgtttttttgttagcgtttgtgtttgttcgttgttttggttttatttgcggtcgggtcgcgagtgtagagcggagggggtcgagcgtttcgggtcgtttattttttattcgcgtttttattaaagttttggcgtagttgttcgcgtttttgtgcgttttttgtttcgtgcggagatagatgtgtcgcgttgataaggcgcgtaatcgatggtggttgagataggcgtttttatttattaattttaaacgtgggagcgggggtagggcgaggcgggagcgcggttttggtcggttagatggcggaggcgataggtcgggttgtcgacggggagcgcggggtcggggtagttcgggattttcggcgtttttagttcgttgggtttttttttcgttcgagtcgatgtgagtttcgataagagtttggtcggtcggttcgatggcgatcgttaagagcgataagaggttttatttttggttattaggttcggtcgggttggagaatagcgcgggggcgtcgcgattggggcgagtgggggtttggaacg

SEQ ID NO: 35200 - DNA, 936 bp, Artificial Sequence
  chemically treated genomic DNA (Homo sapiens) CpG-island No: 35200
cgttccaaacccccactcgccccaatcgcgacgcccccgcgctattctccaacccgaccgaacctaataaccaaaaataaaacctcttatcgctcttaacgatcgccatcgaaccgaccgaccaaactcttatcgaaactcacatcgactcgaacgaaaaaaaaacccaacgaactaaaaacgccgaaaatcccgaactaccccgaccccgcgctccccgtcgacaacccgacctatcgcctccgccatctaaccgaccaaaaccgcgctcccgcctcgccctacccccgctcccacgtttaaaattaataaataaaaacgcctatctcaaccaccatcgattacgcgccttatcaacgcgacacatctatctccgcacgaaacaaaaaacgcacaaaaacgcgaacaactacgccaaaactttaataaaaacgcgaataaaaaataaacgacccgaaacgctcgaccccctccgctctacactcgcgacccgaccgcaaataaaaccaaaacaacgaacaaacacaaacgctaacaaaaaaacgaacgaacgaacgccgccgcttaataacaatcaaccttcgcatcttaacgtactaaaatctaccataaaaaaaaaacgccccgaaccgcgaacgacaaaaaaaatccgcgaccctaccttcctcgtccgaaccctttctctaccccgatcccgaaccgcaacgaaaataaaccgcgataactcaccgtacacccgccgcgatcccaattcccaaaatacgcgcgctctacccgccccgctaaactaaactacgaactctcgctaacgctaacgaccttatcaacgctaaaaatcgatttccaacctacgatctccctatccgaactatctacatttctcatcacaataaaacaccacacacacacacacacacacacacacacacacacaca

SEQ ID NO: 35201 - DNA, 823 bp, Artificial Sequence
  chemically treated genomic DNA (Homo sapiens) CpG-island No: 35201
cgtcgtattatttcgtagatgcgggggaggggtaggtcgcgaggggtcgagttgttcgggtcgcgtttttaaatatttttttttcggttttcgggcggtttttttttgggttgaatttttcggtgtttaagtcgagacgcgggggtttaggtcgtcggcggagattagattacggcgcgtttggtatagcgcggggggcgcggcgcggggtgaaggtcgtcggcgtttagggtagagcggggacgggcgggggcggcgttggcggttgggtttcggcgggggtcgggcgcgcggaggggatcgcgggtaaagtttgatttacgtttgatttgtcgggggttgttttgttttcgtttggatatgttttcggcgtcgcgcgttttttcggcggtcgtttttagtttcgggcgggcggcggcgggcggcgggggcgcggcggggtcgcggggtcgtttatgttttcggttttcggttttcgcggtcgtttcggttcgcgtttttagttcgcgcgtttagtttcggagtcgttggagttgtcgcggaggttcgagaggttacggttttgcgttgcgggcgcgcggattgttcgacgggcgggtgtcggttttttcgttttcgcgtattcgtcgtcgtcgtcgcggtcgttcggttttttttaatggaattcgcgggcggcgagcggcggagtaggcggttattgcgagggcgtttttggcgggttggaggtacggggcggggtcgggtttgagcgtcgtcggtcgtcgtatttttcgtttcgtttcgggataggatataacgtttataacggagataatggatataa

SEQ ID NO: 35202 - DNA, 823 bp, Artificial Sequence
  chemically treated genomic DNA (Homo sapiens) CpG-island No: 35202
ttatatccattatctccgttataaacgttatatcctatcccgaaacgaaacgaaaaatacgacgaccgacgacgctcaaacccgaccccgccccgtacctccaacccgccaaaaacgccctcgcaataaccgcctactccgccgctcgccgcccgcgaattccattaaaaaaaaccgaacgaccgcgacgacgacgacgaatacgcgaaaacgaaaaaaccgacacccgcccgtcgaacaatccgcgcgcccgcaacgcaaaaccgtaacctctcgaacctccgcgacaactccaacgactccgaaactaaacgcgcgaactaaaaacgcgaaccgaaacgaccgcgaaaaccgaaaaccgaaaacataaacgaccccgcgaccccgccgcgcccccgccgcccgccgccgcccgcccgaaactaaaaacgaccgccgaaaaaacgcgcgacgccgaaaacatatccaaacgaaaacaaaacaacccccgacaaatcaaacgtaaatcaaactttacccgcgatcccctccgcgcgcccgacccccgccgaaacccaaccgccaacgccgcccccgcccgtccccgctctaccctaaacgccgacgaccttcaccccgcgccgcgccccccgcgctataccaaacgcgccgtaatctaatctccgccgacgacctaaacccccgcgtctcgacttaaacaccgaaaaattcaacccaaaaaaaaaccgcccgaaaaccgaaaaaaaaatatttaaaaacgcgacccgaacaactcgacccctcgcgacctacccctcccccgcatctacgaaataatacgacg

SEQ ID NO: 35203 - DNA, 823 bp, Artificial Sequence
  chemically treated genomic DNA (Homo sapiens) CpG-island No: 35203
ttgtgtttattgttttcgttatagacgttgtgttttatttcggggcggggcgggaggtgcggcggtcgacgacgtttaggttcggtttcgtttcgtgtttttagttcgttaggagcgttttcgtagtggtcgtttgtttcgtcgttcgtcgttcgcgggttttattgagaaaagtcgagcggtcgcggcggcggcggcgagtgcgcgggagcggaggagtcggtattcgttcgtcgggtagttcgcgcgttcgtaacgtaggatcgtggtttttcgggttttcgcggtagttttagcggtttcggggttgggcgcgcgggttgggggcgcgggtcggggcggtcgcggagatcgggggtcgggggtatgagcggtttcgcggtttcgtcgcgttttcgtcgttcgtcgtcgttcgttcggggttagaggcggtcgtcgggagggcgcgcggcgtcggagatatgtttaggcggaaatagagtaattttcggtagattaagcgtgagttaaattttgttcgcggtttttttcgcgcgttcgattttcgtcggagtttagtcgttagcgtcgttttcgttcgttttcgttttgttttgggcgtcggcgatttttatttcgcgtcgcgtttttcgcgttgtgttaagcgcgtcgtaatttaattttcgtcggcggtttgggttttcgcgtttcggtttgggtatcggggggtttagtttaggagggggtcgttcggaggtcgggaggagggtgtttgggggcgcggttcgggtagttcggtttttcgcggtttgtttttttttcgtatttgcgagatggtgcggcg

SEQ ID NO: 35204 - DNA, 823 bp, Artificial Sequence
  chemically treated genomic DNA (Homo sapiens) CpG-island No: 35204
cgccgcaccatctcgcaaatacgaaaaaaaaacaaaccgcgaaaaaccgaactacccgaaccgcgcccccaaacaccctcctcccgacctccgaacgaccccctcctaaactaaaccccccgatacccaaaccgaaacgcgaaaacccaaaccgccgacgaaaattaaattacgacgcgcttaacacaacgcgaaaaacgcgacgcgaaataaaaatcgccgacgcccaaaacaaaacgaaaacgaacgaaaacgacgctaacgactaaactccgacgaaaatcgaacgcgcgaaaaaaaccgcgaacaaaatttaactcacgcttaatctaccgaaaattactctatttccgcctaaacatatctccgacgccgcgcgccctcccgacgaccgcctctaaccccgaacgaacgacgacgaacgacgaaaacgcgacgaaaccgcgaaaccgctcatacccccgacccccgatctccgcgaccgccccgacccgcgcccccaacccgcgcgcccaaccccgaaaccgctaaaactaccgcgaaaacccgaaaaaccacgatcctacgttacgaacgcgcgaactacccgacgaacgaataccgactcctccgctcccgcgcactcgccgccgccgccgcgaccgctcgacttttctcaataaaacccgcgaacgacgaacgacgaaacaaacgaccactacgaaaacgctcctaacgaactaaaaacacgaaacgaaaccgaacctaaacgtcgtcgaccgccgcacctcccgccccgccccgaaataaaacacaacgtctataacgaaaacaataaacacaa

SEQ ID NO: 35205 - DNA, 959 bp, Artificial Sequence
  chemically treated genomic DNA (Homo sapiens) CpG-island No: 35205
tagtcgcgttagggggttaattaatttcgatatcgttcggcgttagttgggcgttattaggcgcggatttcggagcgagggtaggtgcgcgggtcggaagtttcgggcgtttatttggtatttatttggagtttatttggcgttcgggtttcgcgtcgtcgtttttcgtttagttcgtcgcgttcgtatttcgcggtttttgaggtttagtaggagtattttttttattagggttagtcgcgtttttttggagtcgtttttgtcgtcgtcgttttgttcgtcgcggcggttttgcgcgtcgttttcgttgttgtcggcgtcgtcgttcgtcgttcgttttttgtcggcggcgttgcgggaggtttcggtgcgtcgttgtattaggtcggagttgcgttgggttagcgaggttatggttttcgtcgaggcgtcgagtcgggtcgagagggtcgtaggatcgatcgggtcgtttttttttttttcgcgcggttttcgattcgggttttcgtgttaaattcggacgtcggggcgacgttcgtcggtagtagggtcgggggtagttatgaggaaataggttaggtcgaagcgggttggtcgggcgtcggcggggtaggagaggagcgtttttttgtttgtggtcgtagttttcgaaatatttcgagttttaaggcggaggcggcggcggcgtttttttaatatggcggtttcggttgacgttatcggaggatgtggtagagtcggcgcgggagagttgggtcgggaggcgtcggaagcggcggtcggggattcgttgttattgtagtttatatttttttcggttttcggtgtttgttttttttttggcgtttttgcgttttttgattcgcggttttgtagttttgttttcgtgacgtgtttttttttttttcgtttttcgttttttttttattatttagggttggagtttgaatttggcgggg

SEQ ID NO: 35206 - DNA, 959 bp, Artificial Sequence
  chemically treated genomic DNA (Homo sapiens) CpG-island No: 35206
ccccgccaaattcaaactccaaccctaaataataaaaaaaaaacgaaaaacgaaaaaaaaaaaaacacgtcacgaaaacaaaactacaaaaccgcgaatcaaaaaacgcaaaaacgccaaaaaaaaaacaaacaccgaaaaccgaaaaaaatataaactacaataacaacgaatccccgaccgccgcttccgacgcctcccgacccaactctcccgcgccgactctaccacatcctccgataacgtcaaccgaaaccgccatattaaaaaaacgccgccgccgcctccgccttaaaactcgaaatatttcgaaaactacgaccacaaacaaaaaaacgctcctctcctaccccgccgacgcccgaccaacccgcttcgacctaacctatttcctcataactacccccgaccctactaccgacgaacgtcgccccgacgtccgaatttaacacgaaaacccgaatcgaaaaccgcgcgaaaaaaaaaaaaacgacccgatcgatcctacgaccctctcgacccgactcgacgcctcgacgaaaaccataacctcgctaacccaacgcaactccgacctaatacaacgacgcaccgaaacctcccgcaacgccgccgacaaaaaacgaacgacgaacgacgacgccgacaacaacgaaaacgacgcgcaaaaccgccgcgacgaacaaaacgacgacgacaaaaacgactccaaaaaaacgcgactaaccctaataaaaaaaatactcctactaaacctcaaaaaccgcgaaatacgaacgcgacgaactaaacgaaaaacgacgacgcgaaacccgaacgccaaataaactccaaataaataccaaataaacgcccgaaacttccgacccgcgcacctaccctcgctccgaaatccgcgcctaataacgcccaactaacgccgaacgatatcgaaattaattaaccccctaacgcgacta

SEQ ID NO: 35207 - DNA, 959 bp, Artificial Sequence
  chemically treated genomic DNA (Homo sapiens) CpG-island No: 35207
tttcgttaggtttaggttttagttttgggtagtgaaggggaaacggggaacggaaggagggagggtacgttacgggagtaggattgtaggatcgcgggttagggggcgtaggaacgttaaagaaaagataagtatcgagggtcgggaagggtgtaggttgtagtggtagcggattttcggtcgtcgttttcggcgtttttcggtttagttttttcgcgtcgattttgttatatttttcggtgacgttagtcggggtcgttatattggaaaggcgtcgtcgtcgttttcgttttggagttcggggtgtttcggggattgcggttataggtaggaaggcgttttttttttgtttcgtcgacgttcggttagttcgtttcggtttgatttgtttttttatgattgttttcggttttgttgtcgacggacgtcgtttcggcgttcggatttaatacggaaattcggatcggaggtcgcgcggggaggaggagggcgattcggtcggttttgcgattttttcggttcggttcggcgtttcggcgggagttatgatttcgttgatttagcgtagtttcggtttggtgtagcggcgtatcgaggtttttcgtaacgtcgtcgataaggagcgggcggcgggcggcggcgtcggtagtagcgaggacgacgcgtagagtcgtcgcgacgagtaggacgacgacgataagggcgattttaaggaaacgcggttgattttgatggaggaagtgtttttgttgggttttaaggatcgcgaggtgcgggcgcggcgggttgggcggggggcggcggcgcggggttcgggcgttaggtgagttttaggtaggtgttaggtgagcgttcgaggttttcggttcgcgtatttgttttcgtttcgaagttcgcgtttggtggcgtttagttgacgtcgagcggtgtcggagttggttgattttttggcgcggttg

SEQ ID NO: 35208 - DNA, 959 bp, Artificial Sequence
  chemically treated genomic DNA (Homo sapiens) CpG-island No: 35208
caaccgcgccaaaaaatcaaccaactccgacaccgctcgacgtcaactaaacgccaccaaacgcgaacttcgaaacgaaaacaaatacgcgaaccgaaaacctcgaacgctcacctaacacctacctaaaactcacctaacgcccgaaccccgcgccgccgccccccgcccaacccgccgcgcccgcacctcgcgatccttaaaacccaacaaaaacacttcctccatcaaaatcaaccgcgtttccttaaaatcgcccttatcgtcgtcgtcctactcgtcgcgacgactctacgcgtcgtcctcgctactaccgacgccgccgcccgccgcccgctccttatcgacgacgttacgaaaaacctcgatacgccgctacaccaaaccgaaactacgctaaatcaacgaaatcataactcccgccgaaacgccgaaccgaaccgaaaaaatcgcaaaaccgaccgaatcgccctcctcctccccgcgcgacctccgatccgaatttccgtattaaatccgaacgccgaaacgacgtccgtcgacaacaaaaccgaaaacaatcataaaaaaacaaatcaaaccgaaacgaactaaccgaacgtcgacgaaacaaaaaaaaaacgccttcctacctataaccgcaatccccgaaacaccccgaactccaaaacgaaaacgacgacgacgcctttccaatataacgaccccgactaacgtcaccgaaaaatataacaaaatcgacgcgaaaaaactaaaccgaaaaacgccgaaaacgacgaccgaaaatccgctaccactacaacctacacccttcccgaccctcgatacttatcttttctttaacgttcctacgccccctaacccgcgatcctacaatcctactcccgtaacgtaccctccctccttccgttccccgtttccccttcactacccaaaactaaaacctaaacctaacgaaa

SEQ ID NO: 35209 - DNA, 781 bp, Artificial Sequence
  chemically treated genomic DNA (Homo sapiens) CpG-island No: 35209
ggttgttggtggatggcgtgaataagtcgaaattgtggttttatttgtcggttgattattgggtataacggtcgaatcgcgtgtcgattttttttttggattgtaagatgtggaatgtgatcgcgttgttacgaaagtcgatggtattggtagtttgttgtttgttgttgacgcggtatatcggttatatcggttcggtgtcggaacgtgcgttgtagaagattttttcgtttatttaatgcgtagtttgttggcgcgtaattcggcgttggaagcggcggttttcgacgatatttattggggttgtgtgtagtagacgttggagtagggttttaatatcgttcgtaacgcggcgttgttggtagaagtattatattttgtttcggcggttatcgttaatcgtttgtgtggtttatttatgtaggtattgtatgacgtagtacgaatgattatgattggcgatgcgtaggtatgtttggttggcggcgtggagtatatgggttatgtgtcgatgagttacggcgtcgatttttatttcggtttgagtcgtaatgtcgttaaagcggcgggtatgatgggtttaacggtagaaatgttggcgcgtatgtacggtattagtcgtgaaatgtaggatgtttttgtcgcgcggttatacgttcgcgtttgggtcgttacgtagtcggtcgtatttaaataatgaaattatttcgatcggtggttacgatgtcgacggcgttttgaagtagtttaatttacgacgaagtgattcgtttaggaaatt

SEQ ID NO: 35210 - DNA, 781 bp, Artificial Sequence
  chemically treated genomic DNA (Homo sapiens) CpG-island No: 35210
aatttcctaaacgaatcacttcgtcgtaaattaaactacttcaaaacgccgtcgacatcgtaaccaccgatcgaaataatttcattatttaaatacgaccgactacgtaacgacccaaacgcgaacgtataaccgcgcgacaaaaacatcctacatttcacgactaataccgtacatacgcgccaacatttctaccgttaaacccatcatacccgccgctttaacgacattacgactcaaaccgaaataaaaatcgacgccgtaactcatcgacacataacccatatactccacgccgccaaccaaacatacctacgcatcgccaatcataatcattcgtactacgtcatacaatacctacataaataaaccacacaaacgattaacgataaccgccgaaacaaaatataatacttctaccaacaacgccgcgttacgaacgatattaaaaccctactccaacgtctactacacacaaccccaataaatatcgtcgaaaaccgccgcttccaacgccgaattacgcgccaacaaactacgcattaaataaacgaaaaaatcttctacaacgcacgttccgacaccgaaccgatataaccgatataccgcgtcaacaacaaacaacaaactaccaataccatcgactttcgtaacaacgcgatcacattccacatcttacaatccaaaaaaaaaatcgacacgcgattcgaccgttatacccaataatcaaccgacaaataaaaccacaatttcgacttattcacgccatccaccaacaacc

SEQ ID NO: 35211 - DNA, 781 bp, Artificial Sequence
  chemically treated genomic DNA (Homo sapiens) CpG-island No: 35211
ggttttttgggcgaattatttcgtcgtaagttaaattgttttaggacgtcgtcggtatcgtgattatcggtcgggatgattttattatttaaatgcggtcgattgcgtggcggtttaggcgcgggcgtgtgatcgcgcggtaaaggtattttgtattttacggttgatatcgtgtatacgcgttagtatttttgtcgttaagtttattatgttcgtcgttttggcgatattgcggtttaggtcggggtgaaaatcgacgtcgtgatttatcggtatatggtttatatgttttacgtcgttaattagatatgtttgcgtatcgttagttatgattattcgtgttgcgttatgtagtgtttgtatggatgaattatataagcgattaacggtaatcgtcgggatagagtgtggtatttttgttagtagcgtcgcgttacgggcgatattaaaattttgttttagcgtttgttgtatataattttagtaaatatcgtcgagggtcgtcgtttttagcgtcgggttacgcgttagtaggttacgtattaaatgagcggagagattttttgtagcgtacgtttcggtatcggatcgatataatcgatatgtcgcgttagtagtagatagtaggttattaatgttatcggttttcgtgatagcgcgattatattttatattttatagtttagaaagaggatcggtacgcggttcgatcgttgtgtttagtaattaatcggtagatagaattatagtttcggtttgtttacgttatttattagtaatt

SEQ ID NO: 35212 - DNA, 781 bp, Artificial Sequence
  chemically treated genomic DNA (Homo sapiens) CpG-island No: 35212
aattactaataaataacgtaaacaaaccgaaactataattctatctaccgattaattactaaacacaacgatcgaaccgcgtaccgatcctctttctaaactataaaatataaaatataatcgcgctatcacgaaaaccgataacattaataacctactatctactactaacgcgacatatcgattatatcgatccgataccgaaacgtacgctacaaaaaatctctccgctcatttaatacgtaacctactaacgcgtaacccgacgctaaaaacgacgaccctcgacgatatttactaaaattatatacaacaaacgctaaaacaaaattttaatatcgcccgtaacgcgacgctactaacaaaaataccacactctatcccgacgattaccgttaatcgcttatataattcatccatacaaacactacataacgcaacacgaataatcataactaacgatacgcaaacatatctaattaacgacgtaaaacatataaaccatataccgataaatcacgacgtcgattttcaccccgacctaaaccgcaatatcgccaaaacgacgaacataataaacttaacgacaaaaatactaacgcgtatacacgatatcaaccgtaaaatacaaaatacctttaccgcgcgatcacacgcccgcgcctaaaccgccacgcaatcgaccgcatttaaataataaaatcatcccgaccgataatcacgataccgacgacgtcctaaaacaatttaacttacgacgaaataattcgcccaaaaaacc

SEQ ID NO: 35213 - DNA, 916 bp, Artificial Sequence
  chemically treated genomic DNA (Homo sapiens) CpG-island No: 35213
tgtggcgagggatcgtcgtagattgattgaggttaaagcgtttgcgtaattagttcgttaagatcggataatcgggtttagcgggtagatttagttgtaaaataatcgttttttcgttagggacgtagagtacggtgataattatcgtatcggttaacgttatcgtggtaggtagatgattattggtaagattttgtagcgttattagcggatcggttagcggaacggtgtcgaataataggttattgttgtagttgtcgtgtaacgatttagtatattagaatcgatggaatacgattttaaagaatagtttttagatacgagagatattgataataggcgacgataatattagttaacggtgattgcgttattagtttttttttttttagcgtttcgcgttcggcgttacgtttacgatttgttattgtttttttttagttagtcgaagcggtaatggtgatttaatttttttttcgttagtgatagcggtaatattttgattgtcggttgttttagtacgtatattttttcgtatttatcgtaatcggtataggcgtcgttgtgaatcgtcggtagaaagcgggcgtgtttatcggtacgcgtgttgcgttttagttttagggtgatggttttattaattttcgggtattcgcgataataaatatcgtagcgtagtttttgaaagttgagatagtttttttggtttattagtatcgttagttttattcgcgcgtcgtcgatcgatttaattttacgatttagcgtatcgtttgggtatattttggcgtacggaatgtttttatatatttcgtaaggaatatttcgtgcgataaaatatggcgtgttcgtcgatagattagaggttagcgtcgttagttttaaggtgtcgtaagggtaagtttgaatatattga

SEQ ID NO: 35214 - DNA, 916 bp, Artificial Sequence
  chemically treated genomic DNA (Homo sapiens) CpG-island No: 35214
tcaatatattcaaacttacccttacgacaccttaaaactaacgacgctaacctctaatctatcgacgaacacgccatattttatcgcacgaaatattccttacgaaatatataaaaacattccgtacgccaaaatatacccaaacgatacgctaaatcgtaaaattaaatcgatcgacgacgcgcgaataaaactaacgatactaataaaccaaaaaaactatctcaactttcaaaaactacgctacgatatttattatcgcgaatacccgaaaattaataaaaccatcaccctaaaactaaaacgcaacacgcgtaccgataaacacgcccgctttctaccgacgattcacaacgacgcctataccgattacgataaatacgaaaaaatatacgtactaaaacaaccgacaatcaaaatattaccgctatcactaacgaaaaaaaaattaaatcaccattaccgcttcgactaactaaaaaaaaacaataacaaatcgtaaacgtaacgccgaacgcgaaacgctaaaaaaaaaaaaactaataacgcaatcaccgttaactaatattatcgtcgcctattatcaatatctctcgtatctaaaaactattctttaaaatcgtattccatcgattctaatatactaaatcgttacacgacaactacaacaataacctattattcgacaccgttccgctaaccgatccgctaataacgctacaaaatcttaccaataatcatctacctaccacgataacgttaaccgatacgataattatcaccgtactctacgtccctaacgaaaaaacgattattttacaactaaatctacccgctaaacccgattatccgatcttaacgaactaattacgcaaacgctttaacctcaatcaatctacgacgatccctcgccaca

SEQ ID NO: 35215 - DNA, 916 bp, Artificial Sequence
  chemically treated genomic DNA (Homo sapiens) CpG-island No: 35215
ttagtgtgtttaggtttgtttttacgatattttaaaattggcgacgttggtttttggtttgtcggcgggtacgttatattttgtcgtacgggatattttttgcgaaatgtgtgaggatatttcgtgcgttaaagtgtgtttaagcggtgcgttggatcgtgagattgaatcgatcgacgacgcgcggatggggttggcggtattggtggattaggaaaattgttttaatttttaggggttgcgttgcgatgtttgttatcgcgaatgttcgaaaattgatgaggttattattttggagttggagcgtaatacgcgtatcggtaagtacgttcgttttttgtcgacggtttatagcgacgtttgtatcggttgcggtaagtgcgaaaaagtatgcgtgttggaataatcggtaattaaggtgttatcgttgttattggcgaaaggggagttaggttattattatcgtttcggttggttggaggggaataatggtaaatcgtaaacgtgacgtcgggcgcgaggcgttggagaaaaaaaggttggtggcgtagttatcgttggttggtgttatcgtcgtttgttgttagtgtttttcgtgtttggggattgttttttggagtcgtgttttatcggttttggtgtgttggatcgttgtacggtaattatagtagtagtttgttattcgatatcgtttcgttgatcgattcgttgatgacgttgtaaagttttgttagtggttatttgtttgttacggtggcgttgatcggtgcggtgattattatcgtgttttacgtttttggcgggaaagcgattattttgtagttgggtttgttcgttgaattcgattattcgattttagcgaattggttacgtaggcgttttgattttaattagtttgcgacgatttttcgttata

SEQ ID NO: 35216 - DNA, 916 bp, Artificial Sequence
  chemically treated genomic DNA (Homo sapiens) CpG-island No: 35216
tataacgaaaaatcgtcgcaaactaattaaaatcaaaacgcctacgtaaccaattcgctaaaatcgaataatcgaattcaacgaacaaacccaactacaaaataatcgctttcccgccaaaaacgtaaaacacgataataatcaccgcaccgatcaacgccaccgtaacaaacaaataaccactaacaaaactttacaacgtcatcaacgaatcgatcaacgaaacgatatcgaataacaaactactactataattaccgtacaacgatccaacacaccaaaaccgataaaacacgactccaaaaaacaatccccaaacacgaaaaacactaacaacaaacgacgataacaccaaccaacgataactacgccaccaacctttttttctccaacgcctcgcgcccgacgtcacgtttacgatttaccattattcccctccaaccaaccgaaacgataataataacctaactcccctttcgccaataacaacgataacaccttaattaccgattattccaacacgcatactttttcgcacttaccgcaaccgatacaaacgtcgctataaaccgtcgacaaaaaacgaacgtacttaccgatacgcgtattacgctccaactccaaaataataacctcatcaattttcgaacattcgcgataacaaacatcgcaacgcaacccctaaaaattaaaacaattttcctaatccaccaataccgccaaccccatccgcgcgtcgtcgatcgattcaatctcacgatccaacgcaccgcttaaacacactttaacgcacgaaatatcctcacacatttcgcaaaaaatatcccgtacgacaaaatataacgtacccgccgacaaaccaaaaaccaacgtcgccaattttaaaatatcgtaaaaacaaacctaaacacactaa

SEQ ID NO: 35217 - DNA, 1195 bp, Artificial Sequence
  chemically treated genomic DNA (Homo sapiens) CpG-island No: 35217
attcgtcgaaagcgtttttaggttggcggttttttttttttagttcgatacgggttttcgattcgaatttagttttttagtcggaggcgggtggtcgtaagtttggggttttcggtcggtaatcgaattggtgggcgcggcgttcgtttcgcggttttcgcgtacgggtttgtttcgttatcgaggagtcggagttttttagggacggggattcgtaggtttcgggaagtcgttttaatcggagttgttcggttttcgagtttatttgtcgtatttgggcggcggttcggtttgggttttagtcgttggttattcgcgcgggtaggtcggagggaataaaggcgtttcggggaggggacgagttttttttttcgtcgcgtttttagagggcgggttgtcggggttcgcggtgggagaggttttttcggtttttcgatttttcggcgttgggtcgtgcgcggttcgggttagggcggcgggtttcgattcggtgtttacgttagttacgcgttttcggtttaagcgcgcgtttttatttgaagttttggcgttattcgtcgggcgagggtcggcgtgtttttattttttcgttattttttttttttagagatttcgttcggttcggagtgggtagattcggagtttttcgcgtcggagatcgcgagtcgttcggtcgaggaggcgcggcggggcgggggcggggcggaggggtcggttcgtagtttttaatgtcgggagttcgcgttggagatttagggagtttagttcggggtcgcggtacggagaacgaattattcgtggtttggagacgtatttcgtcgagcggttagaattttttttatttagcgattcggaaaggaagttaatatttttatttagagaggtttcggtcgcggaaagatgcggtcgcggtatagtcgtgtttttattacgtaattgattatagattaatttcgcgcggaattatcggtttagggcgtttcgttaagaggcggattgtgttggtttcgcgggttttacgtttagggaacgtcgcggttttttttatacgggatatcggtttcgtagcgtcgcggattaggatggttttttatttttcgagcgggagttttaacgtaggtttaggcgggttttgttaaaaggtttttggttatattatttatgcgtggagttttgggggttttagtaataaagt

SEQ ID NO: 35218 - DNA, 1195 bp, Artificial Sequence
  chemically treated genomic DNA (Homo sapiens) CpG-island No: 35218
actttattactaaaacccccaaaactccacgcataaataatataaccaaaaaccttttaacaaaacccgcctaaacctacgttaaaactcccgctcgaaaaataaaaaaccatcctaatccgcgacgctacgaaaccgatatcccgtataaaaaaaaccgcgacgttccctaaacgtaaaacccgcgaaaccaacacaatccgcctcttaacgaaacgccctaaaccgataattccgcgcgaaattaatctataatcaattacgtaataaaaacacgactataccgcgaccgcatctttccgcgaccgaaacctctctaaataaaaatattaacttcctttccgaatcgctaaataaaaaaaattctaaccgctcgacgaaatacgtctccaaaccacgaataattcgttctccgtaccgcgaccccgaactaaactccctaaatctccaacgcgaactcccgacattaaaaactacgaaccgacccctccgccccgcccccgccccgccgcgcctcctcgaccgaacgactcgcgatctccgacgcgaaaaactccgaatctacccactccgaaccgaacgaaatctctaaaaaaaaaaaataacgaaaaaataaaaacacgccgaccctcgcccgacgaataacgccaaaacttcaaataaaaacgcgcgcttaaaccgaaaacgcgtaactaacgtaaacaccgaatcgaaacccgccgccctaacccgaaccgcgcacgacccaacgccgaaaaatcgaaaaaccgaaaaaacctctcccaccgcgaaccccgacaacccgccctctaaaaacgcgacgaaaaaaaaaactcgtcccctccccgaaacgcctttattccctccgacctacccgcgcgaataaccaacgactaaaacccaaaccgaaccgccgcccaaatacgacaaataaactcgaaaaccgaacaactccgattaaaacgacttcccgaaacctacgaatccccgtccctaaaaaactccgactcctcgataacgaaacaaacccgtacgcgaaaaccgcgaaacgaacgccgcgcccaccaattcgattaccgaccgaaaaccccaaacttacgaccacccgcctccgactaaaaaactaaattcgaatcgaaaacccgtatcgaactaaaaaaaaaaaaccgccaacctaaaaacgctttcgacgaat

SEQ ID NO: 35219 - DNA, 1195 bp, Artificial Sequence
  chemically treated genomic DNA (Homo sapiens) CpG-island No: 35219
attttgttattgaggtttttagagttttacgtataagtggtgtgattagaaattttttaataagattcgtttgagtttgcgttagagttttcgttcggaaagtaaaagattattttaattcgcggcgttgcggaatcggtgtttcgtgtgggaggaatcgcggcgttttttgggcgtagggttcgcgaggttagtatagttcgttttttggcggagcgttttgggtcggtggtttcgcgcggagttagtttgtggttagttacgtggtgaaaatacggttgtgtcgcggtcgtattttttcgcggtcgaggtttttttgggtgggagtgttggtttttttttcggatcgttaaatggggaaagttttggtcgttcggcgggatacgtttttaggttacggatggttcgtttttcgtgtcgcggtttcgagttgggttttttgggtttttagcgcgggttttcggtattgggggttgcgggtcggttttttcgtttcgttttcgtttcgtcgcgttttttcggtcgagcggttcgcggttttcggcgcgggaggtttcgagtttgtttatttcgggtcgagcgaggtttttggaggagaagagtggcgaggaggtgagggtacgtcggttttcgttcggcgggtggcgttaggattttaggtgggaacgcgcgtttgggtcgggggcgcgtggttggcgtggatatcggatcggggttcgtcgttttggttcggatcgcgtacggtttagcgtcgggaagtcgggaagtcggggaggttttttttatcgcgggtttcggtagttcgttttttgaaagcgcggcggagaaggaggttcgtttttttttcggaacgtttttgtttttttcggtttgttcgcgcgggtggttagcggttgggatttaggtcgggtcgtcgtttaggtgcggtaggtaggttcgggggtcgggtagtttcggttggggcggtttttcggggtttgcgggttttcgtttttgaggagtttcggtttttcggtggcgggataggttcgtgcgcgggagtcgcgaggcgaacgtcgcgtttattaattcggttgtcggtcgggggttttaggtttgcggttattcgttttcggttggagggttgaattcgagtcgaaagttcgtgtcgggttggaaagaagaaatcgttaatttgagaacgttttcggcgagt

SEQ ID NO: 35220 - DNA, 1195 bp, Artificial Sequence
  chemically treated genomic DNA (Homo sapiens) CpG-island No: 35220
actcgccgaaaacgttctcaaattaacgatttcttctttccaacccgacacgaactttcgactcgaattcaaccctccaaccgaaaacgaataaccgcaaacctaaaacccccgaccgacaaccgaattaataaacgcgacgttcgcctcgcgactcccgcgcacgaacctatcccgccaccgaaaaaccgaaactcctcaaaaacgaaaacccgcaaaccccgaaaaaccgccccaaccgaaactacccgacccccgaacctacctaccgcacctaaacgacgacccgacctaaatcccaaccgctaaccacccgcgcgaacaaaccgaaaaaaacaaaaacgttccgaaaaaaaaacgaacctccttctccgccgcgctttcaaaaaacgaactaccgaaacccgcgataaaaaaaacctccccgacttcccgacttcccgacgctaaaccgtacgcgatccgaaccaaaacgacgaaccccgatccgatatccacgccaaccacgcgcccccgacccaaacgcgcgttcccacctaaaatcctaacgccacccgccgaacgaaaaccgacgtaccctcacctcctcgccactcttctcctccaaaaacctcgctcgacccgaaataaacaaactcgaaacctcccgcgccgaaaaccgcgaaccgctcgaccgaaaaaacgcgacgaaacgaaaacgaaacgaaaaaaccgacccgcaacccccaataccgaaaacccgcgctaaaaacccaaaaaacccaactcgaaaccgcgacacgaaaaacgaaccatccgtaacctaaaaacgtatcccgccgaacgaccaaaactttccccatttaacgatccgaaaaaaaaaccaacactcccacccaaaaaaacctcgaccgcgaaaaaatacgaccgcgacacaaccgtattttcaccacgtaactaaccacaaactaactccgcgcgaaaccaccgacccaaaacgctccgccaaaaaacgaactatactaacctcgcgaaccctacgcccaaaaaacgccgcgattcctcccacacgaaacaccgattccgcaacgccgcgaattaaaataatcttttactttccgaacgaaaactctaacgcaaactcaaacgaatcttattaaaaaatttctaatcacaccacttatacgtaaaactctaaaaacctcaataacaaaat

SEQ ID NO: 35221 - DNA, 628 bp, Artificial Sequence
  chemically treated genomic DNA (Homo sapiens) CpG-island No: 35221
agtcgagcgaagtcggtggggcgatcgtataagtttatggtttttattcgtttttatatacgatatttatttcgttagtgtttcggaggggaatttcgatggagtttcgcgatatgatggggttaaaaggcgagtaagtgtttcgtttcgtcgtttcgtagtcggtagttttcgttttaggttaatttagaggtgagtgacggtttcggttttggttttgattgtcgtttcgcggcgtcgttggagttttggtttttttttttcgttagtcgtttaaataacgagtagcggacggcggacggttattttcggcgatttcgttttttgtttcggaagtattttcgggggagcgtgttttacgcgagtttagtttgtggtttcggtgttttcgttttggggttggcggtttcgaagtttttgttggcgtgtcggttgtagggtgtttcgagagtttgtaggattttcggaattatttggcgtttgattttttttagcgttggcgcggtttcgaatgaaaatttggaaggcgtagtcgtttggtttcgcggtgggcggggtttttgtttgacgtggatttttcgggatgggtttggttaattttgttttttttttaagattgttagggata

SEQ ID NO: 35222 - DNA, 628 bp, Artificial Sequence
  chemically treated genomic DNA (Homo sapiens) CpG-island No: 35222
tatccctaacaatcttaaaaaaaaaacaaaattaaccaaacccatcccgaaaaatccacgtcaaacaaaaaccccgcccaccgcgaaaccaaacgactacgccttccaaattttcattcgaaaccgcgccaacgctaaaaaaaatcaaacgccaaataattccgaaaatcctacaaactctcgaaacaccctacaaccgacacgccaacaaaaacttcgaaaccgccaaccccaaaacgaaaacaccgaaaccacaaactaaactcgcgtaaaacacgctcccccgaaaatacttccgaaacaaaaaacgaaatcgccgaaaataaccgtccgccgtccgctactcgttatttaaacgactaacgaaaaaaaaaaaccaaaactccaacgacgccgcgaaacgacaatcaaaaccaaaaccgaaaccgtcactcacctctaaattaacctaaaacgaaaactaccgactacgaaacgacgaaacgaaacacttactcgccttttaaccccatcatatcgcgaaactccatcgaaattcccctccgaaacactaacgaaataaatatcgtatataaaaacgaataaaaaccataaacttatacgatcgccccaccgacttcgctcgact

SEQ ID NO: 35223 - DNA, 628 bp, Artificial Sequence
  chemically treated genomic DNA (Homo sapiens) CpG-island No: 35223
tatttttaataattttgggaagaaaataggattggttaggtttatttcgagaggtttacgttaggtaggggtttcgtttatcgcgggattaagcggttacgttttttaagtttttattcggggtcgcgttagcgttgaggagagttagacgttagatggtttcgaaggttttgtaggttttcggggtattttatagtcgatacgttaataaaagtttcggagtcgttaattttaaaacggaaatatcggagttataagttgagttcgcgtagggtacgttttttcgggagtgttttcgggatagggggcggggtcgtcggaagtggtcgttcgtcgttcgttgttcgttgtttaagcggttgacgggaaggagaagttagagttttagcggcgtcgcggggcggtagttaagattagagtcggagtcgttatttatttttggattagtttgaagcggagattatcggttgcggagcggcggggcgagatatttgttcgttttttgattttattatgtcgcggggttttatcgagattttttttcgggatattgacgaggtaagtgtcgtgtatggaggcgggtgggggttatgaatttgtacgatcgttttatcgatttcgttcgatt

SEQ ID NO: 35224 - DNA, 628 bp, Artificial Sequence
  chemically treated genomic DNA (Homo sapiens) CpG-island No: 35224
aatcgaacgaaatcgataaaacgatcgtacaaattcataacccccacccgcctccatacacgacacttacctcgtcaatatcccgaaaaaaaatctcgataaaaccccgcgacataataaaatcaaaaaacgaacaaatatctcgccccgccgctccgcaaccgataatctccgcttcaaactaatccaaaaataaataacgactccgactctaatcttaactaccgccccgcgacgccgctaaaactctaacttctccttcccgtcaaccgcttaaacaacgaacaacgaacgacgaacgaccacttccgacgaccccgccccctatcccgaaaacactcccgaaaaaacgtaccctacgcgaactcaacttataactccgatatttccgttttaaaattaacgactccgaaacttttattaacgtatcgactataaaataccccgaaaacctacaaaaccttcgaaaccatctaacgtctaactctcctcaacgctaacgcgaccccgaataaaaacttaaaaaacgtaaccgcttaatcccgcgataaacgaaacccctacctaacgtaaacctctcgaaataaacctaaccaatcctattttcttcccaaaattattaaaaata

SEQ ID NO: 35225 - DNA, 640 bp, Artificial Sequence
  chemically treated genomic DNA (Homo sapiens) CpG-island No: 35225
aaggagtgttatagcgttaaattttgttggtttcgcgttaggtcgagttttatttttttagttcgcggttaatatttttatttcgttttatagttcgtcgcgttcgcggggcgatattttttattttattatttcggaggtggtgcggtcgagtttcggatttaattggcggaagcggggtcggttgtgtgcgcgcgtataaatgttcggatgcgtcgcgacgattcgcgcgtttttttcgggcggtagggggcgcgtatcgaggtatcgcggcgagtttggttgtttttggggtttgtgtggttttgtgtgtcggaaagatggagtaagaagtcgagttcgaggggcggtcgcgatttttttgatcgagattttgttgttttcgtagttaggagtatcgttttttttcggattagtgcgtacgagcgtttagtgttttggttcggagagtggaatgattttcgaggtttagggcgtcgtgttttcgcgcgtttcgtgaaggaaattggggagttttgagggattttcgattttaagcgcgaaaatttcggatggtgaggagtaggtattggttcggtagcgagcggttatttttgggtttgggttttgacggtgttttttttatcgttggtttttagtt

SEQ ID NO: 35226 - DNA, 640 bp, Artificial Sequence
  chemically treated genomic DNA (Homo sapiens) CpG-island No: 35226
aactaaaaaccaacgataaaaaaaacaccgtcaaaacccaaacccaaaaataaccgctcgctaccgaaccaatacctactcctcaccatccgaaattttcgcgcttaaaatcgaaaatccctcaaaactccccaatttccttcacgaaacgcgcgaaaacacgacgccctaaacctcgaaaatcattccactctccgaaccaaaacactaaacgctcgtacgcactaatccgaaaaaaaacgatactcctaactacgaaaacaacaaaatctcgatcaaaaaaatcgcgaccgcccctcgaactcgacttcttactccatctttccgacacacaaaaccacacaaaccccaaaaacaaccaaactcgccgcgatacctcgatacgcgccccctaccgcccgaaaaaaacgcgcgaatcgtcgcgacgcatccgaacatttatacgcgcgcacacaaccgaccccgcttccgccaattaaatccgaaactcgaccgcaccacctccgaaataataaaataaaaaatatcgccccgcgaacgcgacgaactataaaacgaaataaaaatattaaccgcgaactaaaaaaataaaactcgacctaacgcgaaaccaacaaaatttaacgctataacactcctt

SEQ ID NO: 35227 - DNA, 640 bp, Artificial Sequence
  chemically treated genomic DNA (Homo sapiens) CpG-island No: 35227
ggttgggaattagcgatagaggggatatcgttagagtttagatttaaaagtgatcgttcgttgtcgggttagtatttgttttttattattcggggttttcgcgtttggagtcgggggttttttaagattttttagttttttttacggggcgcgcggaagtacgacgttttgggtttcggggattattttatttttcgggttagggtattgggcgttcgtacgtattaattcggggagggacggtgtttttggttgcgaaagtagtaggatttcggttagaggggtcgcggtcgtttttcgggttcggttttttgttttattttttcgatatatagggttatataggttttagaagtagttaagttcgtcgcggtgtttcggtgcgcgttttttatcgttcgaggggagcgcgcgggtcgtcgcggcgtattcgggtatttgtgcgcgcgtatataatcggtttcgttttcgttaattgggttcggggttcggtcgtattattttcgggatgatggagtggggggtgtcgtttcgcgggcgcggcgggttgtgaggcggggtgggggtgttggtcgcgagttgagagggtggggttcggtttggcgcggagttagtaaggtttggcgttgtgatatttttt

SEQ ID NO: 35228 - DNA, 640 bp, Artificial Sequence
  chemically treated genomic DNA (Homo sapiens) CpG-island No: 35228
aaaaaatatcacaacgccaaaccttactaactccgcgccaaaccgaaccccaccctctcaactcgcgaccaacacccccaccccgcctcacaacccgccgcgcccgcgaaacgacaccccccactccatcatcccgaaaataatacgaccgaaccccgaacccaattaacgaaaacgaaaccgattatatacgcgcgcacaaatacccgaatacgccgcgacgacccgcgcgctcccctcgaacgataaaaaacgcgcaccgaaacaccgcgacgaacttaactacttctaaaacctatataaccctatatatcgaaaaaataaaacaaaaaaccgaacccgaaaaacgaccgcgacccctctaaccgaaatcctactactttcgcaaccaaaaacaccgtccctccccgaattaatacgtacgaacgcccaataccctaacccgaaaaataaaataatccccgaaacccaaaacgtcgtacttccgcgcgccccgtaaaaaaaactaaaaaatcttaaaaaacccccgactccaaacgcgaaaaccccgaataataaaaaacaaatactaacccgacaacgaacgatcacttttaaatctaaactctaacgatatcccctctatcgctaattcccaacc

SEQ ID NO: 35229 - DNA, 516 bp, Artificial Sequence
  chemically treated genomic DNA (Homo sapiens) CpG-island No: 35229
tttcgtgtcgggggtatttcggggttcgtagagggggtgttttgtttttgagtttcgatagttcgcgttgggcgcgttttttcgtagtttttagaaaggagttattaggtagcgtttcgcgggttttttttttcgggattttttttgggaattcggaggttttcggcgcggtaggcgtaaggggagcggggtcggcgaggaggggtgaattggcgaaataaagtcgtgatttagggggttttttttcggggatcgcggcgggtacgtttcgggtattttatttttcggtttcgatttttggatcggtttttaagaaagcggttttcgcgggtttcgagttgtgcggaaaggttaggtttttttcgattcgaaggtatttataggttgttttttaattttatttagatcgcgttaacggggttaagtggggtttgaggttcgggttgggggtcgcggcgatttgagattagggtaggagggtttcgtgtttgagattttcggcgagagcgttaggtt

SEQ ID NO: 35230 - DNA, 516 bp, Artificial Sequence
  chemically treated genomic DNA (Homo sapiens) CpG-island No: 35230
aacctaacgctctcgccgaaaatctcaaacacgaaaccctcctaccctaatctcaaatcgccgcgacccccaacccgaacctcaaaccccacttaaccccgttaacgcgatctaaataaaattaaaaaacaacctataaataccttcgaatcgaaaaaaacctaacctttccgcacaactcgaaacccgcgaaaaccgctttcttaaaaaccgatccaaaaatcgaaaccgaaaaataaaatacccgaaacgtacccgccgcgatccccgaaaaaaaaccccctaaatcacgactttatttcgccaattcacccctcctcgccgaccccgctccccttacgcctaccgcgccgaaaacctccgaattcccaaaaaaaatcccgaaaaaaaaaacccgcgaaacgctacctaataactcctttctaaaaactacgaaaaaacgcgcccaacgcgaactatcgaaactcaaaaacaaaacaccccctctacgaaccccgaaatacccccgacacgaaa

SEQ ID NO: 35231 - DNA, 516 bp, Artificial Sequence
  chemically treated genomic DNA (Homo sapiens) CpG-island No: 35231
agtttggcgttttcgtcgggggttttaggtacggggtttttttgttttgattttaggtcgtcgcggtttttagttcgagttttagattttatttaatttcgttagcgcgatttgggtaaggttgggaggtagtttatagatgttttcgggtcggaaggagtttggttttttcgtatagttcggggttcgcgggggtcgtttttttgaggatcgatttaagaatcggggtcggggagtgggatgttcggagcgtgttcgtcgcgattttcgaagagaagttttttgagttacgattttgtttcgttagtttattttttttcgtcgatttcgttttttttgcgtttgtcgcgtcgagggttttcgggtttttaagaggggtttcgggaggaggggttcgcggagcgttgtttggtgatttttttttgaaggttgcggaaaagcgcgtttagcgcgggttgtcggggtttagggatagggtattttttttgcggatttcggagtgttttcggtacggga

SEQ ID NO: 35232 - DNA, 516 bp, Artificial Sequence
  chemically treated genomic DNA (Homo sapiens) CpG-island No: 35232
tcccgtaccgaaaacactccgaaatccgcaaaaaaaataccctatccctaaaccccgacaacccgcgctaaacgcgcttttccgcaaccttcaaaaaaaaatcaccaaacaacgctccgcgaacccctcctcccgaaacccctcttaaaaacccgaaaaccctcgacgcgacaaacgcaaaaaaaacgaaatcgacgaaaaaaaataaactaacgaaacaaaatcgtaactcaaaaaacttctcttcgaaaatcgcgacgaacacgctccgaacatcccactccccgaccccgattcttaaatcgatcctcaaaaaaacgacccccgcgaaccccgaactatacgaaaaaaccaaactccttccgacccgaaaacatctataaactacctcccaaccttacccaaatcgcgctaacgaaattaaataaaatctaaaactcgaactaaaaaccgcgacgacctaaaatcaaaacaaaaaaaccccgtacctaaaacccccgacgaaaacgccaaact

SEQ ID NO: 35233 - DNA, 554 bp, Artificial Sequence
  chemically treated genomic DNA (Homo sapiens) CpG-island No: 35233
tatcgttgggtcgtatcgttggatcgtatcgttggatcgtatcgttggattttatcgttggattttattataggatcgtatcgttggattttatcgttggattttattataggatcgtatcgttggattttatcgttggatcgtatcgttggattttattataggatcgtatcgttggattttatcgttggattttattataggatcgtatcgttggattttatcgttggattttattataggatcgtatcgttggatcgtatcgttggatcgtatcgttggatcgtacggtaggatcgtatcgttggattttattataggattttattataggattttatcgttgggtcgtatcgtaggatcgtatcgttggatcgtattatcgttttggtaggtgagcgtggagtttggcgttttttggcgacgattttggttagatttttaggagcgtttttgcgggtaaagttatatgtacgttttgttttgggtttagtaatcgagtcgtaggagagacggagtggtttggggttaggttttgagttcgaggagtagtt

SEQ ID NO: 35234 - DNA, 554 bp, Artificial Sequence
  chemically treated genomic DNA (Homo sapiens) CpG-island No: 35234
aactactcctcgaactcaaaacctaaccccaaaccactccgtctctcctacgactcgattactaaacccaaaacaaaacgtacatataactttacccgcaaaaacgctcctaaaaatctaaccaaaatcgtcgccaaaaaacgccaaactccacgctcacctaccaaaacgataatacgatccaacgatacgatcctacgatacgacccaacgataaaatcctataataaaatcctataataaaatccaacgatacgatcctaccgtacgatccaacgatacgatccaacgatacgatccaacgatacgatcctataataaaatccaacgataaaatccaacgatacgatcctataataaaatccaacgataaaatccaacgatacgatcctataataaaatccaacgatacgatccaacgataaaatccaacgatacgatcctataataaaatccaacgataaaatccaacgatacgatcctataataaaatccaacgataaaatccaacgatacgatccaacgatacgatccaacgatacgacccaacgata

SEQ ID NO: 35235 - DNA, 554 bp, Artificial Sequence
  chemically treated genomic DNA (Homo sapiens) CpG-island No: 35235
agttgtttttcggatttaggatttggttttaggttatttcgttttttttacgattcggttgttgagtttagaatagagcgtatatgtgattttattcgtaggggcgtttttggaagtttgattagggtcgtcgttagggagcgttaggttttacgtttatttgttaggacggtggtgcggtttagcggtgcggttttgcggtgcggtttagcggtgaggttttgtggtgaggttttgtggtgaggtttagcggtacggttttgtcgtgcggtttagcggtgcggtttagcggtgcggtttagcggtgcggttttgtggtgaggtttagcggtgaggtttagcggtgcggttttgtggtgaggtttagcggtgaggtttagcggtgcggttttgtggtgaggtttagcggtgcggtttagcggtgaggtttagcggtgcggttttgtggtgaggtttagcggtgaggtttagcggtgcggttttgtggtgaggtttagcggtgaggtttagcggtgcggtttagcggtgcggtttagcggtgcggtttagcggtg

SEQ ID NO: 35236 - DNA, 554 bp, Artificial Sequence
  chemically treated genomic DNA (Homo sapiens) CpG-island No: 35236
caccgctaaaccgcaccgctaaaccgcaccgctaaaccgcaccgctaaacctcaccgctaaacctcaccacaaaaccgcaccgctaaacctcaccgctaaacctcaccacaaaaccgcaccgctaaacctcaccgctaaaccgcaccgctaaacctcaccacaaaaccgcaccgctaaacctcaccgctaaacctcaccacaaaaccgcaccgctaaacctcaccgctaaacctcaccacaaaaccgcaccgctaaaccgcaccgctaaaccgcaccgctaaaccgcacgacaaaaccgtaccgctaaacctcaccacaaaacctcaccacaaaacctcaccgctaaaccgcaccgcaaaaccgcaccgctaaaccgcaccaccgtcctaacaaataaacgtaaaacctaacgctccctaacgacgaccctaatcaaacttccaaaaacgcccctacgaataaaatcacatatacgctctattctaaactcaacaaccgaatcgtaaaaaaaacgaaataacctaaaaccaaatcctaaatccgaaaaacaact

SEQ ID NO: 35237 - DNA, 529 bp, Artificial Sequence
  chemically treated genomic DNA (Homo sapiens) CpG-island No: 35237
ttcggcgtattttttgtttcgattcgcgtttttcgtttttagggtcgaaataaatatcgggtgtttggcgtcgttagaagtcgtgcgtatgcgttagcgttaagcgggacgttgcgtcgggttaaaggttagcggcgtaaaatggcggcggcgatgattttttgtcggttgttgaatcggtgtggcgaggcggcgcggagtttgtttttgggcgttaggtgtttcggggtgcgggtttcgtcgatcggggagaaggttacgtatattggttaggtaacggtcgttgggtataggatgtatttttttttagtcgtatttcgggcgattggtggtagtgggttcgtcgggtattcgcggttttggttttgcgtcggtagcgtaggtcgtggtaaggttgtgttgtcgtttacgcgtcggggaggacgttcgcgagtcgggacggtggtggtagtttgtagcggtgggtttcgtttttttagggtttgcgggttttggaacgggaagtttttttagcgggtagtatttgttg

SEQ ID NO: 35238 - DNA, 529 bp, Artificial Sequence
  chemically treated genomic DNA (Homo sapiens) CpG-island No: 35238
caacaaatactacccgctaaaaaaacttcccgttccaaaacccgcaaaccctaaaaaaacgaaacccaccgctacaaactaccaccaccgtcccgactcgcgaacgtcctccccgacgcgtaaacgacaacacaaccttaccacgacctacgctaccgacgcaaaaccaaaaccgcgaatacccgacgaacccactaccaccaatcgcccgaaatacgactaaaaaaaaatacatcctatacccaacgaccgttacctaaccaatatacgtaaccttctccccgatcgacgaaacccgcaccccgaaacacctaacgcccaaaaacaaactccgcgccgcctcgccacaccgattcaacaaccgacaaaaaatcatcgccgccgccattttacgccgctaacctttaacccgacgcaacgtcccgcttaacgctaacgcatacgcacgacttctaacgacgccaaacacccgatatttatttcgaccctaaaaacgaaaaacgcgaatcgaaacaaaaaatacgccgaa

SEQ ID NO: 35239 - DNA, 529 bp, Artificial Sequence
  chemically treated genomic DNA (Homo sapiens) CpG-island No: 35239
tagtaagtgttgttcgttggggagatttttcgttttagagttcgtaggttttggaaggacgagatttatcgttataggttgttattatcgtttcgattcgcgggcgtttttttcggcgcgtgagcgatagtataattttattacgatttgcgttgtcggcgtagaattagggtcgcggatgttcggcgagtttattgttattagtcgttcgaggtgcggttggaggaaggtgtattttgtatttagcggtcgttatttggttagtgtgcgtgatttttttttcggtcggcgagattcgtatttcgaaatatttggcgtttaggggtaggtttcgcgtcgtttcgttatatcggtttagtagtcggtagaaggttatcgtcgtcgttattttgcgtcgttggtttttgattcggcgtaacgtttcgtttagcgttaacgtatgcgtacggtttttggcggcgttaaatattcggtatttatttcggttttgggggcggggagcgcgggtcggggtagagggtgcgtcgga

SEQ ID NO: 35240 - DNA, 529 bp, Artificial Sequence
  chemically treated genomic DNA (Homo sapiens) CpG-island No: 35240
tccgacgcaccctctaccccgacccgcgctccccgcccccaaaaccgaaataaataccgaatatttaacgccgccaaaaaccgtacgcatacgttaacgctaaacgaaacgttacgccgaatcaaaaaccaacgacgcaaaataacgacgacgataaccttctaccgactactaaaccgatataacgaaacgacgcgaaacctacccctaaacgccaaatatttcgaaatacgaatctcgccgaccgaaaaaaaaatcacgcacactaaccaaataacgaccgctaaatacaaaatacaccttcctccaaccgcacctcgaacgactaataacaataaactcgccgaacatccgcgaccctaattctacgccgacaacgcaaatcgtaataaaattatactatcgctcacgcgccgaaaaaaacgcccgcgaatcgaaacgataataacaacctataacgataaatctcgtccttccaaaacctacgaactctaaaacgaaaaatctccccaacgaacaacacttacta

SEQ ID NO: 35241 - DNA, 565 bp, Artificial Sequence
  chemically treated genomic DNA (Homo sapiens) CpG-island No: 35241
gcgcggttatttttggggcgggtatttaatttttcgttttgtaaattgcggggtgacgggacgttgttattaggatttaagatggttatcgcgttcgttagttatttcgttagttcgcgcgttagtgagttggtacgagatacgcggtggtttacggcgtttggggacgatttttagtttttcgtacggggcggagcgttcgttttttttttaattagtacgtcgggtcggttagttaggggtcgttcgcgcgcggggtgtgtgaggacgcgtttttagtcgttgagtgtttgagtcgggaagtagttgttgtggtatttgttgttgttcgagcggacgtagagtatcggacgcgggcgtcgtggcgttgggtaggagggcgaagttatgacgttagttaggtaacgagcgggcggttgttttgattgtttcgagttgggcgttagtttttcgagcgcgtgagtattgtcgttttttttcgcgggtggtttggagtttgttttcgtttttggtttttttcgtgttgggggtttttttcgtattttttatttgggtatttttgttt

SEQ ID NO: 35242 - DNA, 565 bp, Artificial Sequence
  chemically treated genomic DNA (Homo sapiens) CpG-island No: 35242
aaacaaaaatacccaaataaaaaatacgaaaaaaacccccaacacgaaaaaaaccaaaaacgaaaacaaactccaaaccacccgcgaaaaaaaacgacaatactcacgcgctcgaaaaactaacgcccaactcgaaacaatcaaaacaaccgcccgctcgttacctaactaacgtcataacttcgccctcctacccaacgccacgacgcccgcgtccgatactctacgtccgctcgaacaacaacaaataccacaacaactacttcccgactcaaacactcaacgactaaaaacgcgtcctcacacaccccgcgcgcgaacgacccctaactaaccgacccgacgtactaattaaaaaaaaaacgaacgctccgccccgtacgaaaaactaaaaatcgtccccaaacgccgtaaaccaccgcgtatctcgtaccaactcactaacgcgcgaactaacgaaataactaacgaacgcgataaccatcttaaatcctaataacaacgtcccgtcaccccgcaatttacaaaacgaaaaattaaatacccgccccaaaaataaccgcgc

SEQ ID NO: 35243 - DNA, 565 bp, Artificial Sequence
  chemically treated genomic DNA (Homo sapiens) CpG-island No: 35243
aagtagaaatgtttaaatgaaaagtgcggagggaatttttaatacgagggggattagaggcggaggtaggttttagattattcgcgagaaggagcgatagtgtttacgcgttcgggaggttaacgtttagttcggagtagttaaggtagtcgttcgttcgttatttgattgacgttatggtttcgtttttttgtttagcgttacggcgttcgcgttcgatgttttacgttcgttcgggtagtagtaggtattatagtaattgtttttcggtttaggtatttagcgattgggagcgcgtttttatatatttcgcgcgcgggcggtttttggttagtcggttcggcgtgttgattggagggaaggcgggcgtttcgtttcgtgcgaagggttggagatcgtttttagacgtcgtgggttatcgcgtgtttcgtgttagtttattggcgcgcgggttagcgagatgattagcgggcgcggtggttattttgagttttagtaatagcgtttcgttatttcgtagtttatagggcgagagattgggtgttcgttttaaaaatggtcgcgt

SEQ ID NO: 35244 - DNA, 565 bp, Artificial Sequence
  chemically treated genomic DNA (Homo sapiens) CpG-island No: 35244
acgcgaccatttttaaaacgaacacccaatctctcgccctataaactacgaaataacgaaacgctattactaaaactcaaaataaccaccgcgcccgctaatcatctcgctaacccgcgcgccaataaactaacacgaaacacgcgataacccacgacgtctaaaaacgatctccaacccttcgcacgaaacgaaacgcccgccttccctccaatcaacacgccgaaccgactaaccaaaaaccgcccgcgcgcgaaatatataaaaacgcgctcccaatcgctaaatacctaaaccgaaaaacaattactataatacctactactacccgaacgaacgtaaaacatcgaacgcgaacgccgtaacgctaaacaaaaaaacgaaaccataacgtcaatcaaataacgaacgaacgactaccttaactactccgaactaaacgttaacctcccgaacgcgtaaacactatcgctccttctcgcgaataatctaaaacctacctccgcctctaatccccctcgtattaaaaattccctccgcacttttcatttaaacatttctactt

SEQ ID NO: 35245 - DNA, 850 bp, Artificial Sequence
  chemically treated genomic DNA (Homo sapiens) CpG-island No: 35245
atttcgttttttgcgtttcgtttttcgcgttttttgcgtcgttttatttttttttttgttttatttttttattttgttttttttttttgtcgtttgttgatatttacgtgtttttgtttgtttttcgttttcgttattttttcgttttgtttttcgttcgttttatgtcgttttttttatttttttttttgtttgcgtttttttttttttttttcgttcgtttgtcgtgtttttttggtttgtttttttatggcgttatttttttttgtcgttgttggcgtgttgttttttttcgcggagttggcgttttcgttgcgttttcgttgttttttttgtggttgttttttttttttcgcgcgtgtttcgttttcgcgttcggtttcggttttagttttgttttgttggcgtgttttcgtttttttcgttttttgttgtattcgtgttttttttttcggatgttcgtcgttttgtattttcgttttgttcgtttttttttcgcgtcgtttttcgtcgttcgtttcgttgttgcgttcgcgttttttgttgtgttttgtgtcgtttgtcgtcgttttttttcgttttttttcgtgtttttcgttttttttttcgttggttttttcggttttttgtagttttttacggtttttcgttttttttttttttttggtgtgttttcgttttttgtttgtttttgtcgcgttttatttttgttttcgtttttttgttttcgttcgcggtttcgttttttttttttcggtcgtattttttttttcgttgttttgttttttttttttgtttattttttttttttgttcgttgttttcgttgtggtgttttttttgtttttgtt

SEQ ID NO: 35246 - DNA, 850 bp, Artificial Sequence
  chemically treated genomic DNA (Homo sapiens) CpG-island No: 35246
aacaaaaacaaaaaaaacaccacaacgaaaacaacgaacaaaaaaaaaaaataaacaaaaaaaaaaaacaaaacaacgaaaaaaaaaatacgaccgaaaaaaaaaaaacgaaaccgcgaacgaaaacaaaaaaacgaaaacaaaaataaaacgcgacaaaaacaaacaaaaaacgaaaacacaccaaaaaaaaaaaaaaaacgaaaaaccgtaaaaaactacaaaaaaccgaaaaaaccaacgaaaaaaaaaacgaaaaacacgaaaaaaaacgaaaaaaaacgacgacaaacgacacaaaacacaacaaaaaacgcgaacgcaacaacgaaacgaacgacgaaaaacgacgcgaaaaaaaaacgaacaaaacgaaaatacaaaacgacgaacatccgaaaaaaaaaacacgaatacaacaaaaaacgaaaaaaacgaaaacacgccaacaaaacaaaactaaaaccgaaaccgaacgcgaaaacgaaacacgcgcgaaaaaaaaaaaacaaccacaaaaaaaacaacgaaaacgcaacgaaaacgccaactccgcgaaaaaaaacaacacgccaacaacgacaaaaaaaaataacgccataaaaaaacaaaccaaaaaaacacgacaaacgaacgaaaaaaaaaaaaaaaaacgcaaacaaaaaaaaaaataaaaaaaacgacataaaacgaacgaaaaacaaaacgaaaaaataacgaaaacgaaaaacaaacaaaaacacgtaaatatcaacaaacgacaaaaaaaaaaaacaaaataaaaaaataaaacaaaaaaaaaaataaaacgacgcaaaaaacgcgaaaaacgaaacgcaaaaaacgaaat

SEQ ID NO: 35247 - DNA, 850 bp, Artificial Sequence
  chemically treated genomic DNA (Homo sapiens) CpG-island No: 35247
aatagaagtagagagggtattatagcgaggatagcgagtagggggagagaatagatagggagagagggtaggatagcggaggaggaagtacgatcgagaaggaaagagcgagatcgcgggcggaagtaggaagacgagagtagaggtggggcgcgataagaataagtagagagcgaagatatattaagaaagagagggaagcgagggatcgtaggaggttgtagggagtcggagaagttaacggaaaaagaggcgaagggtacggaaggagacgaggaaagacgacgataagcgatataagatatagtagaggacgcggacgtagtagcgaggcgagcgacgaggagcgacgcggaagagaggcgagtagagcgagagtatagaacgacgaatattcgaggaggaggatacggatgtaataagaagcgaggaagacggaggtacgttagtagagtaggattggggtcgggatcgaacgcggagacggaatacgcgcgagagagaagaaatagttataagaaaggtagcgagagcgtagcggggacgttagtttcgcgagggaggatagtacgttagtagcgataggggagaatgacgttatggaaggataagttaagaggatacgataggcggacggaggagggaggagggagcgtaggtagagagagaggtgagagagacgatatggggcgggcgggaggtaggacggaggggtagcgagggcgaagagtaagtagagatacgtggatgttagtagacggtagagaggagagataagatggaggagtggggtagagagggaggtaggacggcgtagagaacgcgagggacggagcgtaagaggcgagat

SEQ ID NO: 35248 - DNA, 850 bp, Artificial Sequence
  chemically treated genomic DNA (Homo sapiens) CpG-island No: 35248
atctcgcctcttacgctccgtccctcgcgttctctacgccgtcctacctccctctctaccccactcctccatcttatctctcctctctaccgtctactaacatccacgtatctctacttactcttcgccctcgctacccctccgtcctacctcccgcccgccccatatcgtctctctcacctctctctctacctacgctccctcctccctcctccgtccgcctatcgtatcctcttaacttatccttccataacgtcattctcccctatcgctactaacgtactatcctccctcgcgaaactaacgtccccgctacgctctcgctacctttcttataactatttcttctctctcgcgcgtattccgtctccgcgttcgatcccgaccccaatcctactctactaacgtacctccgtcttcctcgcttcttattacatccgtatcctcctcctcgaatattcgtcgttctatactctcgctctactcgcctctcttccgcgtcgctcctcgtcgctcgcctcgctactacgtccgcgtcctctactatatcttatatcgcttatcgtcgtctttcctcgtctccttccgtacccttcgcctctttttccgttaacttctccgactccctacaacctcctacgatccctcgcttccctctctttcttaatatatcttcgctctctacttattcttatcgcgccccacctctactctcgtcttcctacttccgcccgcgatctcgctctttccttctcgatcgtacttcctcctccgctatcctaccctctctccctatctattctctccccctactcgctatcctcgctataataccctctctacttctatt

SEQ ID NO: 35249 - DNA, 724 bp, Artificial Sequence
  chemically treated genomic DNA (Homo sapiens) CpG-island No: 35249
gtttcgtaagttggagcgtcggttcggtgtaagtttacggtttattcgtgaattttttcggttttagcggggatttaggatttcgttttttgttcgttcgatttttcgtggttcgcggggacgtttagcgttcgggtcgtgcgcgcggaaagagtcgtatcggaggaggcgtaggcggtcgggtttttatttcggattagcgggcggcgttttcgtttttatttttattcgtttcgcgtttcgggagcgtaggtaggcggcggtagggggcggggagcggttacggtggtcgtcgtcggattttagtcgcgcggttttcgcgttacgttttatttcggttcggatttatttgcgtttttgtttcggtcgcggtttggttcggggttgtattagttcgacgtagtggtggcggtagtagcggtggcgggaggtttggtttattttttatcgttgagtcggatcgagtatttagcgcggcgcggcggcgtttaacgttcgtttcgaaatttatttgtttggttaaaacggagtgacgttacgcgtcggtttaatcgacggttggtcgggggaggggttacggatttagagttttacggcgttttttgtcggatattgggggcgggaagggggaagtgaaaagggagatttggatgacgcgtttgcggtttttaagtggtagagaatgaaagtttgagtacgattgtagggaaaggaattaaatttt

SEQ ID NO: 35250 - DNA, 724 bp, Artificial Sequence
  chemically treated genomic DNA (Homo sapiens) CpG-island No: 35250
aaaatttaattcctttccctacaatcgtactcaaactttcattctctaccacttaaaaaccgcaaacgcgtcatccaaatctcccttttcacttcccccttcccgcccccaatatccgacaaaaaacgccgtaaaactctaaatccgtaacccctcccccgaccaaccgtcgattaaaccgacgcgtaacgtcactccgttttaaccaaacaaataaatttcgaaacgaacgttaaacgccgccgcgccgcgctaaatactcgatccgactcaacgataaaaaataaaccaaacctcccgccaccgctactaccgccaccactacgtcgaactaatacaaccccgaaccaaaccgcgaccgaaacaaaaacgcaaataaatccgaaccgaaataaaacgtaacgcgaaaaccgcgcgactaaaatccgacgacgaccaccgtaaccgctccccgccccctaccgccgcctacctacgctcccgaaacgcgaaacgaataaaaataaaaacgaaaacgccgcccgctaatccgaaataaaaacccgaccgcctacgcctcctccgatacgactctttccgcgcgcacgacccgaacgctaaacgtccccgcgaaccacgaaaaatcgaacgaacaaaaaacgaaatcctaaatccccgctaaaaccgaaaaaattcacgaataaaccgtaaacttacaccgaaccgacgctccaacttacgaaac

SEQ ID NO: 35251 - DNA, 724 bp, Artificial Sequence
  chemically treated genomic DNA (Homo sapiens) CpG-island No: 35251
gaggtttgatttttttttttatagtcgtgtttaaatttttattttttattatttgggggtcgtagacgcgttatttaggtttttttttttattttttttttttcgtttttagtgttcggtagggggcgtcgtgaaattttggattcgtggtttttttttcggttaatcgtcgattgggtcggcgcgtgacgttatttcgttttagttaaataaatgggtttcggggcgagcgttgggcgtcgtcgcgtcgcgttgggtgttcggttcgatttagcggtggggagtgagttaggtttttcgttatcgttgttgtcgttattattgcgtcgggttggtgtagtttcgggttaggtcgcggtcggggtaggagcgtaggtgggttcgggtcgaggtggggcgtggcgcgagggtcgcgcgattggggttcggcggcggttatcgtggtcgtttttcgttttttatcgtcgtttgtttgcgttttcggggcgcggggcgggtgggggtgggggcgggggcgtcgttcgttggttcggggtagggattcggtcgtttgcgtttttttcggtgcggtttttttcgcgcgtacggttcgggcgttgagcgttttcgcgggttacggagggtcgggcgggtagggagcggggttttgggttttcgttgaagtcgaggagatttacggataggtcgtgagtttgtatcggatcggcgttttaatttacgggat

SEQ ID NO: 35252 - DNA, 724 bp, Artificial Sequence
  chemically treated genomic DNA (Homo sapiens) CpG-island No: 35252
atcccgtaaattaaaacgccgatccgatacaaactcacgacctatccgtaaatctcctcgacttcaacgaaaacccaaaaccccgctccctacccgcccgaccctccgtaacccgcgaaaacgctcaacgcccgaaccgtacgcgcgaaaaaaaccgcaccgaaaaaaacgcaaacgaccgaatccctaccccgaaccaacgaacgacgcccccgcccccacccccacccgccccgcgccccgaaaacgcaaacaaacgacgataaaaaacgaaaaacgaccacgataaccgccgccgaaccccaatcgcgcgaccctcgcgccacgccccacctcgacccgaacccacctacgctcctaccccgaccgcgacctaacccgaaactacaccaacccgacgcaataataacgacaacaacgataacgaaaaacctaactcactccccaccgctaaatcgaaccgaacacccaacgcgacgcgacgacgcccaacgctcgccccgaaacccatttatttaactaaaacgaaataacgtcacgcgccgacccaatcgacgattaaccgaaaaaaaaaccacgaatccaaaatttcacgacgccccctaccgaacactaaaaacgaaaaaaaaaaaataaaaaaaaaaacctaaataacgcgtctacgacccccaaataataaaaaataaaaatttaaacacgactataaaaaaaaaaatcaaacctc

SEQ ID NO: 35253 - DNA, 624 bp, Artificial Sequence
  chemically treated genomic DNA (Homo sapiens) CpG-island No: 35253
  unsure (305, 362)
cggtcgttgtggttggggtcggttaagtcgaatatcggttatacgtaagcggcggcgggtgtggttggtgtgattaagatggtgatggcgatgcggtacgggtagttgttacgtacgttgtacgtggaatttttttcgtcggaggtggattggtcggcggggacggtttaattttttacggagaatacgttttggtttaggagtggtcgtgttcgtcgggtgggggtgtcgtcgttcgggattagtggtattaacgcgtacgttattttcgaatagttttcgggagtgtcgagttagtttgcggngtcgggttcgggttttgtcgtggatgtttcggtggtgtcgtggatggtgtcgggtanaatattcgaagcgttattcgcgtaggtaacggcgttgatgatttatttggacgagcgatttgatgttttttcgttggatgttgggtattcgttggcggtgatacggtcggcgttggatgttcgtgttcgattattcggcgtcgttatcggatttacgttttcggggggtggacgaataagcgatgttcgggaagagaattgggtttgttttcgatttggtataagggttgtttttttattagggatttaacgaattcgatta

SEQ ID NO: 35254 - DNA, 624 bp, Artificial Sequence
  chemically treated genomic DNA (Homo sapiens) CpG-island No: 35254
  unsure (263, 320)
taatcgaattcgttaaatccctaataaaaaaacaacccttataccaaatcgaaaacaaacccaattctcttcccgaacatcgcttattcgtccaccccccgaaaacgtaaatccgataacgacgccgaataatcgaacacgaacatccaacgccgaccgtatcaccgccaacgaatacccaacatccaacgaaaaaacatcaaatcgctcgtccaaataaatcatcaacgccgttacctacgcgaataacgcttcgaatattntacccgacaccatccacgacaccaccgaaacatccacgacaaaacccgaacccgacnccgcaaactaactcgacactcccgaaaactattcgaaaataacgtacgcgttaataccactaatcccgaacgacgacacccccacccgacgaacacgaccactcctaaaccaaaacgtattctccgtaaaaaattaaaccgtccccgccgaccaatccacctccgacgaaaaaaattccacgtacaacgtacgtaacaactacccgtaccgcatcgccatcaccatcttaatcacaccaaccacacccgccgccgcttacgtataaccgatattcgacttaaccgaccccaaccacaacgaccg

SEQ ID NO: 35255 - DNA, 624 bp, Artificial Sequence
  chemically treated genomic DNA (Homo sapiens) CpG-island No: 35255
  unsure (263, 320)
taatcggattcgttaagtttttaatggaaaagtaatttttgtattaagtcgaaggtaagtttagtttttttttcggatatcgtttgttcgtttatttttcgggggcgtgggttcgatgacgacgtcgggtggtcgggtacgggtatttagcgtcgatcgtgttatcgttagcgagtatttaatatttagcgaggagatattaggtcgttcgtttagataggttattaacgtcgttgtttgcgcggatagcgtttcgggtgttntgttcgatattatttacggtattatcggaatatttacgatagaattcgaattcggtntcgtagattgattcggtattttcgggggttgttcgaggatgacgtgcgcgttagtattattgatttcgaacgacgatatttttattcgacgaatacgattatttttgggttagggcgtgtttttcgtaaggagttgaatcgttttcgtcgattaatttattttcggcgaaaaagattttacgtgtaacgtgcgtggtagttgttcgtgtcgtatcgttattattattttgattatattagttatattcgtcgtcgtttgcgtatgatcgatgttcgatttgatcgattttaattataacggtcg

SEQ ID NO: 35256 - DNA, 624 bp, Artificial Sequence
  chemically treated genomic DNA (Homo sapiens) CpG-island No: 35256
  unsure (305, 362)
cgaccgttataattaaaatcgatcaaatcgaacatcgatcatacgcaaacgacgacgaatataactaatataatcaaaataataataacgatacgacacgaacaactaccacgcacgttacacgtaaaatctttttcgccgaaaataaattaatcgacgaaaacgattcaactccttacgaaaaacacgccctaacccaaaaataatcgtattcgtcgaataaaaatatcgtcgttcgaaatcaataatactaacgcgcacgtcatcctcgaacaacccccgaaaataccgaatcaatctacganaccgaattcgaattctatcgtaaatattccgataataccgtaaataatatcgaacanaacacccgaaacgctatccgcgcaaacaacgacgttaataacctatctaaacgaacgacctaatatctcctcgctaaatattaaatactcgctaacgataacacgatcgacgctaaatacccgtacccgaccacccgacgtcgtcatcgaacccacgcccccgaaaaataaacgaacaaacgatatccgaaaaaaaaactaaacttaccttcgacttaatacaaaaattacttttccattaaaaacttaacgaatccgatta

SEQ ID NO: 35257 - DNA, 1190 bp, Artificial Sequence
  chemically treated genomic DNA (Homo sapiens) CpG-island No: 35257
tatttcgcgcgttcggttttggaggttgcggggagcgacgtagcgcgatatttatttttaggaaagcgttgtttttcgtagaggagagaggttgattgtatttttagttcggtttttcgtttttttagcggttcgttttagatattgtatcgcggaggggaggtcggtcgattttttcggcgatgttcggtttttgtttgttgtgggagggtagcggcgggtatcgtgattttcgtatcgagaagagttttttttgttttttagtcgaagttttcgagtgttcggagtacgtttatttttcgcgaatatatttttgtagtcgaagtagtttttgaagttcgtagcgtttgtaataggttcggggtagtgggggaaatttatagtagtggcgattggtcgtaacgtataattgagttttagcgacggttacgggtaaggaggcgacgaatcggtcgttttagtttagggaagcggtggcgaatgtttcggagaaaggagggttagtcggggagaggattgcgtttcgaacgatggttcgcggatcggttatcgatggcgttcgttttcgtttgtcgtttttacgtcgcggattcggtgtttaggattcgtagagcgttttcggagcgcgttacggtagggtagagtaagtttgttattgtaggcgtcgcggaaggaggcgggttgtgcgttcgggggagggagttagaaagcgttttgtgtgtcggcggtcgttaggcgtttggatcgggttttcgtagcgttatcgtcgtatcgtttttttttcggttgttagagtagtttgcgtttcgtcgtcgtgcgtttcgttataagtggcgcggcggggaggggagggggcgcgtatgtaaagagatcgatatcgggggagggaggaagcgtattagcgcggtttgtggtgtaggaggaggaagaggaggagaaggagtgggaggaggagaggagttagagaagagcgtgtcgggggagttaatcgggagaggaagcgggagaggggggttgcggggagtgtagagagataaagcggacgtattgttttagtcgttggtagttgtaatttcgggaatcgagaataaaataagttttttcgggttcgagtgtttgcgtttttttgggttagtttggttaatggatagtttcggatttgagggatttattttaggggagcgtagttt

SEQ ID NO: 35258 - DNA, 1190 bp, Artificial Sequence
  chemically treated genomic DNA (Homo sapiens) CpG-island No: 35258
aaactacgctcccctaaaataaatccctcaaatccgaaactatccattaaccaaactaacccaaaaaaacgcaaacactcgaacccgaaaaaacttattttattctcgattcccgaaattacaactaccaacgactaaaacaatacgtccgctttatctctctacactccccgcaacccccctctcccgcttcctctcccgattaactcccccgacacgctcttctctaactcctctcctcctcccactccttctcctcctcttcctcctcctacaccacaaaccgcgctaatacgcttcctccctcccccgatatcgatctctttacatacgcgccccctcccctccccgccgcgccacttataacgaaacgcacgacgacgaaacgcaaactactctaacaaccgaaaaaaaaacgatacgacgataacgctacgaaaacccgatccaaacgcctaacgaccgccgacacacaaaacgctttctaactccctcccccgaacgcacaacccgcctccttccgcgacgcctacaataacaaacttactctaccctaccgtaacgcgctccgaaaacgctctacgaatcctaaacaccgaatccgcgacgtaaaaacgacaaacgaaaacgaacgccatcgataaccgatccgcgaaccatcgttcgaaacgcaatcctctccccgactaaccctcctttctccgaaacattcgccaccgcttccctaaactaaaacgaccgattcgtcgcctccttacccgtaaccgtcgctaaaactcaattatacgttacgaccaatcgccactactataaatttcccccactaccccgaacctattacaaacgctacgaacttcaaaaactacttcgactacaaaaatatattcgcgaaaaataaacgtactccgaacactcgaaaacttcgactaaaaaacaaaaaaaactcttctcgatacgaaaatcacgatacccgccgctaccctcccacaacaaacaaaaaccgaacatcgccgaaaaaatcgaccgacctcccctccgcgatacaatatctaaaacgaaccgctaaaaaaacgaaaaaccgaactaaaaatacaatcaacctctctcctctacgaaaaacaacgctttcctaaaaataaatatcgcgctacgtcgctccccgcaacctccaaaaccgaacgcgcgaaata

SEQ ID NO: 35259 - DNA, 1190 bp, Artificial Sequence
  chemically treated genomic DNA (Homo sapiens) CpG-island No: 35259
gggttgcgtttttttaaggtgggttttttagattcggggttgtttattaattaggttggtttaaagaggcgtagatattcgaattcgggaaaatttattttattttcggttttcggggttgtagttgttagcggttgagatagtgcgttcgttttgtttttttgtatttttcgtagtttttttttttcgttttttttttcgattaattttttcgatacgtttttttttagttttttttttttttttattttttttttttttttttttttttttatattataggtcgcgttaatgcgttttttttttttttcggtgtcggtttttttgtatacgcgttttttttttttttcgtcgcgttatttatagcggggcgtacggcggcggggcgtagattgttttggtagtcggagaggaggcggtgcggcggtggcgttgcggagattcggtttagacgtttggcggtcgtcggtatataaggcgttttttagttttttttttcgagcgtatagttcgttttttttcgcggcgtttgtagtggtaggtttgttttgttttatcgtgacgcgtttcggagacgttttgcgggttttggatatcgggttcgcggcgtggggacgatagacggaggcgaacgttatcggtagtcggttcgcgagttatcgttcggggcgtagtttttttttcggttggttttttttttttcggggtattcgttatcgtttttttgggttgagacgatcggttcgtcgtttttttgttcgtgatcgtcgttagaatttagttgtgcgttgcggttagtcgttattgttgtaagttttttttattgtttcggatttgttgtaggcgttgcgggttttaggggttgtttcggttgtaggggtgtgttcgcgaggggtgagcgtgtttcgagtattcgggagtttcgattagagggtaaggggagtttttttcggtgcggagattacggtgttcgtcgttgtttttttatagtaggtagaagtcgggtatcgtcggagaggtcgatcggtttttttttcgcggtgtaatgtttggggcgagtcgttggggaagcgaggagtcgagttaaggatatagttagttttttttttttgcggaaagtagcgtttttttgggggtgaatgtcgcgttgcgtcgtttttcgtagtttttagggtcgagcgcgcgggatg

SEQ ID NO: 35260 - DNA, 1190 bp, Artificial Sequence
  chemically treated genomic DNA (Homo sapiens) CpG-island No: 35260
catcccgcgcgctcgaccctaaaaactacgaaaaacgacgcaacgcgacattcacccccaaaaaaacgctactttccgcaaaaaaaaaaaactaactatatccttaactcgactcctcgcttccccaacgactcgccccaaacattacaccgcgaaaaaaaaaccgatcgacctctccgacgatacccgacttctacctactataaaaaaacaacgacgaacaccgtaatctccgcaccgaaaaaaactccccttaccctctaatcgaaactcccgaatactcgaaacacgctcacccctcgcgaacacacccctacaaccgaaacaacccctaaaacccgcaacgcctacaacaaatccgaaacaataaaaaaaacttacaacaataacgactaaccgcaacgcacaactaaattctaacgacgatcacgaacaaaaaaacgacgaaccgatcgtctcaacccaaaaaaacgataacgaataccccgaaaaaaaaaaaaccaaccgaaaaaaaaactacgccccgaacgataactcgcgaaccgactaccgataacgttcgcctccgtctatcgtccccacgccgcgaacccgatatccaaaacccgcaaaacgtctccgaaacgcgtcacgataaaacaaaacaaacctaccactacaaacgccgcgaaaaaaaacgaactatacgctcgaaaaaaaaaactaaaaaacgccttatataccgacgaccgccaaacgtctaaaccgaatctccgcaacgccaccgccgcaccgcctcctctccgactaccaaaacaatctacgccccgccgccgtacgccccgctataaataacgcgacgaaaaaaaaaaaaaacgcgtatacaaaaaaaccgacaccgaaaaaaaaaaaaaacgcattaacgcgacctataatataaaaaaaaaaaaaaaaaaaaaaaaaataaaaaaaaaaaaaaaactaaaaaaaaacgtatcgaaaaaattaatcgaaaaaaaaaacgaaaaaaaaaaactacgaaaaatacaaaaaaacaaaacgaacgcactatctcaaccgctaacaactacaaccccgaaaaccgaaaataaaataaattttcccgaattcgaatatctacgcctctttaaaccaacctaattaataaacaaccccgaatctaaaaaacccaccttaaaaaaacgcaaccc

SEQ ID NO: 35261 - DNA, 594 bp, Artificial Sequence
  chemically treated genomic DNA (Homo sapiens) CpG-island No: 35261
gcgggatcgaggaatttaggtgtggatagggataggtaaggcgggggacgaagagaaatgaaagttatatcggtggcggatgttttgaatataattcgttcgttatcgtacgtttttcgtttcgtatttagcggatttcgggacggtagtaggtgggttgtatacggattttgggataagtcgagttgaaaatcgcggagttaggggtggggtggagacgttcgcgacgttaaggttggggtttcggaatacgttgggaggagggtggaaggtaatttcggggaaattgggaaaggcggtttggatttcgggaatatcgcgtatttgcgggggtatagttttattcgagcgaacgggttttaaaggggaggtttcgcggtgtttatcgcgtagagtttagggggtggtgcgttcggtttttttgcggcgtatagtttagtttaggaacgcgggcggtgcggatttagcgggtcgggtgtaggcgcggagttgggtttttgcgttcggttcgattttcgtttataaatagagtagttagttgtagggttttattttgttttttaattgtttgattgtttgttcgttttattggtg

SEQ ID NO: 35262 - DNA, 594 bp, Artificial Sequence
  chemically treated genomic DNA (Homo sapiens) CpG-island No: 35262
caccaataaaacgaacaaacaatcaaacaattaaaaaacaaaataaaaccctacaactaactactctatttataaacgaaaatcgaaccgaacgcaaaaacccaactccgcgcctacacccgacccgctaaatccgcaccgcccgcgttcctaaactaaactatacgccgcaaaaaaaccgaacgcaccaccccctaaactctacgcgataaacaccgcgaaacctcccctttaaaacccgttcgctcgaataaaactatacccccgcaaatacgcgatattcccgaaatccaaaccgcctttcccaatttccccgaaattaccttccaccctcctcccaacgtattccgaaaccccaaccttaacgtcgcgaacgtctccaccccacccctaactccgcgattttcaactcgacttatcccaaaatccgtatacaacccacctactaccgtcccgaaatccgctaaatacgaaacgaaaaacgtacgataacgaacgaattatattcaaaacatccgccaccgatataactttcatttctcttcgtcccccgccttacctatccctatccacacctaaattcctcgatcccgc

SEQ ID NO: 35263 - DNA, 594 bp, Artificial Sequence
  chemically treated genomic DNA (Homo sapiens) CpG-island No: 35263
tattagtgagacgaataagtagttaggtagttggaaagtagaatggagttttgtaattggttgttttatttatagacggaggtcgggtcgggcgtagaggtttagtttcgcgtttgtattcggttcgttgagttcgtatcgttcgcgtttttgggttgggttgtgcgtcgtagaagggtcgggcgtattattttttgagttttgcgcggtgggtatcgcgggattttttttttggagttcgttcgttcgggtggggttgtgttttcgtaggtacgcggtgttttcgaagtttaggtcgttttttttagttttttcgaggttgttttttattttttttttagcgtgtttcgggattttagttttggcgtcgcgggcgtttttattttatttttagtttcgcggtttttagttcgatttgttttagagttcgtgtgtagtttatttgttgtcgtttcgggattcgttgagtgcggagcggggaacgtgcggtagcgagcgagttgtgtttagaatattcgttatcgatgtggtttttattttttttcgtttttcgttttgtttgtttttgtttatatttaggtttttcggtttcgt

SEQ ID NO: 35264 - DNA, 594 bp, Artificial Sequence
  chemically treated genomic DNA (Homo sapiens) CpG-island No: 35264
acgaaaccgaaaaacctaaatataaacaaaaacaaacaaaacgaaaaacgaaaaaaaataaaaaccacatcgataacgaatattctaaacacaactcgctcgctaccgcacgttccccgctccgcactcaacgaatcccgaaacgacaacaaataaactacacacgaactctaaaacaaatcgaactaaaaaccgcgaaactaaaaataaaataaaaacgcccgcgacgccaaaactaaaatcccgaaacacgctaaaaaaaaaataaaaaacaacctcgaaaaaactaaaaaaaacgacctaaacttcgaaaacaccgcgtacctacgaaaacacaaccccacccgaacgaacgaactccaaaaaaaaaatcccgcgatacccaccgcgcaaaactcaaaaaataatacgcccgacccttctacgacgcacaacccaacccaaaaacgcgaacgatacgaactcaacgaaccgaatacaaacgcgaaactaaacctctacgcccgacccgacctccgtctataaataaaacaaccaattacaaaactccattctactttccaactacctaactacttattcgtctcactaata

SEQ ID NO: 35265 - DNA, 521 bp, Artificial Sequence
  chemically treated genomic DNA (Homo sapiens) CpG-island No: 35265
gttagttcgagggatcgcggtgtggatagggataggtaaggcggggaaggaggagaaacgaaagttatattggtggcgggtgttttgtatacgattcgttttttattatacgtttttcgtttcgtatacgatcgattcggggattggagtaggagggttgtatcgggatttcgggataggtttagttgaaaacggcggggcgagggggtggggtggagacgttcgcgacgttaaggttggggtttcggaaagcgcggggaggagggtggaaggtaaaggtaatttcggggaaattgggaaaggcggtcgggatttcggggatattgcgtattattcggcgtatagtttttttcgcgtaaattcgagttaaaggggcggtcgagcggcgtattcggagcggagtttaggggatggtgcgttcggtatttatgttgggtttagtttagtttagtttaggatcgttggcggtgcgaatttagtcgggcgggtgtaagcgcggggtagggtttttgcgttcggtt

SEQ ID NO: 35266 - DNA, 521 bp, Artificial Sequence
  chemically treated genomic DNA (Homo sapiens) CpG-island No: 35266
aaccgaacgcaaaaaccctaccccgcgcttacacccgcccgactaaattcgcaccgccaacgatcctaaactaaactaaactaaacccaacataaataccgaacgcaccatcccctaaactccgctccgaatacgccgctcgaccgcccctttaactcgaatttacgcgaaaaaaactatacgccgaataatacgcaatatccccgaaatcccgaccgcctttcccaatttccccgaaattacctttaccttccaccctcctccccgcgctttccgaaaccccaaccttaacgtcgcgaacgtctccaccccaccccctcgccccgccgttttcaactaaacctatcccgaaatcccgatacaaccctcctactccaatccccgaatcgatcgtatacgaaacgaaaaacgtataataaaaaacgaatcgtatacaaaacacccgccaccaatataactttcgtttctcctccttccccgccttacctatccctatccacaccgcgatccctcgaactaac

SEQ ID NO: 35267 - DNA, 521 bp, Artificial Sequence
  chemically treated genomic DNA (Homo sapiens) CpG-island No: 35267
ggtcgggcgtagaggttttgtttcgcgtttgtattcgttcggttgggttcgtatcgttagcggttttgggttgggttgggttgagtttagtataagtgtcgggcgtattattttttgagtttcgtttcgagtgcgtcgttcgatcgtttttttggttcgggtttgcgcgggaggggttgtgcgtcgggtggtacgtagtgttttcgaggtttcggtcgttttttttagttttttcgaagttgtttttgttttttattttttttttcgcgtttttcgggattttagttttggcgtcgcgggcgtttttattttattttttcgtttcgtcgtttttaattgggtttgtttcggagtttcggtgtagtttttttgttttagttttcggatcggtcgtgtgcggagcggggggcgtgtggtagggagcgagtcgtgtgtagagtattcgttattaatgtggttttcgtttttttttttttttcgttttgtttgtttttgtttatatcgcggtttttcggattggt

SEQ ID NO: 35268 - DNA, 521 bp, Artificial Sequence
  chemically treated genomic DNA (Homo sapiens) CpG-island No: 35268
accaatccgaaaaaccgcgatataaacaaaaacaaacaaaacgaaaaaaaaaaaaaaacgaaaaccacattaataacgaatactctacacacgactcgctccctaccacacgccccccgctccgcacacgaccgatccgaaaactaaaacaaaaaaactacaccgaaactccgaaacaaacccaattaaaaacgacgaaacgaaaaaataaaataaaaacgcccgcgacgccaaaactaaaatcccgaaaaacgcgaaaaaaaaaataaaaaacaaaaacaacttcgaaaaaactaaaaaaaacgaccgaaacctcgaaaacactacgtaccacccgacgcacaacccctcccgcgcaaacccgaaccaaaaaaacgatcgaacgacgcactcgaaacgaaactcaaaaaataatacgcccgacacttatactaaactcaacccaacccaacccaaaaccgctaacgatacgaacccaaccgaacgaatacaaacgcgaaacaaaacctctacgcccgacc

SEQ ID NO: 35269 - DNA, 531 bp, Artificial Sequence
  chemically treated genomic DNA (Homo sapiens) CpG-island No: 35269
acgggagagagaggtcgattcgtgtttttcgtgttgttgtgtacggaggagcgggttcgagggatcgcggtgtggatagggataggtaaggcgggagatgaggagaaacgaaagttatatcggtggcgggtgttttgtatataattcgttggttatcgtacgtttttcgttttttatttagtcgattcggggataggagtaggagggttgtatcgggatttcgggataggtttagttgaaaacggcgaagcgagggatggggtggagacgttcgcgacgttaaggttggggtttcggaaagcgcggggaggagggtggaaggtaaaggtaattttagggaaattgggaaaggcggttaggatttcggggatatcgtatatcgtcgggcgtatagttttttacgcgcgaaggggcgttagaagggcggtttcgcggcgcgtcgggagtggagtttaggggttggtgttttcggtttttttgttgcgtataggttagtttaggatcgttgggggttcgaatttagcggggcgg

SEQ ID NO: 35270 - DNA, 531 bp, Artificial Sequence
  chemically treated genomic DNA (Homo sapiens) CpG-island No: 35270
ccgccccgctaaattcgaacccccaacgatcctaaactaacctatacgcaacaaaaaaaccgaaaacaccaacccctaaactccactcccgacgcgccgcgaaaccgcccttctaacgccccttcgcgcgtaaaaaactatacgcccgacgatatacgatatccccgaaatcctaaccgcctttcccaatttccctaaaattacctttaccttccaccctcctccccgcgctttccgaaaccccaaccttaacgtcgcgaacgtctccaccccatccctcgcttcgccgttttcaactaaacctatcccgaaatcccgatacaaccctcctactcctatccccgaatcgactaaataaaaaacgaaaaacgtacgataaccaacgaattatatacaaaacacccgccaccgatataactttcgtttctcctcatctcccgccttacctatccctatccacaccgcgatccctcgaacccgctcctccgtacacaacaacacgaaaaacacgaatcgacctctctctcccgt

SEQ ID NO: 35271 - DNA, 531 bp, Artificial Sequence
  chemically treated genomic DNA (Homo sapiens) CpG-island No: 35271
tcgtttcgttgggttcgagtttttagcggttttgggttggtttgtgcgtagtagaagggtcgggggtattaatttttgagttttattttcggcgcgtcgcgggatcgtttttttggcgttttttcgcgcgtgaggggttgtgcgttcggcggtatgcggtgttttcgaggttttggtcgttttttttagtttttttgaagttgtttttgttttttattttttttttcgcgtttttcgggattttagttttggcgtcgcgggcgtttttattttatttttcgtttcgtcgtttttagttgggtttgtttcggagtttcggtgtagtttttttgtttttgttttcggatcggttgagtgggaagcggggagcgtgcggtagttagcgagttgtgtgtagagtattcgttatcgatgtggttttcgtttttttttatttttcgttttgtttgtttttgtttatatcgcggtttttcggattcgttttttcgtatatagtaatacggggaatacgggtcggtttttttttttcgt

SEQ ID NO: 35272 - DNA, 531 bp, Artificial Sequence
  chemically treated genomic DNA (Homo sapiens) CpG-island No: 35272
acgaaaaaaaaaaaccgacccgtattccccgtattactatatacgaaaaaacgaatccgaaaaaccgcgatataaacaaaaacaaacaaaacgaaaaataaaaaaaaacgaaaaccacatcgataacgaatactctacacacaactcgctaactaccgcacgctccccgcttcccactcaaccgatccgaaaacaaaaacaaaaaaactacaccgaaactccgaaacaaacccaactaaaaacgacgaaacgaaaaataaaataaaaacgcccgcgacgccaaaactaaaatcccgaaaaacgcgaaaaaaaaaataaaaaacaaaaacaacttcaaaaaaactaaaaaaaacgaccaaaacctcgaaaacaccgcataccgccgaacgcacaacccctcacgcgcgaaaaaacgccaaaaaaacgatcccgcgacgcgccgaaaataaaactcaaaaattaatacccccgacccttctactacgcacaaaccaacccaaaaccgctaaaaactcgaacccaacgaaacga

SEQ ID NO: 35273 - DNA, 511 bp, Artificial Sequence
  chemically treated genomic DNA (Homo sapiens) CpG-island No: 35273
tttttttttttattttcggagatggtacgtgcgcgtttttacgtagtggcggttgttgcggcgagtacgttttttgcgggatttacgcggggagtgggttggtagtgcgcgtatagcggcggcgagtgggtcgtgtacgcggatgcggggtgggagtgggggcgtacgcgcgggcgtggggcgagcgggtttcggtagtgtatatatacggtaggggcgggcgatagatgtagtgcgtgcgtcggagtttaagcgtataaacggaaagagcgggcgcggtgcgtaggggcgggcgtttagcgggtttggtatgcgcgttttcgttcgaggttataaagtatcgtattgttgatattaattaagtcgcgcgttaagttgaagttggagaagtacgtttaaacgagttataggtggtggtttaattacgagatgggaatttgaggattgatacgtagttttatggtgagatacgcgggatcgcgagacggatatatggatattgaggggtaga

SEQ ID NO: 35274 - DNA, 511 bp, Artificial Sequence
  chemically treated genomic DNA (Homo sapiens) CpG-island No: 35274
tctacccctcaatatccatatatccgtctcgcgatcccgcgtatctcaccataaaactacgtatcaatcctcaaattcccatctcgtaattaaaccaccacctataactcgtttaaacgtacttctccaacttcaacttaacgcgcgacttaattaatatcaacaatacgatactttataacctcgaacgaaaacgcgcataccaaacccgctaaacgcccgcccctacgcaccgcgcccgctctttccgtttatacgcttaaactccgacgcacgcactacatctatcgcccgcccctaccgtatatatacactaccgaaacccgctcgccccacgcccgcgcgtacgcccccactcccaccccgcatccgcgtacacgacccactcgccgccgctatacgcgcactaccaacccactccccgcgtaaatcccgcaaaaaacgtactcgccgcaacaaccgccactacgtaaaaacgcgcacgtaccatctccgaaaataaaaaaaaaaa

SEQ ID NO: 35275 - DNA, 511 bp, Artificial Sequence
  chemically treated genomic DNA (Homo sapiens) CpG-island No: 35275
tttgttttttagtgtttatgtattcgtttcgcggtttcgcgtgttttattataaggttacgtgttagtttttaggtttttatttcgtagttagattattatttgtagttcgtttgaacgtgtttttttaattttaatttgacgcgcggtttggttagtgttagtagtgcgatgttttatagtttcgggcgggggcgcgtatgttaagttcgttgggcgttcgtttttgcgtatcgcgttcgtttttttcgtttgtgcgtttgggtttcggcgtacgtattgtatttgtcgttcgtttttgtcgtgtgtgtgtattgtcggggttcgttcgttttacgttcgcgcgtgcgtttttatttttatttcgtattcgcgtgtacgatttattcgtcgtcgttgtgcgcgtattgttagtttatttttcgcgtgggtttcgtaggggacgtgttcgtcgtagtagtcgttattgcgtggaagcgcgtacgtattattttcgaaagtggagaaaaagg

SEQ ID NO: 35276 - DNA, 511 bp, Artificial Sequence
  chemically treated genomic DNA (Homo sapiens) CpG-island No: 35276
cctttttctccactttcgaaaataatacgtacgcgcttccacgcaataacgactactacgacgaacacgtcccctacgaaacccacgcgaaaaataaactaacaatacgcgcacaacgacgacgaataaatcgtacacgcgaatacgaaataaaaataaaaacgcacgcgcgaacgtaaaacgaacgaaccccgacaatacacacacacgacaaaaacgaacgacaaatacaatacgtacgccgaaacccaaacgcacaaacgaaaaaaacgaacgcgatacgcaaaaacgaacgcccaacgaacttaacatacgcgcccccgcccgaaactataaaacatcgcactactaacactaaccaaaccgcgcgtcaaattaaaattaaaaaaacacgttcaaacgaactacaaataataatctaactacgaaataaaaacctaaaaactaacacgtaaccttataataaaacacgcgaaaccgcgaaacgaatacataaacactaaaaaacaaa

SEQ ID NO: 35277 - DNA, 709 bp, Artificial Sequence
  chemically treated genomic DNA (Homo sapiens) CpG-island No: 35277
atcggcggttttacgtcggtacgttagcgttcgttcgaagcggttcgttatttcggtaagtattcggtacggcggtagcggcgttggtagtacgtttttagtattcggtattcgtttagattattttagtatttattacggtttttgtgcgttgttggtcgttaggtaaagatgcgggtttaatcggatattcggcggtagcgttttttatagtcgcgttagcgtatggtcgttcggttgtgttgttttattatcgcgtattagttatattgatttattgcggttgtatatcgtttttttcggtagtagcggtttaaagtgaatgtttcgttcgtcgttgtcgttgagtattagttcgttattacgtagttgtaagcggatattagaaggcgttttttagtcggggtcgaaaacgtttatcggtgtaggcgttttcgttcggtagttgttgtaggtgcgggagagaatgaacggtagcgggtcgggtagcgtaaggttcgtttcgtcgggtagtattttcgtttttagtagcggatttatcgggttgttcgaagttatttcgttcggatatatcgagtacgttacgtcggtgggcgcgttaatttttatatttgtcgaattttggataatgggatcgttatattgagttatatttttttgacgcgtcgttggtttttcgtttatataaagtgtttttttagttattgtt

SEQ ID NO: 35278 - DNA, 709 bp, Artificial Sequence
  chemically treated genomic DNA (Homo sapiens) CpG-island No: 35278
aacaataactaaaaaaacactttatataaacgaaaaaccaacgacgcgtcaaaaaaatataactcaatataacgatcccattatccaaaattcgacaaatataaaaattaacgcgcccaccgacgtaacgtactcgatatatccgaacgaaataacttcgaacaacccgataaatccgctactaaaaacgaaaatactacccgacgaaacgaaccttacgctacccgacccgctaccgttcattctctcccgcacctacaacaactaccgaacgaaaacgcctacaccgataaacgttttcgaccccgactaaaaaacgccttctaatatccgcttacaactacgtaataacgaactaatactcaacgacaacgacgaacgaaacattcactttaaaccgctactaccgaaaaaaacgatatacaaccgcaataaatcaatataactaatacgcgataataaaacaacacaaccgaacgaccatacgctaacgcgactataaaaaacgctaccgccgaatatccgattaaacccgcatctttacctaacgaccaacaacgcacaaaaaccgtaataaatactaaaataatctaaacgaataccgaatactaaaaacgtactaccaacgccgctaccgccgtaccgaatacttaccgaaataacgaaccgcttcgaacgaacgctaacgtaccgacgtaaaaccgccgat

SEQ ID NO: 35279 - DNA, 709 bp, Artificial Sequence
  chemically treated genomic DNA (Homo sapiens) CpG-island No: 35279
aataataattaaaagggtattttatatgagcggaaaattagcggcgcgttagggagatatgatttagtatggcggttttattgtttagggttcggtaggtgtaagaattggcgcgtttatcggcgtggcgtgttcggtgtgttcgggcgggatgatttcgggtaattcggtaaattcgttgttgggggcgaaggtgttgttcggcgagacggattttgcgttgttcggttcgttgtcgtttattttttttcgtatttatagtagttatcggacgaagacgtttgtatcggtgggcgttttcggtttcggttggaaagcgttttttgatattcgtttatagttacgtgatgacggattgatatttaacgataacggcgggcggagtatttattttgagtcgttgttgtcgggggaggcggtgtatagtcgtagtgagttaatgtggttggtgcgcggtggtaaggtagtatagtcggacggttatacgttggcgcggttgtggggggcgttgtcgtcggatattcggttaagttcgtatttttatttggcgattaatagcgtataggggtcgtggtggatattggggtggtttgagcgggtgtcgggtgttgaggacgtattgttagcgtcgttgtcgtcgtatcgggtgtttatcgggatggcggatcgtttcgggcggacgttgacgtatcggcgtgaggtcgtcggt

SEQ ID NO: 35280 - DNA, 709 bp, Artificial Sequence
  chemically treated genomic DNA (Homo sapiens) CpG-island No: 35280
accgacgacctcacgccgatacgtcaacgtccgcccgaaacgatccgccatcccgataaacacccgatacgacgacaacgacgctaacaatacgtcctcaacacccgacacccgctcaaaccaccccaatatccaccacgacccctatacgctattaatcgccaaataaaaatacgaacttaaccgaatatccgacgacaacgccccccacaaccgcgccaacgtataaccgtccgactatactaccttaccaccgcgcaccaaccacattaactcactacgactatacaccgcctcccccgacaacaacgactcaaaataaatactccgcccgccgttatcgttaaatatcaatccgtcatcacgtaactataaacgaatatcaaaaaacgctttccaaccgaaaccgaaaacgcccaccgatacaaacgtcttcgtccgataactactataaatacgaaaaaaaataaacgacaacgaaccgaacaacgcaaaatccgtctcgccgaacaacaccttcgcccccaacaacgaatttaccgaattacccgaaatcatcccgcccgaacacaccgaacacgccacgccgataaacgcgccaattcttacacctaccgaaccctaaacaataaaaccgccatactaaatcatatctccctaacgcgccgctaattttccgctcatataaaatacccttttaattattatt

SEQ ID NO: 35281 - DNA, 522 bp, Artificial Sequence
  chemically treated genomic DNA (Homo sapiens) CpG-island No: 35281
ttgttgttatcgggattttcgtttcgttttattttgttagtaaaggatgggcgatggcgggttttatttttatcgcgtttggcggcgtatttgtcgtgatgcgcgttatgtttggttggatgtcggatcgttttggcggcgtgaaagtggcgattgtttttttgtttgtagaaacggtgggtttgttgttgttttggtaagttttaggtgtatgggtcgtattagcgggcgcggcgttatcggagtcggatgttcgtttattttttttgcgttgggcgtggaggtggttaaacgcgtttttttataagttcgcggtatcgtattgggcggttacgtcgcgttttaggatatcgttttcggcgttttcgggtcgttgcgggaatgttggcgattacgtttggttatttttcggtattttttgtcggggcgatttttgcggtgttggtattattgttacgatattgttatttcgtcggggtttacgaattagttagattagtattaggataatcgcgattaata

SEQ ID NO: 35282 - DNA, 522 bp, Artificial Sequence
  chemically treated genomic DNA (Homo sapiens) CpG-island No: 35282
tattaatcgcgattatcctaatactaatctaactaattcgtaaaccccgacgaaataacaatatcgtaacaataataccaacaccgcaaaaatcgccccgacaaaaaataccgaaaaataaccaaacgtaatcgccaacattcccgcaacgacccgaaaacgccgaaaacgatatcctaaaacgcgacgtaaccgcccaatacgataccgcgaacttataaaaaaacgcgtttaaccacctccacgcccaacgcaaaaaaaataaacgaacatccgactccgataacgccgcgcccgctaatacgacccatacacctaaaacttaccaaaacaacaacaaacccaccgtttctacaaacaaaaaaacaatcgccactttcacgccgccaaaacgatccgacatccaaccaaacataacgcgcatcacgacaaatacgccgccaaacgcgataaaaataaaacccgccatcgcccatcctttactaacaaaataaaacgaaacgaaaatcccgataacaacaa

SEQ ID NO: 35283 - DNA, 522 bp, Artificial Sequence
  chemically treated genomic DNA (Homo sapiens) CpG-island No: 35283
tgttagtcgcgattattttgatgttggtttggttggttcgtaaatttcgacgaaatgatagtatcgtgataataatattagtatcgtagagatcgtttcggtaagaaatatcgaagagtaattaaacgtggtcgttagtattttcgtagcggttcggagacgtcgagggcgatattttgaaacgcggcgtaatcgtttagtgcggtgtcgcgaatttgtgaggggacgcgtttaattatttttacgtttagcgtaggaaagataagcgaatattcggtttcggtaacgtcgcgttcgttaatgcgatttatgtatttggggtttgttagagtagtaataagtttatcgtttttataagtagagagataatcgttatttttacgtcgttaaaacggttcggtatttagttaaatatgacgcgtattacgataaatgcgtcgttaaacgcggtaagagtaaagttcgttatcgtttattttttgttggtaaagtagagcgaaacgaaagtttcgataatagtaa

SEQ ID NO: 35284 - DNA, 522 bp, Artificial Sequence
  chemically treated genomic DNA (Homo sapiens) CpG-island No: 35284
ttactattatcgaaactttcgtttcgctctactttaccaacaaaaaataaacgataacgaactttactcttaccgcgtttaacgacgcatttatcgtaatacgcgtcatatttaactaaataccgaaccgttttaacgacgtaaaaataacgattatctctctacttataaaaacgataaacttattactactctaacaaaccccaaatacataaatcgcattaacgaacgcgacgttaccgaaaccgaatattcgcttatctttcctacgctaaacgtaaaaataattaaacgcgtcccctcacaaattcgcgacaccgcactaaacgattacgccgcgtttcaaaatatcgccctcgacgtctccgaaccgctacgaaaatactaacgaccacgtttaattactcttcgatatttcttaccgaaacgatctctacgatactaatattattatcacgatactatcatttcgtcgaaatttacgaaccaaccaaaccaacatcaaaataatcgcgactaaca

SEQ ID NO: 35285 - DNA, 750 bp, Artificial Sequence
  chemically treated genomic DNA (Homo sapiens) CpG-island No: 35285
ttacggatgtcgaacgtcgttattagtagtattaaagcggtaaaggggcgaaagtattgcgcgggaaaggagaattaacgttggtgtttttcgcgttagtgggcgatcgttcgttggcgttacgggcggaatatcgcgttaagtaattgattaaacggtaaaaagagcgtttggtagcggaaggcgtagggtttgtagagttgttaagtagtttgtaaatttcggagattaaaagcgattgaaatgttcgtgatatttaattaggtcggtaacgttatttagcgcgttattcgttaaacgatgtatttggaaggcgtttttagtgttcggttagcggtaacgtagatcgtgatgcgtcgttagtttaaagtcgaaacgattgtatagcgtcggatcgtttagcgttattattgcggtatagtcgaatttattaagcgaatcgagttttttatagattagttggcgtgttagtttttgtttacggtattttttattaatcgttaacggtgttatgtcgatttattgtaggttttcgttttgtatattaatcggattaaatgttatatagttaatgatttgattttcgttatttgtcgttattagttttagcgttagaaagttatttttacgtagatcgtgaattagtttcgttttcgtattattttcgaatgagcgacgtagtagggtattaatattcggcgtattaatgggaatttttattcgaattagtatggtttatttatcgatgtt

SEQ ID NO: 35286 - DNA, 750 bp, Artificial Sequence
  chemically treated genomic DNA (Homo sapiens) CpG-island No: 35286
aacatcgataaataaaccatactaattcgaataaaaattcccattaatacgccgaatattaataccctactacgtcgctcattcgaaaataatacgaaaacgaaactaattcacgatctacgtaaaaataactttctaacgctaaaactaataacgacaaataacgaaaatcaaatcattaactatataacatttaatccgattaatatacaaaacgaaaacctacaataaatcgacataacaccgttaacgattaataaaaaataccgtaaacaaaaactaacacgccaactaatctataaaaaactcgattcgcttaataaattcgactataccgcaataataacgctaaacgatccgacgctatacaatcgtttcgactttaaactaacgacgcatcacgatctacgttaccgctaaccgaacactaaaaacgccttccaaatacatcgtttaacgaataacgcgctaaataacgttaccgacctaattaaatatcacgaacatttcaatcgcttttaatctccgaaatttacaaactacttaacaactctacaaaccctacgccttccgctaccaaacgctctttttaccgtttaatcaattacttaacgcgatattccgcccgtaacgccaacgaacgatcgcccactaacgcgaaaaacaccaacgttaattctcctttcccgcgcaatactttcgcccctttaccgctttaatactactaataacgacgttcgacatccgtaa

SEQ ID NO: 35287 - DNA, 750 bp, Artificial Sequence
  chemically treated genomic DNA (Homo sapiens) CpG-island No: 35287
gatatcggtaggtgaattatgttaattcgagtagaaatttttattgatgcgtcgggtattgatgttttgttgcgtcgtttattcgaaagtgatgcggaagcgaagttggtttacgatttgcgtgaagatggttttttgacgttggggttggtggcgatagatgacgaaggttaggttattggttatgtggtatttagttcggttgatgtgtagggcgaagatttgtaatgggtcggtatggtatcgttggcggttgatgaaaaatatcgtggataggggttggtacgttaattggtttatgaaggattcgattcgtttaatgagttcggttatgtcgtagtggtgacgttgggcgattcggcgttgtatagtcgtttcggttttgaattggcggcgtattacgatttgcgttgtcgttggtcgggtattgaaagcgttttttaggtatatcgtttagcggatgacgcgttgaatggcgttatcggtttggttgagtattacgagtattttaatcgtttttaattttcggggtttgtagattgtttaatagttttgtaaattttgcgtttttcgttattagacgttttttttgtcgtttggttagttgtttaacgcgatatttcgttcgtaacgttagcgaacgatcgtttattggcgcggaaaatattagcgttagtttttttttttcgcgtagtgttttcgtttttttgtcgttttggtgttgttgatagcggcgttcgatattcgtgg

SEQ ID NO: 35288 - DNA, 750 bp, Artificial Sequence
  chemically treated genomic DNA (Homo sapiens) CpG-island No: 35288
ccacgaatatcgaacgccgctatcaacaacaccaaaacgacaaaaaaacgaaaacactacgcgaaaaaaaaaaactaacgctaatattttccgcgccaataaacgatcgttcgctaacgttacgaacgaaatatcgcgttaaacaactaaccaaacgacaaaaaaaacgtctaataacgaaaaacgcaaaatttacaaaactattaaacaatctacaaaccccgaaaattaaaaacgattaaaatactcgtaatactcaaccaaaccgataacgccattcaacgcgtcatccgctaaacgatatacctaaaaaacgctttcaatacccgaccaacgacaacgcaaatcgtaatacgccgccaattcaaaaccgaaacgactatacaacgccgaatcgcccaacgtcaccactacgacataaccgaactcattaaacgaatcgaatccttcataaaccaattaacgtaccaacccctatccacgatatttttcatcaaccgccaacgataccataccgacccattacaaatcttcgccctacacatcaaccgaactaaataccacataaccaataacctaaccttcgtcatctatcgccaccaaccccaacgtcaaaaaaccatcttcacgcaaatcgtaaaccaacttcgcttccgcatcactttcgaataaacgacgcaacaaaacatcaatacccgacgcatcaataaaaatttctactcgaattaacataattcacctaccgatatc

SEQ ID NO: 35289 - DNA, 577 bp, Artificial Sequence
  chemically treated genomic DNA (Homo sapiens) CpG-island No: 35289
gtaaattgaataggagcgggggaaatttcgtggtaattacggtaacggtggcggggcgagaattttgcgtaggcgcgttatattttattttcgtttatttatattacggcggtcggttttagttatttttttcggttttagattttacgggtcggttacgggtgggggtagtagggaggtacgggtttggcgtttgcgtagtcgtcggggcgttggtgtgatcgagtttacgtagcgagggttgtagtcgttttttttttggcgttgttatcgcggtttagaggttataaaagggttaacgggttttttttgttgtttagtcgcgtcgttagcgggttgagggtaggaagtagtcgtttcgagtggaggcgattgggggttgaagagcgcgtcgttttttcgttttattttttaggtgagacgttttttcgatttcggagattgaggttattgggtagtcgtggattttttcggacggttgcggcgatttattttttttcgttgtggtggtatttttggggcgggggttttttaggttattatagtagtttcggtttttttttttcgggagattcgg

SEQ ID NO: 35290 - DNA, 577 bp, Artificial Sequence
  chemically treated genomic DNA (Homo sapiens) CpG-island No: 35290
ccgaatctcccgaaaaaaaaaaaccgaaactactataataacctaaaaaacccccgccccaaaaataccaccacaacgaaaaaaaataaatcgccgcaaccgtccgaaaaaatccacgactacccaataacctcaatctccgaaatcgaaaaaacgtctcacctaaaaaataaaacgaaaaaacgacgcgctcttcaacccccaatcgcctccactcgaaacgactacttcctaccctcaacccgctaacgacgcgactaaacaacaaaaaaaacccgttaacccttttataacctctaaaccgcgataacaacgccaaaaaaaaaacgactacaaccctcgctacgtaaactcgatcacaccaacgccccgacgactacgcaaacgccaaacccgtacctccctactacccccacccgtaaccgacccgtaaaatctaaaaccgaaaaaaataactaaaaccgaccgccgtaatataaataaacgaaaataaaatataacgcgcctacgcaaaattctcgccccgccaccgttaccgtaattaccacgaaatttcccccgctcctattcaatttac

SEQ ID NO: 35291 - DNA, 577 bp, Artificial Sequence
  chemically treated genomic DNA (Homo sapiens) CpG-island No: 35291
tcgagtttttcgaggggaaggaatcgaggttgttgtggtaatttggggaattttcgttttagaagtattattatagcgggaaggaatggatcgtcgtagtcgttcgagaaggtttacggttgtttagtggttttagttttcgggatcgagggagcgttttatttggaaagtgggacgagagggcggcgcgttttttagtttttagtcgtttttattcggagcggttattttttatttttagttcgttggcggcgcgattgggtagtagagggagttcgttagtttttttataatttttaggtcgcgatggtagcgttagggaggaggcgattgtagttttcgttacgtgagttcgattatattagcgtttcggcgattgcgtaggcgttaagttcgtgtttttttgttgtttttattcgtggtcggttcgtggagtttgaggtcgagaggagtggttgggatcggtcgtcgtggtgtgggtaagcgggagtgggatgtaacgcgtttgcgtagggttttcgtttcgttatcgttatcgtggttattacggggtttttttcgtttttgtttagtttgt

SEQ ID NO: 35292 - DNA, 577 bp, Artificial Sequence
  chemically treated genomic DNA (Homo sapiens) CpG-island No: 35292
acaaactaaacaaaaacgaaaaaaaccccgtaataaccacgataacgataacgaaacgaaaaccctacgcaaacgcgttacatcccactcccgcttacccacaccacgacgaccgatcccaaccactcctctcgacctcaaactccacgaaccgaccacgaataaaaacaacaaaaaaacacgaacttaacgcctacgcaatcgccgaaacgctaatataatcgaactcacgtaacgaaaactacaatcgcctcctccctaacgctaccatcgcgacctaaaaattataaaaaaactaacgaactccctctactacccaatcgcgccgccaacgaactaaaaataaaaaataaccgctccgaataaaaacgactaaaaactaaaaaacgcgccgccctctcgtcccactttccaaataaaacgctccctcgatcccgaaaactaaaaccactaaacaaccgtaaaccttctcgaacgactacgacgatccattccttcccgctataataatacttctaaaacgaaaattccccaaattaccacaacaacctcgattccttcccctcgaaaaactcga

SEQ ID NO: 35293 - DNA, 551 bp, Artificial Sequence
  chemically treated genomic DNA (Homo sapiens) CpG-island No: 35293
ttttacgttttaggtcgggcgtttatattttgttttttttgacgtcgtatagttacgtatttaggtatttttttcgttatttttttttttcgtttgtaggcggtgtttatatcgtttttttcgtttttgtagatcgggttttggagggcggtcgggcggtttacgggtcggtgtcgcgtcgttagagagaacgcggtaattcgttttagtcgattttggatttttgatttggcgcgatttcggaagtgggcgggcgcgcgatttcgaagttagtatcgacgcggcgtatcgtagttaatcgtacgttttaggtcgtagcgttttggcgaggttggttaatgggtacggggtttgatgtcgttttcggtttatttttttgttcggttttcgggagggtcggttcgtttttttcggacgtcgaggatttattatcgcgatttcgtttcgttcggcgcgggtttaggtgagtgtagagtggcgttttagttgtagcggcggttagggtcgtgggaaagaatggggcgatgaagggttgggtacgtcgttttttt

SEQ ID NO: 35294 - DNA, 551 bp, Artificial Sequence
  chemically treated genomic DNA (Homo sapiens) CpG-island No: 35294
aaaaaaacgacgtacccaacccttcatcgccccattctttcccacgaccctaaccgccgctacaactaaaacgccactctacactcacctaaacccgcgccgaacgaaacgaaatcgcgataataaatcctcgacgtccgaaaaaaacgaaccgaccctcccgaaaaccgaacaaaaaaataaaccgaaaacgacatcaaaccccgtacccattaaccaacctcgccaaaacgctacgacctaaaacgtacgattaactacgatacgccgcgtcgatactaacttcgaaatcgcgcgcccgcccacttccgaaatcgcgccaaatcaaaaatccaaaatcgactaaaacgaattaccgcgttctctctaacgacgcgacaccgacccgtaaaccgcccgaccgccctccaaaacccgatctacaaaaacgaaaaaaacgatataaacaccgcctacaaacgaaaaaaaaaaataacgaaaaaaatacctaaatacgtaactatacgacgtcaaaaaaaacaaaatataaacgcccgacctaaaacgtaaaa

SEQ ID NO: 35295 - DNA, 551 bp, Artificial Sequence
  chemically treated genomic DNA (Homo sapiens) CpG-island No: 35295
gggaaggcggcgtgtttagttttttatcgttttatttttttttacggttttggtcgtcgttgtagttggggcgttattttgtatttatttgggttcgcgtcgggcggggcgaagtcgcggtggtaggttttcggcgttcgggaggagcggatcggttttttcggggatcgggtaagagggtgggtcggaagcggtattaggtttcgtgtttattggttagtttcgttaggacgttgcgatttgggacgtgcgattggttgcggtgcgtcgcgtcggtgttggtttcgaggtcgcgcgttcgtttattttcggggtcgcgttaggttaggagtttagagtcggttgaagcgagttgtcgcgttttttttggcggcgcgatatcggttcgtggatcgttcggtcgttttttaggattcggtttgtaggagcggagagggcggtgtggatatcgtttgtaggcgaggagaaggggtggcggagagggtatttgggtgcgtggttgtgcggcgttaggaggagtagggtgtgggcgttcggtttggggcgtggag

SEQ ID NO: 35296 - DNA, 551 bp, Artificial Sequence
  chemically treated genomic DNA (Homo sapiens) CpG-island No: 35296
ctccacgccccaaaccgaacgcccacaccctactcctcctaacgccgcacaaccacgcacccaaataccctctccgccaccccttctcctcgcctacaaacgatatccacaccgccctctccgctcctacaaaccgaatcctaaaaaacgaccgaacgatccacgaaccgatatcgcgccgccaaaaaaaacgcgacaactcgcttcaaccgactctaaactcctaacctaacgcgaccccgaaaataaacgaacgcgcgacctcgaaaccaacaccgacgcgacgcaccgcaaccaatcgcacgtcccaaatcgcaacgtcctaacgaaactaaccaataaacacgaaacctaataccgcttccgacccaccctcttacccgatccccgaaaaaaccgatccgctcctcccgaacgccgaaaacctaccaccgcgacttcgccccgcccgacgcgaacccaaataaatacaaaataacgccccaactacaacgacgaccaaaaccgtaaaaaaaaataaaacgataaaaaactaaacacgccgccttccc

SEQ ID NO: 35297 - DNA, 799 bp, Artificial Sequence
  chemically treated genomic DNA (Homo sapiens) CpG-island No: 35297
ggagaggtcgggtaaggaggatcgcgggaggtatggatgcgggggtgttgtgttagggggagggtcggggaaagcgggcggggggaggttgtttcgggtacggatatggggtaggcgggtgggaaaggcgcgagtggaaattgagggggaggatggggaaaagtaggttgtggggaggttgtcgggggacgggagtaggggaggtggggacgtaggttgttttgggggggttgtagcgggagaatggggagagacgaatggggggaagttatttcggggcggttggggggttgtcgggggaggatggggagaagcgtgtgggggaggttgtttgggggaacgagggtcgggggttgtcgggggatggtggggagaggcgggcgggggtggttgttttgggggacgagggtggggggtagtagggggaggatggggagaggcgggcgggggaggttttttattttgggggcggggcggaagttgggggcggggttgcgcggttatttggttcgggagttttaggcgtcggtttttcgttcgttcgttcgtaggtgtcgttattgttgtttagcgttcgtcgggatattcggatttcggtttcgtttcggtttcgtttcgagggtttatttgtatgcgttcgcggtttttttcggggcggttaaagcgacgtgtttttgtttttcgtgggtagtttcggcgcgtgtggtcgcggatttttaggtaattcgggagttgggaattcgggtggggtcgcggggaggggatttaggggtaggatttggcggtggggttgtggggg

SEQ ID NO: 35298 - DNA, 799 bp, Artificial Sequence
  chemically treated genomic DNA (Homo sapiens) CpG-island No: 35298
cccccacaaccccaccgccaaatcctacccctaaatcccctccccgcgaccccacccgaattcccaactcccgaattacctaaaaatccgcgaccacacgcgccgaaactacccacgaaaaacaaaaacacgtcgctttaaccgccccgaaaaaaaccgcgaacgcatacaaataaaccctcgaaacgaaaccgaaacgaaaccgaaatccgaatatcccgacgaacgctaaacaacaataacgacacctacgaacgaacgaacgaaaaaccgacgcctaaaactcccgaaccaaataaccgcgcaaccccgcccccaacttccgccccgcccccaaaataaaaaacctcccccgcccgcctctccccatcctccccctactaccccccaccctcgtcccccaaaacaaccacccccgcccgcctctccccaccatcccccgacaacccccgaccctcgttcccccaaacaacctcccccacacgcttctccccatcctcccccgacaaccccccaaccgccccgaaataacttccccccattcgtctctccccattctcccgctacaacccccccaaaacaacctacgtccccacctcccctactcccgtcccccgacaacctccccacaacctacttttccccatcctccccctcaatttccactcgcgcctttcccacccgcctaccccatatccgtacccgaaacaacctccccccgcccgctttccccgaccctccccctaacacaacacccccgcatccatacctcccgcgatcctccttacccgacctctcc

SEQ ID NO: 35299 - DNA, 799 bp, Artificial Sequence
  chemically treated genomic DNA (Homo sapiens) CpG-island No: 35299
tttttataattttatcgttaggttttgtttttgggtttttttttcgcggttttattcgagtttttagttttcgggttatttggggattcgcggttatacgcgtcgaggttgtttacgggggataaggatacgtcgttttagtcgtttcgggaggggtcgcggacgtatgtaaatgagttttcggggcggggtcggggcggggtcggggttcgggtgtttcggcgggcgttgggtagtagtggcggtatttgcgggcgggcgggcgggaggtcggcgtttggggttttcggattaggtggtcgcgtagtttcgtttttagttttcgtttcgtttttaagatagaaaatttttttcgttcgtttttttttattttttttttattgttttttattttcgttttttaagatagttattttcgttcgtttttttttattatttttcgatagttttcgattttcgtttttttagatagttttttttatacgtttttttttattttttttcgatagttttttaatcgtttcgagatagtttttttttattcgtttttttttattttttcgttatagtttttttaagatagtttgcgtttttattttttttattttcgtttttcgatagtttttttataatttgtttttttttatttttttttttaatttttattcgcgttttttttattcgtttattttatattcgtgttcgagatagttttttttcgttcgtttttttcgattttttttttgatatagtattttcgtatttatgtttttcgcgattttttttgttcggttttttt

SEQ ID NO: 35300 - DNA, 799 bp, Artificial Sequence
  chemically treated genomic DNA (Homo sapiens) CpG-island No: 35300
aaaaaaaccgaacaaaaaaaatcgcgaaaaacataaatacgaaaatactatatcaaaaaaaaaatcgaaaaaaacgaacgaaaaaaaactatctcgaacacgaatataaaataaacgaataaaaaaaacgcgaataaaaattaaaaaaaaaaataaaaaaaaacaaattataaaaaaactatcgaaaaacgaaaataaaaaaaataaaaacgcaaactatcttaaaaaaactataacgaaaaaataaaaaaaaacgaataaaaaaaaactatctcgaaacgattaaaaaactatcgaaaaaaaataaaaaaaaacgtataaaaaaaactatctaaaaaaacgaaaatcgaaaactatcgaaaaataataaaaaaaaacgaacgaaaataactatcttaaaaaacgaaaataaaaaacaataaaaaaaaaataaaaaaaaacgaacgaaaaaaattttctatcttaaaaacgaaacgaaaactaaaaacgaaactacgcgaccacctaatccgaaaaccccaaacgccgacctcccgcccgcccgcccgcaaataccgccactactacccaacgcccgccgaaacacccgaaccccgaccccgccccgaccccgccccgaaaactcatttacatacgtccgcgacccctcccgaaacgactaaaacgacgtatccttatcccccgtaaacaacctcgacgcgtataaccgcgaatccccaaataacccgaaaactaaaaactcgaataaaaccgcgaaaaaaaaacccaaaaacaaaacctaacgataaaattataaaaa

SEQ ID NO: 35301 - DNA, 834 bp, Artificial Sequence
  chemically treated genomic DNA (Homo sapiens) CpG-island No: 35301
tatcgtttatttttttaggatgatgggcggggttttttgggtcggtgtggattgacgagtggttggtcgttttgtttattacgatatttcgttttcgcgttacgttatatgacgtagtttattatggcggcgggagcgcggttttttaggttcgtcgtttcgtagggttgttggcgttgttgttgttgagaggcggcggcggcggcgtaggcgggcgggaaggatggtgtttttgcgattggagcggtaggtgcggatcgggagtcggatcgaggtttggtagaagtaacgtgtgttcgggagtaatcggcgcgggtgttattgaggtagcggagggaggtaggatcgattgacgggcgaacggacggacggacggaaggcgattcgagggtcggtttcggagtcgcgtcgtgggcgagatgtcggggtcgtcggcgttgcggcggaggttgttgttgttgttgttggtttttttgatcgtcggtagtgttggggtcgcgttattttcgtaaataggtgtaggtgagcgggttcgcggcggggacggggttgcggggttttcggcgtggaggggagggggcggtagggtcgggtcggtttcggcgtcgaggaatcggagggtttgtcgggggcgggaagtttagggaggcgagtgattagggagatttttgtcgtaggggcgtgggatttgggggggcgggagcgaggcgacgtcgttggggttggggagggcggcgggcgaggtagtagttatcgatttttttcgggataggttgcggtgtcggttttggatttgttgttttaagatttttagtttatatcgttttttggtag

SEQ ID NO: 35302 - DNA, 834 bp, Artificial Sequence
  chemically treated genomic DNA (Homo sapiens) CpG-island No: 35302
ctaccaaaaaacgatataaactaaaaatcttaaaacaacaaatccaaaaccgacaccgcaacctatcccgaaaaaaatcgataactactacctcgcccgccgccctccccaaccccaacgacgtcgcctcgctcccgcccccccaaatcccacgcccctacgacaaaaatctccctaatcactcgcctccctaaacttcccgcccccgacaaaccctccgattcctcgacgccgaaaccgacccgaccctaccgccccctcccctccacgccgaaaaccccgcaaccccgtccccgccgcgaacccgctcacctacacctatttacgaaaataacgcgaccccaacactaccgacgatcaaaaaaaccaacaacaacaacaacaacctccgccgcaacgccgacgaccccgacatctcgcccacgacgcgactccgaaaccgaccctcgaatcgccttccgtccgtccgtccgttcgcccgtcaatcgatcctacctccctccgctacctcaataacacccgcgccgattactcccgaacacacgttacttctaccaaacctcgatccgactcccgatccgcacctaccgctccaatcgcaaaaacaccatccttcccgcccgcctacgccgccgccgccgcctctcaacaacaacaacgccaacaaccctacgaaacgacgaacctaaaaaaccgcgctcccgccgccataataaactacgtcatataacgtaacgcgaaaacgaaatatcgtaataaacaaaacgaccaaccactcgtcaatccacaccgacccaaaaaaccccgcccatcatcctaaaaaaataaacgata

SEQ ID NO: 35303 - DNA, 834 bp, Artificial Sequence
  chemically treated genomic DNA (Homo sapiens) CpG-island No: 35303
ttgttaggaagcgatataagttgaggattttaaggtaataggtttagggtcggtatcgtagtttatttcgggaggggtcggtggttgttatttcgttcgtcgttttttttagttttaacgacgtcgtttcgttttcgtttttttaaattttacgtttttgcggtagaaatttttttaattattcgtttttttgggtttttcgttttcggtaggtttttcgatttttcggcgtcgaggtcggttcggttttgtcgtttttttttttttacgtcgaagatttcgtagtttcgttttcgtcgcgggttcgtttatttgtatttgtttgcggaagtggcgcggttttagtattgtcggcgattaggaggattagtagtagtagtagtagttttcgtcgtaacgtcggcggtttcggtatttcgtttacggcgcggtttcggggtcggttttcgagtcgtttttcgttcgttcgttcgttcgttcgttagtcgattttgttttttttcgttgttttagtggtattcgcgtcggttgttttcgagtatacgttgtttttgttaaatttcggttcggttttcggttcgtatttgtcgttttagtcgtagaaatattatttttttcgttcgtttgcgtcgtcgtcgtcgttttttaatagtagtaacgttagtagttttgcggagcggcgggtttgggaagtcgcgttttcgtcgttatgatgggttgcgttatgtgacgtagcgcgggggcgggatgtcgtgatggatagggcggttagttattcgttagtttatatcggtttaggaggtttcgtttattattttgaaggagtgagcggtg

SEQ ID NO: 35304 - DNA, 834 bp, Artificial Sequence
  chemically treated genomic DNA (Homo sapiens) CpG-island No: 35304
caccgctcactccttcaaaataataaacgaaacctcctaaaccgatataaactaacgaataactaaccgccctatccatcacgacatcccgcccccgcgctacgtcacataacgcaacccatcataacgacgaaaacgcgacttcccaaacccgccgctccgcaaaactactaacgttactactattaaaaaacgacgacgacgacgcaaacgaacgaaaaaaataatatttctacgactaaaacgacaaatacgaaccgaaaaccgaaccgaaatttaacaaaaacaacgtatactcgaaaacaaccgacgcgaataccactaaaacaacgaaaaaaaacaaaatcgactaacgaacgaacgaacgaacgaacgaaaaacgactcgaaaaccgaccccgaaaccgcgccgtaaacgaaataccgaaaccgccgacgttacgacgaaaactactactactactactaatcctcctaatcgccgacaatactaaaaccgcgccacttccgcaaacaaatacaaataaacgaacccgcgacgaaaacgaaactacgaaatcttcgacgtaaaaaaaaaaaaacgacaaaaccgaaccgacctcgacgccgaaaaatcgaaaaacctaccgaaaacgaaaaacccaaaaaaacgaataattaaaaaaatttctaccgcaaaaacgtaaaatttaaaaaaacgaaaacgaaacgacgtcgttaaaactaaaaaaaacgacgaacgaaataacaaccaccgacccctcccgaaataaactacgataccgaccctaaacctattaccttaaaatcctcaacttatatcgcttcctaacaa

SEQ ID NO: 35305 - DNA, 572 bp, Artificial Sequence
  chemically treated genomic DNA (Homo sapiens) CpG-island No: 35305
ttattgatttttttattttatttttttatttattttgtttttttttcgtttttttttttcgcgggtaagtgaggtttttttcgtatttttatttcgcggttttgttagttatttacggtaggagacgcgcggagggtcggtttttttttttttttttttttttttcgaattttttttttcgtcgggaataaatttaaacgcgttcgagcgtcgcgttttattatttattcgtttatggttacggatttttcgtttttcgcgcgtttttcgcgtttttattttcgtcgttttttttttatacgttatcgggcgcgtttacgcgcgaattcggttttttcgtttattttggtaacgggttacgttttcgttcggtttgttcgcgaataattttttcgatttttttgttttatattttgtttttttatacgcgtaatttcgttttttttttttttttttttttttttttttttttttttcgttcgttcgtcgggttttttttttttattttttttttttttggtttatttcgtttttttgtggtgaaattttttttatatatttaggtttttttt

SEQ ID NO: 35306 - DNA, 572 bp, Artificial Sequence
  chemically treated genomic DNA (Homo sapiens) CpG-island No: 35306
aaaaaaaacctaaatatataaaaaaaatttcaccacaaaaaaacgaaataaaccaaaaaaaaaaaaaataaaaaaaaaaaacccgacgaacgaacgaaaaaaaaaaaaaaaaaaaaaaaaaaaaaaaaaaaaaacgaaattacgcgtataaaaaaacaaaatataaaacaaaaaaatcgaaaaaattattcgcgaacaaaccgaacgaaaacgtaacccgttaccaaaataaacgaaaaaaccgaattcgcgcgtaaacgcgcccgataacgtataaaaaaaaaacgacgaaaataaaaacgcgaaaaacgcgcgaaaaacgaaaaatccgtaaccataaacgaataaataataaaacgcgacgctcgaacgcgtttaaatttattcccgacgaaaaaaaaaattcgaaaaaaaaaaaaaaaaaaaaaaaaaccgaccctccgcgcgtctcctaccgtaaataactaacaaaaccgcgaaataaaaatacgaaaaaaacctcacttacccgcgaaaaaaaaaaacgaaaaaaaaacaaaataaataaaaaaataaaataaaaaaatcaataa

SEQ ID NO: 35307 - DNA, 572 bp, Artificial Sequence
  chemically treated genomic DNA (Homo sapiens) CpG-island No: 35307
gagggaaatttaagtatgtggggggggttttattataagaaggcggggtagattaggaagggggggggtgggggggggagattcgacgaacgaacggggggggggggagggggggagggggggggggaggggggcgggattgcgcgtatggagaggtagggtatgagataagggggtcggggggattattcgcggatagatcgggcgggaacgtgattcgttattagggtggacggggaggtcgggttcgcgcgtgggcgcgttcggtggcgtgtggggggggggcggcgggggtgggggcgcggggggcgcgcggggggcgggggattcgtggttatgggcgaatgagtggtggggcgcggcgttcgggcgcgtttgggtttgttttcggcgggggggggggttcggggggggggggggggggggagggggtcggtttttcgcgcgttttttgtcgtgggtggttggtagagtcgcggggtggaaatgcggggaaggttttatttgttcgcgaggggggggagcgagaggggagtaaggtggatagaaagatggggtgggggggttaatgg

SEQ ID NO: 35308 - DNA, 572 bp, Artificial Sequence
  chemically treated genomic DNA (Homo sapiens) CpG-island No: 35308
ccattaacccccccaccccatctttctatccaccttactcccctctcgctcccccccctcgcgaacaaataaaaccttccccgcatttccaccccgcgactctaccaaccacccacgacaaaaaacgcgcgaaaaaccgaccccctccccccccccccccccccccgaacccccccccccgccgaaaacaaacccaaacgcgcccgaacgccgcgccccaccactcattcgcccataaccacgaatcccccgccccccgcgcgccccccgcgcccccacccccgccgccccccccccacacgccaccgaacgcgcccacgcgcgaacccgacctccccgtccaccctaataacgaatcacgttcccgcccgatctatccgcgaataatccccccgacccccttatctcataccctacctctccatacgcgcaatcccgcccccctccccccccccctccccccctccccccccccccgttcgttcgtcgaatctcccccccccacccccccccttcctaatctaccccgccttcttataataaaaccccccccacatacttaaatttccctc

SEQ ID NO: 35309 - DNA, 576 bp, Artificial Sequence
  chemically treated genomic DNA (Homo sapiens) CpG-island No: 35309
ggtcgcgcgcggttgttaagagacgtcggcgttgttttagaaatagacggcgtagcgcgtaggatacgttttttggtagcgatattttcgcgaaggttacgcgagtgcgcgtgtggtatgcgtaggcgtagtgaacgggcgtcgttataagggggcggggtataaggggcggggatttacgtcgaggttttatttttttttagggtaggtatgatcgagagttggggcgggagcgttgatttgtcgggtaaagttagttttatcgttcgatttagttgtacgcgtagggagtgtgtgtttattttgattcggttcggtttttcgttttcgtcgaagcgtagaggcgaatgagagttgagttttggggagtagcgtttcgatttacgtttttagtaagtcgagtgtttaaaatatatttagttattagttgtcgttgtggttttatcgcgaggacgcggagggaggcgttgtagagtacgggcgacgtgattatagttgtcggggttaattttggaatgtcgggtgttcggaggagtttttttagttggggttaagtagcgtttaagtaggtgaaaa

SEQ ID NO: 35310 - DNA, 576 bp, Artificial Sequence
  chemically treated genomic DNA (Homo sapiens) CpG-island No: 35310
ttttcacctacttaaacgctacttaaccccaactaaaaaaactcctccgaacacccgacattccaaaattaaccccgacaactataatcacgtcgcccgtactctacaacgcctccctccgcgtcctcgcgataaaaccacaacgacaactaataactaaatatattttaaacactcgacttactaaaaacgtaaatcgaaacgctactccccaaaactcaactctcattcgcctctacgcttcgacgaaaacgaaaaaccgaaccgaatcaaaataaacacacactccctacgcgtacaactaaatcgaacgataaaactaactttacccgacaaatcaacgctcccgccccaactctcgatcatacctaccctaaaaaaaaataaaacctcgacgtaaatccccgccccttataccccgcccccttataacgacgcccgttcactacgcctacgcataccacacgcgcactcgcgtaaccttcgcgaaaatatcgctaccaaaaaacgtatcctacgcgctacgccgtctatttctaaaacaacgccgacgtctcttaacaaccgcgcgcgacc

SEQ ID NO: 35311 - DNA, 576 bp, Artificial Sequence
  chemically treated genomic DNA (Homo sapiens) CpG-island No: 35311
tttttatttgtttggacgttgtttggttttagttggggaggttttttcgagtattcggtattttagagttagtttcgatagttgtggttacgtcgttcgtgttttgtagcgttttttttcgcgttttcgcggtggggttatagcgatagttagtggttgaatgtattttaaatattcggtttgttgagggcgtgagtcggagcgttgttttttaggatttagtttttattcgtttttgcgtttcggcggggacggggagtcgggtcgagttagagtgaatatatattttttgcgcgtgtaattgagtcgagcggtagggttggttttattcgataggttaacgttttcgttttagttttcggttatatttgttttaaggaggggtggagtttcggcgtggattttcgttttttgtgtttcgtttttttataacggcgttcgtttattgcgtttgcgtatgttatacgcgtattcgcgtggttttcgcgaaggtgtcgttgttaagaaacgtgttttgcgcgttacgtcgtttgtttttagggtaacgtcggcgttttttagtaatcgcgcgcggtt

SEQ ID NO: 35312 - DNA, 576 bp, Artificial Sequence
  chemically treated genomic DNA (Homo sapiens) CpG-island No: 35312
aaccgcgcgcgattactaaaaaacgccgacgttaccctaaaaacaaacgacgtaacgcgcaaaacacgtttcttaacaacgacaccttcgcgaaaaccacgcgaatacgcgtataacatacgcaaacgcaataaacgaacgccgttataaaaaaacgaaacacaaaaaacgaaaatccacgccgaaactccacccctccttaaaacaaatataaccgaaaactaaaacgaaaacgttaacctatcgaataaaaccaaccctaccgctcgactcaattacacgcgcaaaaaatatatattcactctaactcgacccgactccccgtccccgccgaaacgcaaaaacgaataaaaactaaatcctaaaaaacaacgctccgactcacgccctcaacaaaccgaatatttaaaatacattcaaccactaactatcgctataaccccaccgcgaaaacgcgaaaaaaaacgctacaaaacacgaacgacgtaaccacaactatcgaaactaactctaaaataccgaatactcgaaaaaacctccccaactaaaaccaaacaacgtccaaacaaataaaaa

SEQ ID NO: 35313 - DNA, 1392 bp, Artificial Sequence
  chemically treated genomic DNA (Homo sapiens) CpG-island No: 35313
  unsure (956)
tcgggtagcgcgagttgcgttggggggaggggagaagagggtaaggggaggggataagagagttagcgttttcgttcggtgatgtaggtagttcggggaggtggagtcgcgacgtttgaaggagtttttatcgtagtcgcgttttcggtttgttttattaagtagtcgttagttatacggtgtatcgtaagattgcggcggtagggagtcgcggaaatgttcgatcgttttgggtttcggtggagcgttcgagttcgaggtttagcgtttcgagtcgtcggtttcgttttgcgtttgtttagacggtatggagatagttcgtcgggaaaagcggtttttagttattcggtcgtcgttcgtatttcggttgttggttcggttgcgatcgggaatttgcgattagtttttgttcggtattgggtatttttaggtatcgattgttttcggttttgttagtttttcgcgattttagggcggtggatttttgcgcgttttttttttttcggtttttcgatagatcgtcggttgagttttttgcgtttttagtttttttcgtcgtcgtcgcgatgttgttttggagacgtaataaattcgtgttggtggaggacgaggttaagtgtaaggcgaagagtttgacgttcggggttcgttatacgtcgttgttttttagttttttgcgtttttgttcggatttgttgttcgattggtcgttggaggttttgggtcgatgtgtttcgtagtcggcgttagaaagtggagtttaataaggaggattcgatttatatcgtgtggtatttgggtaacgcgttattttgtacgttaaggaatcggttcgtatcgacgacgtcgtgggtaagatttgggttcgttgcgggtttggcgggggtattaagatgaagttgaagttggggtcgtacgcgattttcgtattgtacgtcgttgtacgcgatagtttngtacgcggagcgttttcgcgggcggtcgcgagcgttatcgtttattttcgttgtcgcgtattatttattgtacggcggacgggcgttattcgcgcgtttttcgtttgcggtttatcgttattaggcgtttataaggtcgtggtgttgcgttgttatttgtgttgttgcgcgtataaggtttttcggtttcgtttgtttcgttagatcgcgttggttttttagcgattttaagcgttttacgtagattacgtcgttacgttttagagtattttcggtttggggcggtttttcgttgtcgtttttattgttcgttttttaatgttatttcgtttattttttcgtatttatttattttttttttttttttttttcgttttttttatttattaattttttttatttttattataatattattatattatttttttatttt

SEQ ID NO: 35314 - DNA, 1392 bp, Artificial Sequence
  chemically treated genomic DNA (Homo sapiens) CpG-island No: 35314
  unsure (437)
aaaataaaaaaataatataataatattataataaaaataaaaaaaattaataaataaaaaaaacgaaaaaaaaaaaaaaaaaaaataaataaatacgaaaaaataaacgaaataacattaaaaaacgaacaataaaaacgacaacgaaaaaccgccccaaaccgaaaatactctaaaacgtaacgacgtaatctacgtaaaacgcttaaaatcgctaaaaaaccaacgcgatctaacgaaacaaacgaaaccgaaaaaccttatacgcgcaacaacacaaataacaacgcaacaccacgaccttataaacgcctaataacgataaaccgcaaacgaaaaacgcgcgaataacgcccgtccgccgtacaataaataatacgcgacaacgaaaataaacgataacgctcgcgaccgcccgcgaaaacgctccgcgtacnaaactatcgcgtacaacgacgtacaatacgaaaatcgcgtacgaccccaacttcaacttcatcttaatacccccgccaaacccgcaacgaacccaaatcttacccacgacgtcgtcgatacgaaccgattccttaacgtacaaaataacgcgttacccaaataccacacgatataaatcgaatcctccttattaaactccactttctaacgccgactacgaaacacatcgacccaaaacctccaacgaccaatcgaacaacaaatccgaacaaaaacgcaaaaaactaaaaaacaacgacgtataacgaaccccgaacgtcaaactcttcgccttacacttaacctcgtcctccaccaacacgaatttattacgtctccaaaacaacatcgcgacgacgacgaaaaaaactaaaaacgcaaaaaactcaaccgacgatctatcgaaaaaccgaaaaaaaaaaaacgcgcaaaaatccaccgccctaaaatcgcgaaaaactaacaaaaccgaaaacaatcgatacctaaaaatacccaataccgaacaaaaactaatcgcaaattcccgatcgcaaccgaaccaacaaccgaaatacgaacgacgaccgaataactaaaaaccgcttttcccgacgaactatctccataccgtctaaacaaacgcaaaacgaaaccgacgactcgaaacgctaaacctcgaactcgaacgctccaccgaaacccaaaacgatcgaacatttccgcgactccctaccgccgcaatcttacgatacaccgtataactaacgactacttaataaaacaaaccgaaaacgcgactacgataaaaactccttcaaacgtcgcgactccacctccccgaactacctacatcaccgaacgaaaacgctaactctcttatcccctccccttaccctcttctcccctccccccaacgcaactcgcgctacccga

SEQ ID NO: 35315 - DNA, 1392 bp, Artificial Sequence
  chemically treated genomic DNA (Homo sapiens) CpG-island No: 35315
  unsure (437)
ggggtgggggagtgatgtggtggtgttgtggtgggggtggagggggttggtgagtggggggagcggggggaggggggggggggggtggatgggtgcgggggggtaggcggagtggtattaggaggcgggtagtgggggcggtaacgaggggtcgttttagatcgaagatgttttgagacgtggcggcgtgatttgcgtgaggcgtttgaagtcgttgaagagttagcgcggtttggcggagtaggcggggtcgaggggttttgtgcgcgtagtagtataggtggtagcgtagtattacggttttgtgggcgtttggtggcggtagatcgtaggcgaaagacgcgcgggtggcgttcgttcgtcgtgtagtaggtgatgcgcggtagcgagggtaggcggtgacgttcgcggtcgttcgcgagagcgtttcgcgtgtngaattgtcgcgtgtagcggcgtgtagtgcgggaatcgcgtgcggttttagttttagttttattttagtgttttcgttaggttcgtagcgagtttagattttgtttacggcgtcgtcggtgcgagtcgattttttggcgtgtagggtgacgcgttgtttaggtattatacggtgtaggtcgggttttttttgttgagttttattttttggcgtcggttgcggaatatatcggtttagagtttttagcggttagtcgggtagtaggttcgggtaggagcgtaggaagttggagagtagcgacgtgtagcgagtttcggacgttaggtttttcgttttgtatttggtttcgttttttattagtacgaatttgttacgtttttagggtagtatcgcggcggcggcgaaaggggttgggggcgtagggagtttagtcggcggtttgtcgggagatcgggggagggaaggcgcgtagaagtttatcgttttggagtcgcgagaagttggtagggtcggggatagtcggtgtttggagatgtttagtgtcgggtaggggttagtcgtagattttcggtcgtagtcgggttagtagtcgaggtgcggacggcggtcgagtggttgaggatcgtttttttcggcgagttgtttttatgtcgtttgggtaagcgtaggacggggtcggcggttcggggcgttgagtttcgggttcggacgttttatcgaagtttaagacggtcgggtattttcgcggttttttgtcgtcgtaattttgcggtatatcgtgtagttggcggttgtttagtggggtagatcgagagcgcggttgcggtggggatttttttaggcgtcgcggttttattttttcgggttgtttatattatcgggcgggagcgttagtttttttgttttttttttttgttttttttttttttttttttagcgtagttcgcgttgttcgg

SEQ ID NO: 35316 - DNA, 1392 bp, Artificial Sequence
  chemically treated genomic DNA (Homo sapiens) CpG-island No: 35316
  unsure (956)
ccgaacaacgcgaactacgctaaaaaaaaaaaaaaaaaaaacaaaaaaaaaaaacaaaaaaactaacgctcccgcccgataatataaacaacccgaaaaaataaaaccgcgacgcctaaaaaaatccccaccgcaaccgcgctctcgatctaccccactaaacaaccgccaactacacgatataccgcaaaattacgacgacaaaaaaccgcgaaaatacccgaccgtcttaaacttcgataaaacgtccgaacccgaaactcaacgccccgaaccgccgaccccgtcctacgcttacccaaacgacataaaaacaactcgccgaaaaaaacgatcctcaaccactcgaccgccgtccgcacctcgactactaacccgactacgaccgaaaatctacgactaacccctacccgacactaaacatctccaaacaccgactatccccgaccctaccaacttctcgcgactccaaaacgataaacttctacgcgccttccctcccccgatctcccgacaaaccgccgactaaactccctacgcccccaacccctttcgccgccgccgcgatactaccctaaaaacgtaacaaattcgtactaataaaaaacgaaaccaaatacaaaacgaaaaacctaacgtccgaaactcgctacacgtcgctactctccaacttcctacgctcctacccgaacctactacccgactaaccgctaaaaactctaaaccgatatattccgcaaccgacgccaaaaaataaaactcaacaaaaaaaacccgacctacaccgtataatacctaaacaacgcgtcaccctacacgccaaaaaatcgactcgcaccgacgacgccgtaaacaaaatctaaactcgctacgaacctaacgaaaacactaaaataaaactaaaactaaaaccgcacgcgattcccgcactacacgccgctacacgcgacaattcnacacgcgaaacgctctcgcgaacgaccgcgaacgtcaccgcctaccctcgctaccgcgcatcacctactacacgacgaacgaacgccacccgcgcgtctttcgcctacgatctaccgccaccaaacgcccacaaaaccgtaatactacgctaccacctatactactacgcgcacaaaacccctcgaccccgcctactccgccaaaccgcgctaactcttcaacgacttcaaacgcctcacgcaaatcacgccgccacgtctcaaaacatcttcgatctaaaacgacccctcgttaccgcccccactacccgcctcctaataccactccgcctacccccccgcacccatccacccccccccccccctccccccgctccccccactcaccaaccccctccacccccaccacaacaccaccacatcactcccccacccc

SEQ ID NO: 35317 - DNA, 870 bp, Artificial Sequence
  chemically treated genomic DNA (Homo sapiens) CpG-island No: 35317
gagcgtcggatagcggtcgtggtttttagaggtcggacgttcggttttttcgtagttagagtattttttagttttttagcgagttagagagggagttcgagtggcgggataggttcggttcgttcgaatcgtttttgttggatgttttttttagtcgcgtttatcggaatagtattaaggacgtatagtttcgtgttttgggggttattttttttcgacgtcgagatttggagttgggggcgttcgtggcgtcgaggttttggcggttacggtttttttcggtttacgtggggttgcggagtttcgaggcgtcggttttcgttttttcgtatacgtttcgggagcggtatagcgtgatttttgttgagggcgatttggttaggttcgtgttttttgtcgttcggagaggtgttcgtcggcgtttgattttcgagtagaagaagcgtttttattcggagttcgagaagatgaacgaggtggggatcgtggaggaggtcgaatcggtatttttgggttcgtagagaaatgggatgcgtttttcggagagtagcgtggtcgatcggcgtcgttttttcgagcgcgatggtaaggtttgttttacgtttagtttgtcggggttcgagttgaagtagttttagtagagcgttttggcggattatatttagcgtaagatcggtaagcggtttattttcgtcgtcggttgtagtttttaggagttcgggttattgcgtgagcgcgtttagagtgtttatttttagttcggtttcgcggcgttcgaaggtttcggtttcgtttcggtttttagtttgagtttattgcgggagtttagtttgtagtttcgtagggaggttacgtttttgtcggttatag

SEQ ID NO: 35318 - DNA, 870 bp, Artificial Sequence
  chemically treated genomic DNA (Homo sapiens) CpG-island No: 35318
ctataaccgacaaaaacgtaacctccctacgaaactacaaactaaactcccgcaataaactcaaactaaaaaccgaaacgaaaccgaaaccttcgaacgccgcgaaaccgaactaaaaataaacactctaaacgcgctcacgcaataacccgaactcctaaaaactacaaccgacgacgaaaataaaccgcttaccgatcttacgctaaatataatccgccaaaacgctctactaaaactacttcaactcgaaccccgacaaactaaacgtaaaacaaaccttaccatcgcgctcgaaaaaacgacgccgatcgaccacgctactctccgaaaaacgcatcccatttctctacgaacccaaaaataccgattcgacctcctccacgatccccacctcgttcatcttctcgaactccgaataaaaacgcttcttctactcgaaaatcaaacgccgacgaacacctctccgaacgacaaaaaacacgaacctaaccaaatcgccctcaacaaaaatcacgctataccgctcccgaaacgtatacgaaaaaacgaaaaccgacgcctcgaaactccgcaaccccacgtaaaccgaaaaaaaccgtaaccgccaaaacctcgacgccacgaacgcccccaactccaaatctcgacgtcgaaaaaaaataacccccaaaacacgaaactatacgtccttaatactattccgataaacgcgactaaaaaaaacatccaacaaaaacgattcgaacgaaccgaacctatcccgccactcgaactccctctctaactcgctaaaaaactaaaaaatactctaactacgaaaaaaccgaacgtccgacctctaaaaaccacgaccgctatccgacgctc

SEQ ID NO: 35319 - DNA, 870 bp, Artificial Sequence
  chemically treated genomic DNA (Homo sapiens) CpG-island No: 35319
ttgtggtcggtaggagcgtggtttttttgcggggttgtaggttgggttttcgtagtgagtttaagttggaggtcgaggcgaggtcggagttttcgagcgtcgcggggtcgggttggaggtaggtattttgggcgcgtttacgtagtggttcgggtttttggaggttgtagtcggcggcggaggtaggtcgtttgtcggttttgcgttggatgtagttcgttagggcgttttgttggaattgttttagttcgggtttcgataggttgagcgtggagtaggttttgttatcgcgttcgaagagacggcgtcggtcggttacgttgtttttcgggaaacgtattttatttttttgcgggtttaggggtgtcggttcggttttttttacgatttttatttcgtttattttttcgggtttcgagtaggagcgttttttttgttcgggagttaggcgtcggcgagtattttttcgggcggtagggggtacgggtttggttaggtcgtttttagtaggggttacgttgtgtcgttttcggggcgtgtgcggggaggcggaggtcgacgtttcggggtttcgtagttttacgtgggtcgaggaaggtcgtggtcgttaggatttcgacgttacgggcgtttttagttttaggtttcgacgtcgaaaggaggtggtttttaagatacgggattgtgcgtttttgatgttgtttcggtaggcgcggttgaagggggtatttagtaggggcgattcgggcgagtcgggtttgtttcgttattcgggttttttttttggttcgttggagagttggaaggtgttttggttacggaggagtcgagcgttcggtttttgggggttacggtcgttgttcgacgttt

SEQ ID NO: 35320 - DNA, 870 bp, Artificial Sequence
  chemically treated genomic DNA (Homo sapiens) CpG-island No: 35320
aaacgtcgaacaacgaccgtaacccccaaaaaccgaacgctcgactcctccgtaaccaaaacaccttccaactctccaacgaaccaaaaaaaaaacccgaataacgaaacaaacccgactcgcccgaatcgcccctactaaatacccccttcaaccgcgcctaccgaaacaacatcaaaaacgcacaatcccgtatcttaaaaaccacctcctttcgacgtcgaaacctaaaactaaaaacgcccgtaacgtcgaaatcctaacgaccacgaccttcctcgacccacgtaaaactacgaaaccccgaaacgtcgacctccgcctccccgcacacgccccgaaaacgacacaacgtaacccctactaaaaacgacctaaccaaacccgtaccccctaccgcccgaaaaaatactcgccgacgcctaactcccgaacaaaaaaaacgctcctactcgaaacccgaaaaaataaacgaaataaaaatcgtaaaaaaaaccgaaccgacacccctaaacccgcaaaaaaataaaatacgtttcccgaaaaacaacgtaaccgaccgacgccgtctcttcgaacgcgataacaaaacctactccacgctcaacctatcgaaacccgaactaaaacaattccaacaaaacgccctaacgaactacatccaacgcaaaaccgacaaacgacctacctccgccgccgactacaacctccaaaaacccgaaccactacgtaaacgcgcccaaaatacctacctccaacccgaccccgcgacgctcgaaaactccgacctcgcctcgacctccaacttaaactcactacgaaaacccaacctacaaccccgcaaaaaaaccacgctcctaccgaccacaa

SEQ ID NO: 35321 - DNA, 741 bp, Artificial Sequence
  chemically treated genomic DNA (Homo sapiens) CpG-island No: 35321
ttgcgtttttttggttttgtatcgttacgtattgggttttgtatcgttacgtatcgggttcggtattataacgtattcggttttgtatcgttacgtatcgggttttgtatcgtaacgtattcggttttgtatcgtaacgtatcgggttttgtatcgttacgtattcggttttgtatcgttacgtatcgggttttgtatcgttacgtatcgggttcggtattataacgtattcggttttgtatcgttacgtatcgggttttgtatcgtaacgtattcggttttgtatcgtaacgtatcgggttttgtatcgttacgtattcggttttgtatcgttacgtattaggttttgtatcgttacgcgttcggttttgtattataacgtattcggttttgtatcgttacgcgttcggttttgtattataacgtattcggttttgtatcgtaaagtattcggcgcggtatcgttacgcgttcggttttgtattataacgtattcggttttgtatcgttacgcgttcggttttgtattataacgtattcggttttgtatcgttacgcgttcggttttgtatcgtaacgcggtttttcgtttatttcgttgttttcggtgcggggagggggcggtcggcgttttttaatttattttcgtcgtttttatggttaggttgaaatgttatagtttggttatttagtaggatacggattgcgtcgtgaggtttaaggagttattggatttggaag

SEQ ID NO: 35322 - DNA, 741 bp, Artificial Sequence
  chemically treated genomic DNA (Homo sapiens) CpG-island No: 35322
cttccaaatccaataactccttaaacctcacgacgcaatccgtatcctactaaataaccaaactataacatttcaacctaaccataaaaacgacgaaaataaattaaaaaacgccgaccgccccctccccgcaccgaaaacaacgaaataaacgaaaaaccgcgttacgatacaaaaccgaacgcgtaacgatacaaaaccgaatacgttataatacaaaaccgaacgcgtaacgatacaaaaccgaatacgttataatacaaaaccgaacgcgtaacgataccgcgccgaatactttacgatacaaaaccgaatacgttataatacaaaaccgaacgcgtaacgatacaaaaccgaatacgttataatacaaaaccgaacgcgtaacgatacaaaacctaatacgtaacgatacaaaaccgaatacgtaacgatacaaaacccgatacgttacgatacaaaaccgaatacgttacgatacaaaacccgatacgtaacgatacaaaaccgaatacgttataataccgaacccgatacgtaacgatacaaaacccgatacgtaacgatacaaaaccgaatacgtaacgatacaaaacccgatacgttacgatacaaaaccgaatacgttacgatacaaaacccgatacgtaacgatacaaaaccgaatacgttataataccgaacccgatacgtaacgatacaaaacccaatacgtaacgatacaaaaccaaaaaaacgcaa

SEQ ID NO: 35323 - DNA, 741 bp, Artificial Sequence
  chemically treated genomic DNA (Homo sapiens) CpG-island No: 35323
tttttaggtttaatggttttttgagttttacgacgtaattcgtgttttgttggataattagattgtgatattttagtttgattatgaagacggcggaggtaggttggggagcgtcggtcgtttttttttcgtatcgggagtagcgaggtgggcgagaagtcgcgttgcggtgtagggtcgggcgcgtggcggtgtagggtcgggtgcgttgtggtgtagggtcgggcgcgtggcggtgtagggtcgggtgcgttgtggtgtagggtcgggcgcgtggcggtgtcgcgtcgagtgttttgcggtgtagggtcgggtgcgttgtggtgtagggtcgggcgcgtggcggtgtagggtcgggtgcgttgtggtgtagggtcgggcgcgtggcggtgtagggtttggtgcgtggcggtgtagggtcgggtgcgtggcggtgtagggttcggtgcgttgcggtgtagggtcgggtgcgttgcggtgtagggttcggtgcgtggcggtgtagggtcgagtgcgttgtggtgtcgggttcggtgcgtggcggtgtagggttcggtgcgtggcggtgtagggtcgggtgcgtggcggtgtagggttcggtgcgttgcggtgtagggtcgggtgcgttgcggtgtagggttcggtgcgtggcggtgtagggtcgagtgcgttgtggtgtcgggttcggtgcgtggcggtgtagggtttagtgcgtggcggtgtagggttaagagagcgtag

SEQ ID NO: 35324 - DNA, 741 bp, Artificial Sequence
  chemically treated genomic DNA (Homo sapiens) CpG-island No: 35324
ctacgctctcttaaccctacaccgccacgcactaaaccctacaccgccacgcaccgaacccgacaccacaacgcactcgaccctacaccgccacgcaccgaaccctacaccgcaacgcacccgaccctacaccgcaacgcaccgaaccctacaccgccacgcacccgaccctacaccgccacgcaccgaaccctacaccgccacgcaccgaacccgacaccacaacgcactcgaccctacaccgccacgcaccgaaccctacaccgcaacgcacccgaccctacaccgcaacgcaccgaaccctacaccgccacgcacccgaccctacaccgccacgcaccaaaccctacaccgccacgcgcccgaccctacaccacaacgcacccgaccctacaccgccacgcgcccgaccctacaccacaacgcacccgaccctacaccgcaaaacactcgacgcgacaccgccacgcgcccgaccctacaccacaacgcacccgaccctacaccgccacgcgcccgaccctacaccacaacgcacccgaccctacaccgccacgcgcccgaccctacaccgcaacgcgacttctcgcccacctcgctactcccgatacgaaaaaaaaacgaccgacgctccccaacctacctccgccgtcttcataatcaaactaaaatatcacaatctaattatccaacaaaacacgaattacgtcgtaaaactcaaaaaaccattaaacctaaaaa

SEQ ID NO: 35325 - DNA, 869 bp, Artificial Sequence
  chemically treated genomic DNA (Homo sapiens) CpG-island No: 35325
  unsure (775, 796)
cgcgttttttttattgagattttagtttttggacgattgttttttttcgggttcggtttatttcgtaataagtggaggggtttcgtttgattttaggggtcggcgtttttttttttttttttttgcgtttgcgaattttttcgggcgttttcggagtcgcgatttttgttggggatttcgggggcgggaggtcgaggggcgcggcgagggtcgtgacgcgaggcggggtcggttaatgggagcgtttcgcggcgtaggttgagtcgtcgggttataaaaaggaggcgcggtcgggttttttagtttgtggtcgttttcggttcggagtgtgatttaagtaggttgcgtattttttttaggtgatttcggttatagtttattgttcgcggttatcggcggagtttagtcgtagatttcgaagcgtttcggggtttttttcgaacggtagcggttgcggcgggtttatggagaagggttttgtgcgggtattcgcggagaagcgcggggcgttaggtgtagtaatgggttttcgagcgggattcgtcgcggttcggtttagtagtcggcggagaagtttcgcggtcgaggtaagagcgcgtatcgcggacggttggaaggcgatcgttcgtacgaggagatacgagtgaatttttaattggtagcgttattcgttatttgagtcgtgggtagaattttacgtaaggttgttagcgtttgaggggttcgtatgtattttataaggtatagatattttagtcgtagcgggttgtaagtnggcgcgggcgtgtgcgtaagngagttagtattcgtttgtttttgggagtacgggtttatcgacgtttcgcgttgcggttgtggtttcggtttgg

SEQ ID NO: 35326 - DNA, 869 bp, Artificial Sequence
  chemically treated genomic DNA (Homo sapiens) CpG-island No: 35326
  unsure (74, 95)
ccaaaccgaaaccacaaccgcaacgcgaaacgtcgataaacccgtactcccaaaaacaaacgaatactaactcncttacgcacacgcccgcgccnacttacaacccgctacgactaaaatatctataccttataaaatacatacgaacccctcaaacgctaacaaccttacgtaaaattctacccacgactcaaataacgaataacgctaccaattaaaaattcactcgtatctcctcgtacgaacgatcgccttccaaccgtccgcgatacgcgctcttacctcgaccgcgaaacttctccgccgactactaaaccgaaccgcgacgaatcccgctcgaaaacccattactacacctaacgccccgcgcttctccgcgaatacccgcacaaaacccttctccataaacccgccgcaaccgctaccgttcgaaaaaaaccccgaaacgcttcgaaatctacgactaaactccgccgataaccgcgaacaataaactataaccgaaatcacctaaaaaaaatacgcaacctacttaaatcacactccgaaccgaaaacgaccacaaactaaaaaacccgaccgcgcctcctttttataacccgacgactcaacctacgccgcgaaacgctcccattaaccgaccccgcctcgcgtcacgaccctcgccgcgcccctcgacctcccgcccccgaaatccccaacaaaaatcgcgactccgaaaacgcccgaaaaaattcgcaaacgcaaaaaaaaaaaaaaaaaaacgccgacccctaaaatcaaacgaaacccctccacttattacgaaataaaccgaacccgaaaaaaaacaatcgtccaaaaactaaaatctcaataaaaaaaacgcg

SEQ ID NO: 35327 - DNA, 869 bp, Artificial Sequence
  chemically treated genomic DNA (Homo sapiens) CpG-island No: 35327
  unsure (74, 95)
ttaaatcgaggttatagtcgtagcgcggagcgtcgatgaattcgtgtttttaaagataagcgaatgttgatttntttgcgtatacgttcgcgttnatttataattcgttacgattgaagtgtttgtattttgtgaaatgtatgcgagttttttaggcgttgatagttttgcgtggggttttgtttacgatttagatgacgagtagcgttgttagttaggagtttattcgtattttttcgtgcgggcggtcgttttttagtcgttcgcggtgcgcgtttttgtttcggtcgcggggttttttcgtcggttgttgggtcgggtcgcggcggatttcgttcgggaatttattgttgtatttggcgtttcgcgttttttcgcgggtgttcgtatagggtttttttttatggattcgtcgtagtcgttgtcgttcgggaaggatttcggggcgtttcgaggtttgcggttaaatttcgtcggtggtcgcggataatgggttgtggtcggagttatttgaggaaggtacgtaatttgtttagattatatttcgagtcgggagcggttataggttggaaagttcggtcgcgttttttttttatggttcggcggtttagtttgcgtcgcggagcgtttttattggtcggtttcgtttcgcgttacggttttcgtcgcgtttttcggtttttcgttttcggggtttttagtaggggtcgcggtttcggagacgttcggaggggttcgtaagcgtagggagggaaggaaaagggcgtcggtttttaggattaggcgggatttttttatttattgcggaatgagtcgaattcgaaaagaggtagtcgtttaggagttgggattttagtgagaaagacgcg

SEQ ID NO: 35328 - DNA, 869 bp, Artificial Sequence
  chemically treated genomic DNA (Homo sapiens) CpG-island No: 35328
  unsure (775, 796)
cgcgtctttctcactaaaatcccaactcctaaacgactacctcttttcgaattcgactcattccgcaataaataaaaaaatcccgcctaatcctaaaaaccgacgcccttttccttccctccctacgcttacgaacccctccgaacgtctccgaaaccgcgacccctactaaaaaccccgaaaacgaaaaaccgaaaaacgcgacgaaaaccgtaacgcgaaacgaaaccgaccaataaaaacgctccgcgacgcaaactaaaccgccgaaccataaaaaaaaaacgcgaccgaactttccaacctataaccgctcccgactcgaaatataatctaaacaaattacgtaccttcctcaaataactccgaccacaacccattatccgcgaccaccgacgaaatttaaccgcaaacctcgaaacgccccgaaatccttcccgaacgacaacgactacgacgaatccataaaaaaaaaccctatacgaacacccgcgaaaaaacgcgaaacgccaaatacaacaataaattcccgaacgaaatccgccgcgacccgacccaacaaccgacgaaaaaaccccgcgaccgaaacaaaaacgcgcaccgcgaacgactaaaaaacgaccgcccgcacgaaaaaatacgaataaactcctaactaacaacgctactcgtcatctaaatcgtaaacaaaaccccacgcaaaactatcaacgcctaaaaaactcgcatacatttcacaaaatacaaacacttcaatcgtaacgaattataaatnaacgcgaacgtatacgcaaanaaatcaacattcgcttatctttaaaaacacgaattcatcgacgctccgcgctacgactataacctcgatttaa

SEQ ID NO: 35329 - DNA, 542 bp, Artificial Sequence
  chemically treated genomic DNA (Homo sapiens) CpG-island No: 35329
  unsure (477)
gttgattcggttttatgtacgacgtagtgttgcgttggtgttttttttgttttttaggggcgaggggatcggcggggtagttatattacgttatttcggttgttcgagcgagtgtcgtttgtcgttacgttcgtacgcgtacggtgttagattattcgttttttttttttttttttttttttcggttcgtggcgtttcgtttttcgcgcgatttatgttcgtttttattttttttcgtttcgtttttcggtgtttttattatcgtttcgttcgttgcgcgttgttttatgtgttaatttcgttttatttttttcgtttttcgcgtacgtagttatattagttcgcgttagtttagtattatcgttcgttttcggatttcgtttagtcgttttttttatatttattacgttcgttttttttttcgtaatgtttatttttattcgtttttttttttatatttttatgtcgttttttatnagaattattcgtcgcgtaatcgtttttattatagtatttcgtttttttttgtacgttagtttatt

SEQ ID NO: 35330 - DNA, 542 bp, Artificial Sequence
  chemically treated genomic DNA (Homo sapiens) CpG-island No: 35330
  unsure (66)
aataaactaacgtacaaaaaaaaacgaaatactataataaaaacgattacgcgacgaataattctnataaaaaacgacataaaaatataaaaaaaaaaacgaataaaaataaacattacgaaaaaaaaaacgaacgtaataaatataaaaaaaacgactaaacgaaatccgaaaacgaacgataatactaaactaacgcgaactaatataactacgtacgcgaaaaacgaaaaaaataaaacgaaattaacacataaaacaacgcgcaacgaacgaaacgataataaaaacaccgaaaaacgaaacgaaaaaaaataaaaacgaacataaatcgcgcgaaaaacgaaacgccacgaaccgaaaaaaaaaaaaaaaaaaaaaaaacgaataatctaacaccgtacgcgtacgaacgtaacgacaaacgacactcgctcgaacaaccgaaataacgtaatataactaccccgccgatcccctcgcccctaaaaaacaaaaaaaacaccaacgcaacactacgtcgtacataaaaccgaatcaac

SEQ ID NO: 35331 - DNA, 542 bp, Artificial Sequence
  chemically treated genomic DNA (Homo sapiens) CpG-island No: 35331
  unsure (66)
aataaattgacgtgtaagaagaggcggggtattgtagtagaggcggttacgcggcgggtaattttngtggggggcgatatggggatatggaggggggggcgagtaaaagtgaatattgcgggggggggggcgggcgtggtaaatgtaaggggggcgattgggcggaattcgagagcgggcgatgatgttagattaacgcggattggtgtggttacgtgcgcgggaaacggggggggtaaagcggaattaatatatggggtagcgcgtagcgggcggaacggtggtgggggtatcgggagacgaggcgaaagagggtaggggcgggtataaatcgcgcgggggacggaacgttacgggtcgggaggaaggaaggaaggggggggacgggtgatttaatatcgtgcgcgtgcgaacgtgacggtagacggtattcgttcgggtaatcggagtggcgtggtatgattatttcgtcgattttttcgtttttagaagatagggagggtattagcgtaatattgcgtcgtgtatagggtcgggttagt

SEQ ID NO: 35332 - DNA, 542 bp, Artificial Sequence
  chemically treated genomic DNA (Homo sapiens) CpG-island No: 35332
  unsure (477)
actaacccgaccctatacacgacgcaatattacgctaataccctccctatcttctaaaaacgaaaaaatcgacgaaataatcataccacgccactccgattacccgaacgaataccgtctaccgtcacgttcgcacgcgcacgatattaaatcacccgtccccccccttccttccttcctcccgacccgtaacgttccgtcccccgcgcgatttatacccgcccctaccctctttcgcctcgtctcccgatacccccaccaccgttccgcccgctacgcgctaccccatatattaattccgctttaccccccccgtttcccgcgcacgtaaccacaccaatccgcgttaatctaacatcatcgcccgctctcgaattccgcccaatcgccccccttacatttaccacgcccgcccccccccccgcaatattcacttttactcgcccccccctccatatccccatatcgccccccacnaaaattacccgccgcgtaaccgcctctactacaataccccgcctcttcttacacgtcaatttatt

SEQ ID NO: 35333 - DNA, 526 bp, Artificial Sequence
  chemically treated genomic DNA (Homo sapiens) CpG-island No: 35333
ttatgttagtattagcgttcgatgtaataacggtatgttatttgtttgtttcgcgtagttgtcgagtatatgttgttagtatttcggttgttgcgttacgtcgatcgtttggttggtttgttagtcggcgtattatgtttatgtcgtaaggaaggcgttattattgttatttttattttattaggtaaagcgcgtttcgggtttcgttagttgtattagtcgtagacggttattttgaattatttgacgaatgtcgttagcggcggtattttgatgatcggtaagcgaacgttaggcgagattgagcgggattagacggttatcggtgttgattacgttattttacggtttatcgattaacgtattaagattgttgcggaaaattttttgcggcgttttattattttgtagtcggatattgttcgtttgttcgggtaatattagcgcgttatcgttattatcgagtatgatatttttttgttgtttaacgggttagttgttatttataaaagatagttttgtgtta

SEQ ID NO: 35334 - DNA, 526 bp, Artificial Sequence
  chemically treated genomic DNA (Homo sapiens) CpG-island No: 35334
taacacaaaactatcttttataaataacaactaacccgttaaacaacaaaaaaatatcatactcgataataacgataacgcgctaatattacccgaacaaacgaacaatatccgactacaaaataataaaacgccgcaaaaaattttccgcaacaatcttaatacgttaatcgataaaccgtaaaataacgtaatcaacaccgataaccgtctaatcccgctcaatctcgcctaacgttcgcttaccgatcatcaaaataccgccgctaacgacattcgtcaaataattcaaaataaccgtctacgactaatacaactaacgaaacccgaaacgcgctttacctaataaaataaaaataacaataataacgccttccttacgacataaacataatacgccgactaacaaaccaaccaaacgatcgacgtaacgcaacaaccgaaatactaacaacatatactcgacaactacgcgaaacaaacaaataacataccgttattacatcgaacgctaatactaacataa

SEQ ID NO: 35335 - DNA, 526 bp, Artificial Sequence
  chemically treated genomic DNA (Homo sapiens) CpG-island No: 35335
tagtataaaattgttttttgtggataatagttggttcgttgaatagtagaaaaatgttatgttcggtggtggcgataacgcgttgatgttgttcgagtaggcgagtaatattcggttataaagtagtgaaacgtcgtaggagatttttcgtaataattttgatgcgttagtcgatgaatcgtggggtggcgtaattaatatcggtagtcgtttgatttcgtttagtttcgtttggcgttcgtttgtcgattattaaagtgtcgtcgttaacgatattcgttagatgatttaggataatcgtttgcggttgatgtaattggcggggttcggagcgcgttttatttggtggggtgaagatggtaatggtgacgttttttttacggtatgggtatggtacgtcgattggtaggttagttaggcgatcggcgtaacgtaataatcggaatattggtagtatatgttcgatagttacgcggagtaggtagataatatgtcgttattgtatcgggcgttggtgttggtatgg

SEQ ID NO: 35336 - DNA, 526 bp, Artificial Sequence
  chemically treated genomic DNA (Homo sapiens) CpG-island No: 35336
ccataccaacaccaacgcccgatacaataacgacatattatctacctactccgcgtaactatcgaacatatactaccaatattccgattattacgttacgccgatcgcctaactaacctaccaatcgacgtaccatacccataccgtaaaaaaaacgtcaccattaccatcttcaccccaccaaataaaacgcgctccgaaccccgccaattacatcaaccgcaaacgattatcctaaatcatctaacgaatatcgttaacgacgacactttaataatcgacaaacgaacgccaaacgaaactaaacgaaatcaaacgactaccgatattaattacgccaccccacgattcatcgactaacgcatcaaaattattacgaaaaatctcctacgacgtttcactactttataaccgaatattactcgcctactcgaacaacatcaacgcgttatcgccaccaccgaacataacatttttctactattcaacgaaccaactattatccacaaaaaacaattttatacta

SEQ ID NO: 35337 - DNA, 1015 bp, Artificial Sequence
  chemically treated genomic DNA (Homo sapiens) CpG-island No: 35337
gggcgtagtcgttattagagtttcggtcgagttcgggagcgaagcggggtcgagttaggatttattagttgttttaggttttttttcgagagtttcgcgtaacggtatcgttgttgttcgaattcgtatcgggtggttttggttattattattattcgggaggggcggaagtcgtcgttcgcgcggttgttatagttcgttagttcgcgcggttgtttttgttttaggtgtcgtcggtcgttatcgttatcgtttagtcggggtcgcgcggcggggtttttcgtattcggttttcgtagcgtcgtcgttcggtcgttcgttacgcgataatagttgtttagtaagaagtttcggtagtaagttatcgtgggtcgggtcgcggtcgcgggtttgggttcgggtttttgttttagttttttatcgtcgggagtgcgcgtcgttcgcgtcgttcgggtttttaatttcgcgtcggacgggtagaggttaagtgttaggacgtgcgtggtttacgcggttagggggacgtatttaggcgttgacgaaggcggggaaagcgtggcgattgggaaacgggagattttacgcgggagaaaggtgggcggggaagaaatggaggttttagttagtgggttttgtttgtttgtttattcgttttatttacgtttgtataatggttgtttcgtcgttcgggggcgattttttcgtattatacgttttttcgaggtcgtttttttttcgtttttaggttaattttatcggttaattagagttcgcggcggtttcggattcgaggggtcgcgttattggttgcggtttgagaaagaggtagaattttgttaggcgattgcgtcgttttgaggaatttagttggattcggtttgaggcggcgcggggttagcgggtggggttttgagcggttggcgggaaggtaggtttttggtatatgttcgtttgggttttgttttgtaggtcgattacgtgtttattggtttatttgattagggtcggtgtgata

SEQ ID NO: 35338 - DNA, 1015 bp, Artificial Sequence
  chemically treated genomic DNA (Homo sapiens) CpG-island No: 35338
tatcacaccgaccctaatcaaataaaccaataaacacgtaatcgacctacaaaacaaaacccaaacgaacatataccaaaaacctaccttcccgccaaccgctcaaaaccccacccgctaaccccgcgccgcctcaaaccgaatccaactaaattcctcaaaacgacgcaatcgcctaacaaaattctacctctttctcaaaccgcaaccaataacgcgacccctcgaatccgaaaccgccgcgaactctaattaaccgataaaattaacctaaaaacgaaaaaaaaacgacctcgaaaaaacgtataatacgaaaaaatcgcccccgaacgacgaaacaaccattatacaaacgtaaataaaacgaataaacaaacaaacaaaacccactaactaaaacctccatttcttccccgcccacctttctcccgcgtaaaatctcccgtttcccaatcgccacgctttccccgccttcgtcaacgcctaaatacgtccccctaaccgcgtaaaccacgcacgtcctaacacttaacctctacccgtccgacgcgaaattaaaaacccgaacgacgcgaacgacgcgcactcccgacgataaaaaactaaaacaaaaacccgaacccaaacccgcgaccgcgacccgacccacgataacttactaccgaaacttcttactaaacaactattatcgcgtaacgaacgaccgaacgacgacgctacgaaaaccgaatacgaaaaaccccgccgcgcgaccccgactaaacgataacgataacgaccgacgacacctaaaacaaaaacaaccgcgcgaactaacgaactataacaaccgcgcgaacgacgacttccgcccctcccgaataataataataaccaaaaccacccgatacgaattcgaacaacaacgataccgttacgcgaaactctcgaaaaaaaacctaaaacaactaataaatcctaactcgaccccgcttcgctcccgaactcgaccgaaactctaataacgactacgccc

SEQ ID NO: 35339 - DNA, 1015 bp, Artificial Sequence
  chemically treated genomic DNA (Homo sapiens) CpG-island No: 35339
tattatatcgattttggttaaataaattaatgggtacgtggtcggtttgtagaatagaatttaagcgagtatatgttaggaatttgttttttcgttagtcgtttaaaattttattcgttggtttcgcgtcgttttagatcggatttagttggattttttagggcgacgtaatcgtttaatagaattttattttttttttaggtcgtagttaatggcgcggtttttcggattcggagtcgtcgcgggttttgattggtcgatagagttagtttgggggcgggagaagagcgatttcggggaagcgtgtggtgcggggaggtcgttttcgggcggcgaagtagttattatgtaggcgtgagtgaaacgaataaataaataaataaaatttattagttggggtttttatttttttttcgtttatttttttttcgcgtggggtttttcgttttttaatcgttacgtttttttcgttttcgttaacgtttgggtacgtttttttagtcgcgtgggttacgtacgttttggtatttaatttttgttcgttcggcgcgaagttagaggttcgggcggcgcggacggcgcgtattttcggcggtagggagttgaggtaagggttcgagtttaagttcgcggtcgcggttcggtttacgatgatttgttatcgaggttttttgttgggtagttgttgtcgcgtggcgggcggtcgggcggcggcgttgcggggatcgggtgcgggaggtttcgtcgcgcggtttcggttgggcggtgacggtggcggtcggcggtatttggggtaggggtagtcgcgcgagttggcgggttgtggtagtcgcgcggacggcggttttcgtttttttcgggtggtggtggtggttaaaattattcggtacgagttcgagtagtagcggtatcgttacgcggagttttcggaggaggatttgaagtagttggtgggttttggttcggtttcgtttcgttttcgggttcggtcggggttttggtggcggttgcgttt

SEQ ID NO: 35340 - DNA, 1015 bp, Artificial Sequence
  chemically treated genomic DNA (Homo sapiens) CpG-island No: 35340
aaacgcaaccgccaccaaaaccccgaccgaacccgaaaacgaaacgaaaccgaaccaaaacccaccaactacttcaaatcctcctccgaaaactccgcgtaacgataccgctactactcgaactcgtaccgaataattttaaccaccaccaccacccgaaaaaaacgaaaaccgccgtccgcgcgactaccacaacccgccaactcgcgcgactacccctaccccaaataccgccgaccgccaccgtcaccgcccaaccgaaaccgcgcgacgaaacctcccgcacccgatccccgcaacgccgccgcccgaccgcccgccacgcgacaacaactacccaacaaaaaacctcgataacaaatcatcgtaaaccgaaccgcgaccgcgaacttaaactcgaacccttacctcaactccctaccgccgaaaatacgcgccgtccgcgccgcccgaacctctaacttcgcgccgaacgaacaaaaattaaataccaaaacgtacgtaacccacgcgactaaaaaaacgtacccaaacgttaacgaaaacgaaaaaaacgtaacgattaaaaaacgaaaaaccccacgcgaaaaaaaaataaacgaaaaaaaaataaaaaccccaactaataaattttatttatttatttattcgtttcactcacgcctacataataactacttcgccgcccgaaaacgacctccccgcaccacacgcttccccgaaatcgctcttctcccgcccccaaactaactctatcgaccaatcaaaacccgcgacgactccgaatccgaaaaaccgcgccattaactacgacctaaaaaaaaaataaaattctattaaacgattacgtcgccctaaaaaatccaactaaatccgatctaaaacgacgcgaaaccaacgaataaaattttaaacgactaacgaaaaaacaaattcctaacatatactcgcttaaattctattctacaaaccgaccacgtacccattaatttatttaaccaaaatcgatataata

SEQ ID NO: 35341 - DNA, 1013 bp, Artificial Sequence
  chemically treated genomic DNA (Homo sapiens) CpG-island No: 35341
atttgtagcgaggttcggaaatcggtttcgttagagtcgattttattcgttaggaatgcgtttcgttttcgtcgttttttcgcggtaatcgtttttgggtttttttcgttttaggggtaggagatagttcgaggggagcgtcgtttcggttcgttataatatcgtcgggtcggtcgtcggtcgtataggtattaggaggatagggtttggggcggattttacgttttatttcggttttcgcggttcgggagacgttcgcgtttgggtcgggtaggggattcggagttgatcgaggtttgattttttaagtcggttacggtttcgagtttacgttggatattggaggagacgttttttttatcggattttcgaatttatttttgtttcgggtaggggcgttagggttgcggttcggttagagttttttgggtcgtaagcgagagtcgttttttttttttcgtttcggggcgtaagttttttcgggtgttcgttcgtatttttaattttttagagcggcggtagcgtagggtggcgggcgagtaggtttattttttagtagcggcgatagtagtttgaggaagcgcgggggagggttttttcgatgcgtcgaggcgttttttaatcggggcggagacgacggaggggaggagtttcgacggtcgttttttcgaatttttttttcgtagttgtggttcgacggttgttttcgggaattagcgtcgtaattattattttttttttttttagttttcgtttttttttttttttttttttatttttttttttcgttttcggtcgtttcgttttaacgcgtcgttcgcgtgttgtgcgttatggcgttatttttattaggttcgttgcgggcggttttggatacggttgtttttttgcgtattttcgtttcgcgttcgcgtaggattcgttacgttgtattcgggtggtttttattgtcggtttttacgtttgaattatattagaaataatttaagaattggttaattattttttgtttg

SEQ ID NO: 35342 - DNA, 1013 bp, Artificial Sequence
  chemically treated genomic DNA (Homo sapiens) CpG-island No: 35342
caaacaaaaaataattaaccaattcttaaattatttctaatataattcaaacgtaaaaaccgacaataaaaaccacccgaatacaacgtaacgaatcctacgcgaacgcgaaacgaaaatacgcaaaaaaacaaccgtatccaaaaccgcccgcaacgaacctaataaaaataacgccataacgcacaacacgcgaacgacgcgttaaaacgaaacgaccgaaaacgaaaaaaaaaaataaaaaaaaaaaaaaaaaaaaacgaaaactaaaaaaaaaaaaaataataattacgacgctaattcccgaaaacaaccgtcgaaccacaactacgaaaaaaaaattcgaaaaaacgaccgtcgaaactcctcccctccgtcgtctccgccccgattaaaaaacgcctcgacgcatcgaaaaaaccctcccccgcgcttcctcaaactactatcgccgctactaaaaaataaacctactcgcccgccaccctacgctaccgccgctctaaaaaattaaaaatacgaacgaacacccgaaaaaacttacgccccgaaacgaaaaaaaaaaaacgactctcgcttacgacccaaaaaactctaaccgaaccgcaaccctaacgcccctacccgaaacaaaaataaattcgaaaatccgataaaaaaaacgtctcctccaatatccaacgtaaactcgaaaccgtaaccgacttaaaaaatcaaacctcgatcaactccgaatcccctacccgacccaaacgcgaacgtctcccgaaccgcgaaaaccgaaataaaacgtaaaatccgccccaaaccctatcctcctaatacctatacgaccgacgaccgacccgacgatattataacgaaccgaaacgacgctcccctcgaactatctcctacccctaaaacgaaaaaaacccaaaaacgattaccgcgaaaaaacgacgaaaacgaaacgcattcctaacgaataaaatcgactctaacgaaaccgatttccgaacctcgctacaaat

SEQ ID NO: 35343 - DNA, 1013 bp, Artificial Sequence
  chemically treated genomic DNA (Homo sapiens) CpG-island No: 35343
taggtaaagaataattagttagtttttgaattatttttggtgtagtttaggcgtgggggtcggtagtgggggttattcgggtgtagcgtggcgggttttgcgcgggcgcggaacgagggtgcgtaagggaatagtcgtgtttagagtcgttcgtagcgggtttggtgggggtgacgttatgacgtatagtacgcgggcggcgcgttggggcggggcggtcgggggcgggaggaagaagtgggaggaggaggaggggaaagcgggggttgggggagggggaggtggtagttgcggcgttggttttcgggagtagtcgtcgagttataattgcggaggaggagttcgggaaagcggtcgtcgggatttttttttttcgtcgttttcgtttcggttgagaggcgtttcggcgtatcggagggattttttttcgcgtttttttaggttgttgtcgtcgttgttgggagatgggtttattcgttcgttattttgcgttgtcgtcgttttgaggagttaaaggtacgggcgggtattcggaggagtttgcgtttcggagcgggagagaaggggcggttttcgtttacgatttagggagttttggtcgggtcgtagttttagcgtttttgttcgggatagaaatggattcggaagttcggtgggaaaggcgttttttttagtgtttagcgtgggttcggggtcgtggtcggtttagggggttaggtttcggttagtttcgggttttttattcggtttaggcgcgggcgtttttcgggtcgcgggggtcgaggtggagcgtgggattcgttttaagttttgtttttttggtgtttgtgcggtcggcggtcggttcggcgatattatgacgggtcgaggcggcgtttttttcgagttgttttttgtttttaaagcgggggagatttaagggcggttgtcgcggggaggcggcgggggcggaacgtatttttgacgggtgaaatcggttttaacgggatcgattttcgggtttcgttgtaaat

SEQ ID NO: 35344 - DNA, 1013 bp, Artificial Sequence
  chemically treated genomic DNA (Homo sapiens) CpG-island No: 35344
atttacaacgaaacccgaaaatcgatcccgttaaaaccgatttcacccgtcaaaaatacgttccgcccccgccgcctccccgcgacaaccgcccttaaatctcccccgctttaaaaacaaaaaacaactcgaaaaaaacgccgcctcgacccgtcataatatcgccgaaccgaccgccgaccgcacaaacaccaaaaaaacaaaacttaaaacgaatcccacgctccacctcgacccccgcgacccgaaaaacgcccgcgcctaaaccgaataaaaaacccgaaactaaccgaaacctaaccccctaaaccgaccacgaccccgaacccacgctaaacactaaaaaaaacgcctttcccaccgaacttccgaatccatttctatcccgaacaaaaacgctaaaactacgacccgaccaaaactccctaaatcgtaaacgaaaaccgccccttctctcccgctccgaaacgcaaactcctccgaatacccgcccgtacctttaactcctcaaaacgacgacaacgcaaaataacgaacgaataaacccatctcccaacaacgacgacaacaacctaaaaaaacgcgaaaaaaaatccctccgatacgccgaaacgcctctcaaccgaaacgaaaacgacgaaaaaaaaaaatcccgacgaccgctttcccgaactcctcctccgcaattataactcgacgactactcccgaaaaccaacgccgcaactaccacctccccctcccccaacccccgctttcccctcctcctcctcccacttcttcctcccgcccccgaccgccccgccccaacgcgccgcccgcgtactatacgtcataacgtcacccccaccaaacccgctacgaacgactctaaacacgactattcccttacgcaccctcgttccgcgcccgcgcaaaacccgccacgctacacccgaataacccccactaccgacccccacgcctaaactacaccaaaaataattcaaaaactaactaattattctttaccta

SEQ ID NO: 35345 - DNA, 665 bp, Artificial Sequence
  chemically treated genomic DNA (Homo sapiens) CpG-island No: 35345
tttttacgattcgtcgtcggagcggtcggttttcggagatcgtagtagagaggtttatacgttttttggttgtttcggttttagtggtcgttttttcgattttagttacgtagcgttaatcgtcgtagttatcgttattttaggattttattgtggtgggagaagaggggcgggggtattgtagagggggtaacgcgcggcgggatatgcgtcgttttttcggtaacggcgcgcgggggcgagaattcgtcggtgcggagagcgtaatgcgagttagattggagttatgtgattcgtcggagtttgtggtgtcgtttttggttttttaagtcgaaaagagattatattaacgaattcgtttttattcgtttaggaattatgtattttagaatgttaattagatttcgcgttttaaacgtttgtcggttataggtggaggattataaattttagtatgtcgtgcgttttcggcgttgatcgcggagttggaggttttaggcgtatgcggaagtgtattgattttttagttcgttgagatcgatcggaggagatgtgggtgtttcgagtgggcgtgttagttacggtcgtttcgtattaagtagttaagagtggaattagtgtgtcgatttggttattgatattgtgggtgatataaggtgtaataa

SEQ ID NO: 35346 - DNA, 665 bp, Artificial Sequence
  chemically treated genomic DNA (Homo sapiens) CpG-island No: 35346
ttattacaccttatatcacccacaatatcaataaccaaatcgacacactaattccactcttaactacttaatacgaaacgaccgtaactaacacgcccactcgaaacacccacatctcctccgatcgatctcaacgaactaaaaaatcaatacacttccgcatacgcctaaaacctccaactccgcgatcaacgccgaaaacgcacgacatactaaaatttataatcctccacctataaccgacaaacgtttaaaacgcgaaatctaattaacattctaaaatacataattcctaaacgaataaaaacgaattcgttaatataatctcttttcgacttaaaaaaccaaaaacgacaccacaaactccgacgaatcacataactccaatctaactcgcattacgctctccgcaccgacgaattctcgcccccgcgcgccgttaccgaaaaaacgacgcatatcccgccgcgcgttaccccctctacaatacccccgcccctcttctcccaccacaataaaatcctaaaataacgataactacgacgattaacgctacgtaactaaaatcgaaaaaacgaccactaaaaccgaaacaaccaaaaaacgtataaacctctctactacgatctccgaaaaccgaccgctccgacgacgaatcgtaaaaa

SEQ ID NO: 35347 - DNA, 665 bp, Artificial Sequence
  chemically treated genomic DNA (Homo sapiens) CpG-island No: 35347
ttgttgtattttatgttatttatagtgttagtagttaaatcgatatattagttttatttttggttatttaatacggagcggtcgtagttgatacgtttattcgaaatatttatatttttttcggtcgattttaacgggttgagggattaatgtattttcgtatacgtttagggtttttagtttcgcgattaacgtcggaagcgtacggtatgttgggatttgtagttttttatttgtggtcggtaggcgtttagaacgcgaggtttagttggtattttgggatatatagtttttgggcgggtgggggcggattcgttggtgtaattttttttcggtttaaagagttagaagcgatattatagatttcggcgggttatatgattttagtttagttcgtattgcgtttttcgtatcggcgagttttcgttttcgcgcgtcgttgtcgaggagacggcgtatgtttcgtcgcgcgttgttttttttgtagtattttcgtttttttttttttattataatgagattttaagatggcggtggttgcggcggttggcgttgcgtagttgaggtcgaaaaggcggttattggggtcgaggtagttaggaaacgtgtgggtttttttgttgcggttttcgagggtcgatcgtttcggcggcgggtcgtggggg

SEQ ID NO: 35348 - DNA, 665 bp, Artificial Sequence
  chemically treated genomic DNA (Homo sapiens) CpG-island No: 35348
cccccacgacccgccgccgaaacgatcgaccctcgaaaaccgcaacaaaaaaacccacacgtttcctaactacctcgaccccaataaccgccttttcgacctcaactacgcaacgccaaccgccgcaaccaccgccatcttaaaatctcattataataaaaaaaaaaaaacgaaaatactacaaaaaaaacaacgcgcgacgaaacatacgccgtctcctcgacaacgacgcgcgaaaacgaaaactcgccgatacgaaaaacgcaatacgaactaaactaaaatcatataacccgccgaaatctataatatcgcttctaactctttaaaccgaaaaaaaattacaccaacgaatccgcccccacccgcccaaaaactatatatcccaaaataccaactaaacctcgcgttctaaacgcctaccgaccacaaataaaaaactacaaatcccaacataccgtacgcttccgacgttaatcgcgaaactaaaaaccctaaacgtatacgaaaatacattaatccctcaacccgttaaaatcgaccgaaaaaaatataaatatttcgaataaacgtatcaactacgaccgctccgtattaaataaccaaaaataaaactaatatatcgatttaactactaacactataaataacataaaatacaacaa

SEQ ID NO: 35349 - DNA, 526 bp, Artificial Sequence
  chemically treated genomic DNA (Homo sapiens) CpG-island No: 35349
ggcgattggtaatatgtcgatggcggcggtatttattttggtgtcgattatttttatcgtattgtatttggcgttcgtgaaacgtttgggagcgttcgatgtattttgaacgcgtatcgtttttttttaaattggcggtttggggcggcgttgtttttttatatttttttattttgataatcgtcgtttatgcgtttaatattgaagatgcggcgtttagttttttatcgtagggtttgacgttgcgttggtttagcgtggtagtatagcgtagtgatatttttgatgtcgtgatattgttatttaaagtggcggcgttggcgatattaattgcgttggtgttagggacgttggtagttgtcgcgttgtggcgacgagattttttcggtaaaaacgttatttcgttgttattgttgttgtttattgcgttgtcgggtattgttattggtttggcgttattaatcgtttttaaaattattaatttggagtcgggattttttattatcgtggtcggttatgcgatttt

SEQ ID NO: 35350 - DNA, 526 bp, Artificial Sequence
  chemically treated genomic DNA (Homo sapiens) CpG-island No: 35350
aaaatcgcataaccgaccacgataataaaaaatcccgactccaaattaataattttaaaaacgattaataacgccaaaccaataacaatacccgacaacgcaataaacaacaacaataacaacgaaataacgtttttaccgaaaaaatctcgtcgccacaacgcgacaactaccaacgtccctaacaccaacgcaattaatatcgccaacgccgccactttaaataacaatatcacgacatcaaaaatatcactacgctatactaccacgctaaaccaacgcaacgtcaaaccctacgataaaaaactaaacgccgcatcttcaatattaaacgcataaacgacgattatcaaaataaaaaaatataaaaaaacaacgccgccccaaaccgccaatttaaaaaaaaacgatacgcgttcaaaatacatcgaacgctcccaaacgtttcacgaacgccaaatacaatacgataaaaataatcgacaccaaaataaataccgccgccatcgacatattaccaatcgcc

SEQ ID NO: 35351 - DNA, 526 bp, Artificial Sequence
  chemically treated genomic DNA (Homo sapiens) CpG-island No: 35351
aaagtcgtatgatcgattacgatggtgaaaaatttcggttttagattgatggttttaaaggcggttaataacgttagattagtgataatgttcggtagcgtaatgggtagtagtagtaatagcgaaatggcgtttttgtcgaaaaagtttcgtcgttatagcgcggtagttgttagcgtttttaatattagcgtaattaatgtcgttagcgtcgttattttaagtgatagtgttacggtattaagaatattattacgttgtgttgttacgttaaattagcgtagcgttaggttttgcggtggaaaattaaacgtcgtatttttagtgttaaacgtataggcggcgattattaggatgggaaaatgtaggaaaataacgtcgttttaggtcgttagtttgaggaaaaacggtgcgcgtttagagtgtatcgaacgtttttagacgttttacgaacgttaggtatagtgcgatgagaataatcggtattagggtgaatgtcgtcgttatcggtatattgttaatcgtt

SEQ ID NO: 35352 - DNA, 526 bp, Artificial Sequence
  chemically treated genomic DNA (Homo sapiens) CpG-island No: 35352
aacgattaacaatataccgataacgacgacattcaccctaataccgattattctcatcgcactatacctaacgttcgtaaaacgtctaaaaacgttcgatacactctaaacgcgcaccgtttttcctcaaactaacgacctaaaacgacgttattttcctacattttcccatcctaataatcgccgcctatacgtttaacactaaaaatacgacgtttaattttccaccgcaaaacctaacgctacgctaatttaacgtaacaacacaacgtaataatattcttaataccgtaacactatcacttaaaataacgacgctaacgacattaattacgctaatattaaaaacgctaacaactaccgcgctataacgacgaaactttttcgacaaaaacgccatttcgctattactactactacccattacgctaccgaacattatcactaatctaacgttattaaccgcctttaaaaccatcaatctaaaaccgaaatttttcaccatcgtaatcgatcatacgacttt

SEQ ID NO: 35353 - DNA, 501 bp, Artificial Sequence
  chemically treated genomic DNA (Homo sapiens) CpG-island No: 35353
tgcgtatcgtgttgatgaatttttattatttggttgtaattttagtattaagtttgggcgggtttatagacgatatgtaaatcgtatttttgcgttatcgtttcgtggtagataattttaaaattaaaataggacggcgttttttttaacgtaggagagcgcgttaatttttagttatacggcggtgacgcgtttaatatcgatgttgtttcgtttgtcgttggataattttaacggcgttttggtaaagagataatttatgtattttcgttatttttgcgattaaatagtagggcgcgacgttttgcgtgtggtatattcggattcgtgattgtagcgaaaggattattcgtgcgtagttattcgttaggcgttggttttttttaatcgatatgttgtgcgaaagcggcgatattagcgaataggagagatattgcgaaatatcgtttagttcgttaacggtaaaggttatagtgttatacggtagttgtagattaattt

SEQ ID NO: 35354 - DNA, 501 bp, Artificial Sequence
  chemically treated genomic DNA (Homo sapiens) CpG-island No: 35354
aaattaatctacaactaccgtataacactataacctttaccgttaacgaactaaacgatatttcgcaatatctctcctattcgctaatatcgccgctttcgcacaacatatcgattaaaaaaaaccaacgcctaacgaataactacgcacgaataatcctttcgctacaatcacgaatccgaatataccacacgcaaaacgtcgcgccctactatttaatcgcaaaaataacgaaaatacataaattatctctttaccaaaacgccgttaaaattatccaacgacaaacgaaacaacatcgatattaaacgcgtcaccgccgtataactaaaaattaacgcgctctcctacgttaaaaaaaacgccgtcctattttaattttaaaattatctaccacgaaacgataacgcaaaaatacgatttacatatcgtctataaacccgcccaaacttaatactaaaattacaaccaaataataaaaattcatcaacacgatacgca

SEQ ID NO: 35355 - DNA, 501 bp, Artificial Sequence
  chemically treated genomic DNA (Homo sapiens) CpG-island No: 35355
aaattggtttgtaattgtcgtatggtattatgatttttatcgttggcgaattggacggtgtttcgtaatattttttttgttcgttgatgtcgtcgttttcgtatagtatgtcgattgaagagggttaacgtttgacggatgattgcgtacgaatgattttttcgttgtagttacgaattcggatgtattatacgtagggcgtcgcgttttgttgtttggtcgtaggagtggcgaaaatgtatgagttgtttttttgttagagcgtcgttgaaattatttaacggtaggcggagtagtatcgatgttaagcgcgttatcgtcgtgtggttggaaattggcgcgtttttttgcgttgaggagagcgtcgttttgttttagttttgaaattgtttgttacggaacggtggcgtaagggtgcgatttatatatcgtttataaattcgtttaggtttggtgttgggattgtagttaggtggtggagatttattagtacgatgcgta

SEQ ID NO: 35356 - DNA, 501 bp, Artificial Sequence
  chemically treated genomic DNA (Homo sapiens) CpG-island No: 35356
tacgcatcgtactaataaatctccaccacctaactacaatcccaacaccaaacctaaacgaatttataaacgatatataaatcgcacccttacgccaccgttccgtaacaaacaatttcaaaactaaaacaaaacgacgctctcctcaacgcaaaaaaacgcgccaatttccaaccacacgacgataacgcgcttaacatcgatactactccgcctaccgttaaataatttcaacgacgctctaacaaaaaaacaactcatacattttcgccactcctacgaccaaacaacaaaacgcgacgccctacgtataatacatccgaattcgtaactacaacgaaaaaatcattcgtacgcaatcatccgtcaaacgttaaccctcttcaatcgacatactatacgaaaacgacgacatcaacgaacaaaaaaaatattacgaaacaccgtccaattcgccaacgataaaaatcataataccatacgacaattacaaaccaattt

SEQ ID NO: 35357 - DNA, 812 bp, Artificial Sequence
  chemically treated genomic DNA (Homo sapiens) CpG-island No: 35357
agtcggatgaagtgtataatttgggcgtaatgagttacgttgcggttttttttgagttattagaatatatcgttgacgtcgacgcgatgggtacgttgcgtttgttggaggcgattcgttttttcggtttggaaaagaaaattcgtttttattaggtttttatttttgaattgtatggtttggtgtaggaaatttcgtagaaagagattacgtcgttttattcgcgattttcgtatgcggtcgttaaattgtacgtttattggattatcgttaattatcgtgaattttacggtatgtacgtttgtaacggaattttttttaattatgaattttcgcgtcgcggcgaaattttcgttattcgtaaaattattcgcgtaatcgttaatatcgtttaggggttggagtcgtgtttgtatttcggtaatatggattttttgcgtgattggggttacgttaaagattacgtaaaaatgtagtggatgatgttgtagtaggaatagtcggaagatttcgttatcgcgatcggcgtttagtatttcgtgcgttagttcgtggaaatggcggtagtatagttgggtattaaattgcgttttgaaggtacgggcgttgaagagaagggtattgtggttttcgttatcgggtatgacgcgtcgggcgttaaatcgggtgatgtgattatcgttgttgattcgcgttattttcgttcggttgaagttgaaacgttgttcggcgattcgattaaagcgtacgaaaaattgggttggaaatcggaaattatttttagagagatggtgtttgaaatggtggttaat

SEQ ID NO: 35358 - DNA, 812 bp, Artificial Sequence
  chemically treated genomic DNA (Homo sapiens) CpG-island No: 35358
attaaccaccatttcaaacaccatctctctaaaaataatttccgatttccaacccaatttttcgtacgctttaatcgaatcgccgaacaacgtttcaacttcaaccgaacgaaaataacgcgaatcaacaacgataatcacatcacccgatttaacgcccgacgcgtcatacccgataacgaaaaccacaatacccttctcttcaacgcccgtaccttcaaaacgcaatttaatacccaactatactaccgccatttccacgaactaacgcacgaaatactaaacgccgatcgcgataacgaaatcttccgactattcctactacaacatcatccactacatttttacgtaatctttaacgtaaccccaatcacgcaaaaaatccatattaccgaaatacaaacacgactccaacccctaaacgatattaacgattacgcgaataattttacgaataacgaaaatttcgccgcgacgcgaaaattcataattaaaaaaaattccgttacaaacgtacataccgtaaaattcacgataattaacgataatccaataaacgtacaatttaacgaccgcatacgaaaatcgcgaataaaacgacgtaatctctttctacgaaatttcctacaccaaaccatacaattcaaaaataaaaacctaataaaaacgaattttcttttccaaaccgaaaaaacgaatcgcctccaacaaacgcaacgtacccatcgcgtcgacgtcaacgatatattctaataactcaaaaaaaaccgcaacgtaactcattacgcccaaattatacacttcatccgact

SEQ ID NO: 35359 - DNA, 812 bp, Artificial Sequence
  chemically treated genomic DNA (Homo sapiens) CpG-island No: 35359
attagttattattttagatattatttttttgagggtgattttcggtttttagtttagtttttcgtgcgttttggtcgggtcgtcgagtagcgttttaattttagtcggacggaagtaacgcgggttaatagcgataattatattattcggtttaacgttcggcgcgttatgttcggtgacggaaattataatgtttttttttttaacgttcgtgtttttaaagcgtagtttgatgtttagttgtgttgtcgttatttttacgaattgacgtacggagtattgaacgtcggtcgcgataacgaaatttttcggttgtttttgttgtagtattatttattgtatttttacgtagtttttggcgtggttttagttacgtagggaatttatattgtcgaggtataggtacgattttagtttttgggcgatgttggcgattgcgcgggtgattttgcgggtaacgaaggtttcgtcgcggcgcggggatttatggttgaagagaatttcgttataggcgtatatgtcgtaggatttacggtagttaacggtgatttagtaggcgtatagtttggcgatcgtatacggagatcgcgggtagaacggcgtggtttttttttgcggaattttttgtattagattatatagtttagaggtggaagtttgatagaaacgagtttttttttttagatcgaggaagcggatcgtttttagtaggcgtagcgtatttatcgcgtcgacgttagcggtatattttggtgatttaaaagagatcgtaacgtggtttattgcgtttaggttgtatattttattcggtt

SEQ ID NO: 35360 - DNA, 812 bp, Artificial Sequence
  chemically treated genomic DNA (Homo sapiens) CpG-island No: 35360
aaccgaataaaatatacaacctaaacgcaataaaccacgttacgatctcttttaaatcaccaaaatataccgctaacgtcgacgcgataaatacgctacgcctactaaaaacgatccgcttcctcgatctaaaaaaaaaaactcgtttctatcaaacttccacctctaaactatataatctaatacaaaaaattccgcaaaaaaaaaccacgccgttctacccgcgatctccgtatacgatcgccaaactatacgcctactaaatcaccgttaactaccgtaaatcctacgacatatacgcctataacgaaattctcttcaaccataaatccccgcgccgcgacgaaaccttcgttacccgcaaaatcacccgcgcaatcgccaacatcgcccaaaaactaaaatcgtacctatacctcgacaatataaattccctacgtaactaaaaccacgccaaaaactacgtaaaaatacaataaataatactacaacaaaaacaaccgaaaaatttcgttatcgcgaccgacgttcaatactccgtacgtcaattcgtaaaaataacgacaacacaactaaacatcaaactacgctttaaaaacacgaacgttaaaaaaaaaaacattataatttccgtcaccgaacataacgcgccgaacgttaaaccgaataatataattatcgctattaacccgcgttacttccgtccgactaaaattaaaacgctactcgacgacccgaccaaaacgcacgaaaaactaaactaaaaaccgaaaatcaccctcaaaaaaataatatctaaaataataactaat

SEQ ID NO: 35361 - DNA, 639 bp, Artificial Sequence
  chemically treated genomic DNA (Homo sapiens) CpG-island No: 35361
ggcggcggtgttgagtcgggaatcgcgcgtttattcgtttagtcggacggtttcggcgcgggtgggtgagatattgggaatagcggttagttgtagagggttcgaggtcgggcgcgcgggagcggggcgcgtcgaacgcgcgcgtgcgcggttcgtgtgtgggtttgcgggggcgtgcgcggttggggggtagtgagggtcgtcgcggcggcgcgtagtacggcgggaatatggcgcgcggaatcggcgtacgcgtttagttggtgggatcgttagttcgaggcggacgcggttcggatttcgtggatatggagtagtggtcgtcgtcggcgttcgagtcggtttaagggtcgattttcgtaaggagttgaaggcggcgggagatcgagtcggcgtcggtgagtgcgtgagggattcgggtcgggagattttttttgttaaatttcggcggtgggagtcgggtcgggttttagcgattgaggagcgtttgcgaggcggagggtgtttcgtagttcgggttcgattttagtcgcgagtcgttaggcgataggatatggtcggtcgtttgtttgttttagttttcgcgagagtgtgtgtgggtgtgtgtgggtgtgtatgggtgttggtttgtatatatcg

SEQ ID NO: 35362 - DNA, 639 bp, Artificial Sequence
  chemically treated genomic DNA (Homo sapiens) CpG-island No: 35362
cgatatatacaaaccaacacccatacacacccacacacacccacacacactctcgcgaaaactaaaacaaacaaacgaccgaccatatcctatcgcctaacgactcgcgactaaaatcgaacccgaactacgaaacaccctccgcctcgcaaacgctcctcaatcgctaaaacccgacccgactcccaccgccgaaatttaacaaaaaaaatctcccgacccgaatccctcacgcactcaccgacgccgactcgatctcccgccgccttcaactccttacgaaaatcgacccttaaaccgactcgaacgccgacgacgaccactactccatatccacgaaatccgaaccgcgtccgcctcgaactaacgatcccaccaactaaacgcgtacgccgattccgcgcgccatattcccgccgtactacgcgccgccgcgacgaccctcactaccccccaaccgcgcacgcccccgcaaacccacacacgaaccgcgcacgcgcgcgttcgacgcgccccgctcccgcgcgcccgacctcgaaccctctacaactaaccgctattcccaatatctcacccacccgcgccgaaaccgtccgactaaacgaataaacgcgcgattcccgactcaacaccgccgcc

SEQ ID NO: 35363 - DNA, 639 bp, Artificial Sequence
  chemically treated genomic DNA (Homo sapiens) CpG-island No: 35363
cggtgtgtgtaggttaatatttatatatatttatatatatttatatatattttcgcggaaattgaggtaggtaggcggtcgattatgttttgtcgtttgacggttcgcggttgggatcgaattcggattgcgagatatttttcgtttcgtaggcgttttttagtcgttgaggttcggttcggtttttatcgtcggagtttgataaagaaagtttttcggttcgagttttttacgtatttatcggcgtcgattcggtttttcgtcgtttttagttttttgcgggggtcggtttttgggtcggttcgggcgtcggcggcggttattgttttatatttacggggttcgggtcgcgttcgtttcgagttaacggttttattagttaggcgcgtgcgtcggtttcgcgcgttatgttttcgtcgtgttgcgcgtcgtcgcggcgatttttattgttttttaatcgcgtacgttttcgtaggtttatatacgaatcgcgtacgcgcgcgttcgacgcgtttcgttttcgcgcgttcggtttcgggttttttgtagttggtcgttgtttttagtgttttatttattcgcgtcggaatcgttcgattgggcgggtgagcgcgcggttttcgatttagtatcgtcgtt

SEQ ID NO: 35364 - DNA, 639 bp, Artificial Sequence
  chemically treated genomic DNA (Homo sapiens) CpG-island No: 35364
aacgacgatactaaatcgaaaaccgcgcgctcacccgcccaatcgaacgattccgacgcgaataaataaaacactaaaaacaacgaccaactacaaaaaacccgaaaccgaacgcgcgaaaacgaaacgcgtcgaacgcgcgcgtacgcgattcgtatataaacctacgaaaacgtacgcgattaaaaaacaataaaaatcgccgcgacgacgcgcaacacgacgaaaacataacgcgcgaaaccgacgcacgcgcctaactaataaaaccgttaactcgaaacgaacgcgacccgaaccccgtaaatataaaacaataaccgccgccgacgcccgaaccgacccaaaaaccgacccccgcaaaaaactaaaaacgacgaaaaaccgaatcgacgccgataaatacgtaaaaaactcgaaccgaaaaactttctttatcaaactccgacgataaaaaccgaaccgaacctcaacgactaaaaaacgcctacgaaacgaaaaatatctcgcaatccgaattcgatcccaaccgcgaaccgtcaaacgacaaaacataatcgaccgcctacctacctcaatttccgcgaaaatatatataaatatatataaatatatataaatattaacctacacacaccg

SEQ ID NO: 35365 - DNA, 757 bp, Artificial Sequence
  chemically treated genomic DNA (Homo sapiens) CpG-island No: 35365
  unsure (754)
cgtaagagttttcgttcgacgagtaggatgagatcggcgagtcggttatggagtttaagtcgttggagtagttgggggagatggtgggcgataggacgtttgtttggaaggcggcgtttatcgcgttatgttcgtttagtagttgttgtagcgcgcggatgtattcgatcgtcgagcgtagtgtttttattttatttatttttttgttggtcgcgtcgttggggacgtgttttcgaagggtggtaaagtttaggttgattaatttgacgcggttgcgttcgcgttcgttgcggcgcgttacggcggtcggttgttgttgcggtaggttgtagttaaagtcgttgaagttgagtcggcgtttgtagcgtattagttcgggcgaagacgagcgttgtcgtttgatttgtttgggcgttgatttgtgatcgttttttgagggttggtcgtcggtcgtcggttttagttgcggcgtttgttgttgttgttgttgttgttgttgttgttgttgcgcgttttgcgttgtcgttgcggcggttgcggtcgtcgcggttgcggtcgtggtaaagaaataggttgcgggcggtaggaagggttgttggggttgcggttggggttgttggtcggcgtcgtcgttttttattttggtagagttttttatgcgtagcggcggttaaggagtcgcggaattagagcgattcgggacgcgaggtgcggggttcgcgagggggatatagagagaatttgggtgcggtanata

SEQ ID NO: 35366 - DNA, 757 bp, Artificial Sequence
  chemically treated genomic DNA (Homo sapiens) CpG-island No: 35366
  unsure (4)
tatntaccgcacccaaattctctctatatccccctcgcgaaccccgcacctcgcgtcccgaatcgctctaattccgcgactccttaaccgccgctacgcataaaaaactctaccaaaataaaaaacgacgacgccgaccaacaaccccaaccgcaaccccaacaacccttcctaccgcccgcaacctatttctttaccacgaccgcaaccgcgacgaccgcaaccgccgcaacgacaacgcaaaacgcgcaacaacaacaacaacaacaacaacaacaacaacaaacgccgcaactaaaaccgacgaccgacgaccaaccctcaaaaaacgatcacaaatcaacgcccaaacaaatcaaacgacaacgctcgtcttcgcccgaactaatacgctacaaacgccgactcaacttcaacgactttaactacaacctaccgcaacaacaaccgaccgccgtaacgcgccgcaacgaacgcgaacgcaaccgcgtcaaattaatcaacctaaactttaccacccttcgaaaacacgtccccaacgacgcgaccaacaaaaaaataaataaaataaaaacactacgctcgacgatcgaatacatccgcgcgctacaacaactactaaacgaacataacgcgataaacgccgccttccaaacaaacgtcctatcgcccaccatctcccccaactactccaacgacttaaactccataaccgactcgccgatctcatcctactcgtcgaacgaaaactcttacg

SEQ ID NO: 35367 - DNA, 757 bp, Artificial Sequence
  chemically treated genomic DNA (Homo sapiens) CpG-island No: 35367
  unsure (4)
tgtntatcgtatttaagttttttttgtgtttttttcgcgggtttcgtatttcgcgtttcggatcgttttgatttcgcgattttttggtcgtcgttgcgtatggaaagttttgttaagatggagagcggcggcgtcggttagtagttttagtcgtagttttagtagttttttttgtcgttcgtagtttgtttttttgttacggtcgtagtcgcggcggtcgtagtcgtcgtagcggtagcgtagagcgcgtagtagtagtagtagtagtagtagtagtagtagtaggcgtcgtagttgagatcggcggtcgacggttagtttttagggggcggttataagttagcgtttaagtaagttaagcgatagcgttcgttttcgttcgaattgatgcgttgtaaacgtcggtttaattttagcggttttggttatagtttgtcgtagtagtagtcggtcgtcgtggcgcgtcgtaacgagcgcgagcgtaatcgcgttaagttggttaatttgggttttgttatttttcgggagtacgtttttaacggcgcggttaataagaagatgagtaaggtggagatattgcgttcggcggtcgagtatattcgcgcgttgtagtagttgttggacgagtatgacgcggtgagcgtcgttttttaggtaggcgttttgtcgtttattattttttttaattattttaacgatttgaattttatggtcggttcgtcggttttattttattcgtcggacgagggtttttacg

SEQ ID NO: 35368 - DNA, 757 bp, Artificial Sequence
  chemically treated genomic DNA (Homo sapiens) CpG-island No: 35368
  unsure (754)
cgtaaaaaccctcgtccgacgaataaaataaaaccgacgaaccgaccataaaattcaaatcgttaaaataattaaaaaaaataataaacgacaaaacgcctacctaaaaaacgacgctcaccgcgtcatactcgtccaacaactactacaacgcgcgaatatactcgaccgccgaacgcaatatctccaccttactcatcttcttattaaccgcgccgttaaaaacgtactcccgaaaaataacaaaacccaaattaaccaacttaacgcgattacgctcgcgctcgttacgacgcgccacgacgaccgactactactacgacaaactataaccaaaaccgctaaaattaaaccgacgtttacaacgcatcaattcgaacgaaaacgaacgctatcgcttaacttacttaaacgctaacttataaccgccccctaaaaactaaccgtcgaccgccgatctcaactacgacgcctactactactactactactactactactactactacgcgctctacgctaccgctacgacgactacgaccgccgcgactacgaccgtaacaaaaaaacaaactacgaacgacaaaaaaaactactaaaactacgactaaaactactaaccgacgccgccgctctccatcttaacaaaactttccatacgcaacgacgaccaaaaaatcgcgaaatcaaaacgatccgaaacgcgaaatacgaaacccgcgaaaaaaacacaaaaaaaacttaaatacgatanaca

SEQ ID NO: 35369 - DNA, 514 bp, Artificial Sequence
  chemically treated genomic DNA (Homo sapiens) CpG-island No: 35369
ttttttttttttttttttattttttttttttttttgtttttttatttttttttttttttttcgttttttttttttacgttttttttcgttttcggtaatttttttattttgtttattttcgtttatttttttgtttttgttttttttttttttgcgttttgtcggtgtttttttttttttagtttttatcgcgtatttttgtttcgtttattacgaatttcgtagcgtattcgtttttttattttagagtatttattttcgttatttttttttagttttttattttttagtttttcgagtttcgtttttgttcgtttttttttcgttttttttttttcgatttttttttttttcgttttttttttttttttttttcgttttttcgtattttcgttttatatatttcgatttttattcgttttcgtttttttatttttttcgttttttcgtttcgcgttatttcgtttattttttcgcgatatgcgttgtcgttgtttttttttatttaatcgtt

SEQ ID NO: 35370 - DNA, 514 bp, Artificial Sequence
  chemically treated genomic DNA (Homo sapiens) CpG-island No: 35370
aacgattaaataaaaaaaaacaacgacaacgcatatcgcgaaaaaataaacgaaataacgcgaaacgaaaaaacgaaaaaaataaaaaaacgaaaacgaataaaaatcgaaatatataaaacgaaaatacgaaaaaacgaaaaaaaaaaaaaaaaaaaacgaaaaaaaaaaaaatcgaaaaaaaaaaaacgaaaaaaaaacgaacaaaaacgaaactcgaaaaactaaaaaataaaaaactaaaaaaaaataacgaaaataaatactctaaaataaaaaaacgaatacgctacgaaattcgtaataaacgaaacaaaaatacgcgataaaaactaaaaaaaaaaaaacaccgacaaaacgcaaaaaaaaaaaaaacaaaaacaaaaaaataaacgaaaataaacaaaataaaaaaattaccgaaaacgaaaaaaaacgtaaaaaaaaaaaacgaaaaaaaaaaaaaaaaataaaaaaacaaaaaaaaaaaaaaaataaaaaaaaaaaaaaaaaa

SEQ ID NO: 35371 - DNA, 514 bp, Artificial Sequence
  chemically treated genomic DNA (Homo sapiens) CpG-island No: 35371
ggcgattaaataaaaaagggtaacggtagcgtatatcgcggaaaagtgggcgaaatggcgcgaggcgggggggcgggggaaatgagaaagcgggggcgggtgggaatcggggtatatgaaacggagatgcgggggggcgggaaaaaaaggggaagagagcgggggaaaaaagaatcggggggagaaagacggggggaaaacgggtaagggcgaagttcggaggattggaggatggggaattaagaaaagatggcgggaatggatgttttagaatgggggaacggatgcgttacggaattcgtgatgaacggggtaggggtacgcgatggggattgagagaaaagaagtatcggtaggacgtagagggagaagaggtaagagtagggggataggcgggggtggataggatggggagattatcgggggcgggggggagcgtgggggaagggggcgaaggggaaagggggggataaggaagtaggaagggagagaaggtagggggaagggagggggg

SEQ ID NO: 35372 - DNA, 514 bp, Artificial Sequence
  chemically treated genomic DNA (Homo sapiens) CpG-island No: 35372
cccccctcccttccccctaccttctctcccttcctacttccttatccccccctttccccttcgcccccttcccccacgctcccccccgcccccgataatctccccatcctatccacccccgcctatccccctactcttacctcttctccctctacgtcctaccgatacttcttttctctcaatccccatcgcgtacccctaccccgttcatcacgaattccgtaacgcatccgttcccccattctaaaacatccattcccgccatcttttcttaattccccatcctccaatcctccgaacttcgcccttacccgttttccccccgtctttctccccccgattcttttttcccccgctctcttcccctttttttcccgcccccccgcatctccgtttcatataccccgattcccacccgcccccgctttctcatttcccccgcccccccgcctcgcgccatttcgcccacttttccgcgatatacgctaccgttacccttttttatttaatcgcc

SEQ ID NO: 35373 - DNA, 686 bp, Artificial Sequence
  chemically treated genomic DNA (Homo sapiens) CpG-island No: 35373
tatcgaaacgagcgggacgcgtaggcgatttttttgtagtcggttgaaggcggggaacgtgttttaggcgaggaattcgtcgttttcgggttcgagtagggttacgagtagtatttggtgttggaagcgtacggtcggttgtttttcgtagttgtttcgttttagttaaaattttgagttaaagagggcggtagggaggcggttagggaggtcggttttggtcgagcgcgttcggggagtttcgtggtatagcggtcggggtaggtttatcgtggtttcggaaggttattagtagcggcgggatgtacgtgagcgtagcggttagtagtaggaatagcgcggttttggagtagagtttcgcgcggtaattgcgttcgatcgggtgagagaagagtttatagagcgttatgagtatcgttcgtaggtatttcgcgagtcgggggattaagtttggttttttttggttgttatcgtttcggtttttacggtaatcgacggtttatagaaaggagttaatagtaaggtcgtatcgaaaggagttagtggcgggggcggggttagcgggcgtggcgttgtcggggacggtcggtttagtttttcgagttgtgtacgtttgcgtaaaggttgggcggcgatagaacgttttcgtggattagagtcgtggttgttgtttgtgttaatatttg

SEQ ID NO: 35374 - DNA, 686 bp, Artificial Sequence
  chemically treated genomic DNA (Homo sapiens) CpG-island No: 35374
caaatattaacacaaacaacaaccacgactctaatccacgaaaacgttctatcgccgcccaacctttacgcaaacgtacacaactcgaaaaactaaaccgaccgtccccgacaacgccacgcccgctaaccccgcccccgccactaactcctttcgatacgaccttactattaactcctttctataaaccgtcgattaccgtaaaaaccgaaacgataacaaccaaaaaaaaccaaacttaatcccccgactcgcgaaatacctacgaacgatactcataacgctctataaactcttctctcacccgatcgaacgcaattaccgcgcgaaactctactccaaaaccgcgctattcctactactaaccgctacgctcacgtacatcccgccgctactaataaccttccgaaaccacgataaacctaccccgaccgctataccacgaaactccccgaacgcgctcgaccaaaaccgacctccctaaccgcctccctaccgccctctttaactcaaaattttaactaaaacgaaacaactacgaaaaacaaccgaccgtacgcttccaacaccaaatactactcgtaaccctactcgaacccgaaaacgacgaattcctcgcctaaaacacgttccccgccttcaaccgactacaaaaaaatcgcctacgcgtcccgctcgtttcgata

SEQ ID NO: 35375 - DNA, 686 bp, Artificial Sequence
  chemically treated genomic DNA (Homo sapiens) CpG-island No: 35375
taaatgttaatatagataatagttacgattttggtttacggaaacgttttatcgtcgtttagtttttacgtaaacgtatatagttcgaaaagttaggtcgatcgttttcggtagcgttacgttcgttaatttcgttttcgttattggtttttttcggtgcggttttgttattggtttttttttgtgagtcgtcggttgtcgtggagatcgaggcgatggtaattaggagaagttaaatttggtttttcggttcgcggagtgtttgcgagcggtgtttatggcgttttatgagttttttttttattcggtcgagcgtagttatcgcgcggggttttgttttaaagtcgcgttgtttttgttgttggtcgttgcgtttacgtatatttcgtcgttgttggtggtttttcggagttacggtgagtttgtttcggtcgttgtgttacgaggtttttcgggcgcgttcggttagggtcggtttttttaatcgtttttttatcgttttttttaatttagggttttggttgaagcggagtagttacgaggagtagtcgatcgtgcgtttttaatattaggtgttgttcgtggttttgttcggattcgaaagcgacgggtttttcgtttggagtacgtttttcgtttttaatcggttgtaaggggatcgtttgcgcgtttcgttcgtttcggtg

SEQ ID NO: 35376 - DNA, 686 bp, Artificial Sequence
  chemically treated genomic DNA (Homo sapiens) CpG-island No: 35376
caccgaaacgaacgaaacgcgcaaacgatccccttacaaccgattaaaaacgaaaaacgtactccaaacgaaaaacccgtcgctttcgaatccgaacaaaaccacgaacaacacctaatattaaaaacgcacgatcgactactcctcgtaactactccgcttcaaccaaaaccctaaattaaaaaaaacgataaaaaaacgattaaaaaaaccgaccctaaccgaacgcgcccgaaaaacctcgtaacacaacgaccgaaacaaactcaccgtaactccgaaaaaccaccaacaacgacgaaatatacgtaaacgcaacgaccaacaacaaaaacaacgcgactttaaaacaaaaccccgcgcgataactacgctcgaccgaataaaaaaaaaactcataaaacgccataaacaccgctcgcaaacactccgcgaaccgaaaaaccaaatttaacttctcctaattaccatcgcctcgatctccacgacaaccgacgactcacaaaaaaaaaccaataacaaaaccgcaccgaaaaaaaccaataacgaaaacgaaattaacgaacgtaacgctaccgaaaacgatcgacctaacttttcgaactatatacgtttacgtaaaaactaaacgacgataaaacgtttccgtaaaccaaaatcgtaactattatctatattaacattta

SEQ ID NO: 35377 - DNA, 1104 bp, Artificial Sequence
  chemically treated genomic DNA (Homo sapiens) CpG-island No: 35377
gcgtgagcgagtttttttttatcgttttttataaggcgttatcggtgacggagttgggcgagcgggtatttttttttacgtaggtaaggatggttacgtcgttcgtattcgtgaaggcgattcgttcggcgtgtcgttgcggtttcggtttcgcggcgttttcggttagggtttcgggttttgttttcgagtcggtgttcgtcgtcgaggcggggtttagtcgataggtttttagttttagtttttcgttgcgttttacgtagtttaggatgtattgcgtggagatgaaattattcgaggtttcggttagcgttttttcgggttgggttagtagtacggtttcgggtttttgtattcggtatacggtgtcgtcgtcgtgtaggatgagcgtcgatagtcgacgtttggtcgggttgggtcgtacgtagaaggatatggagttgtcgtcgttttttacgaatagagtcgaggaatgggtgggttcgttggggtttttgtttaaatttatcgttttcgttatgtttgacgtcgagtattattagaagagttattttttcgcgagcgtttggtatatagagtttaattgattgagttgttatcgtagacgtttttgtcgcgaagcgtagtattgggtttgcgtagtagtagtcgcggcgtatcgagagtgttcgttttttttttttcggaagaggtggggtttcgtattttgatttggaaattaacgtattattttttttatttttgggtcgggtttttcgggaagatggcggtcgtgtaggcggtcgaggtgaaagtggatggtagcgagtcgaaattgagtaagaagtgagtgtcgttgcgagtttttaaagtttttgcggtaggagagtttgggttgggaagcgtcgcgaggtttttattaaggttgttgtgtcggggtttttttgtcggttttcgtgggtacgtatatgttgagacgtggtggttgcgttttgtagattacgtatttcgggatatttcgggtacgttcggtttttcgtttttagttggtatcggcgggatgttttttattatatttttagagttaagagattgtggaggaggaattaggacgagaattaagag

SEQ ID NO: 35378 - DNA, 1104 bp, Artificial Sequence
  chemically treated genomic DNA (Homo sapiens) CpG-island No: 35378
ctcttaattctcgtcctaattcctcctccacaatctcttaactctaaaaatataataaaaaacatcccgccgataccaactaaaaacgaaaaaccgaacgtacccgaaatatcccgaaatacgtaatctacaaaacgcaaccaccacgtctcaacatatacgtacccacgaaaaccgacaaaaaaaccccgacacaacaaccttaataaaaacctcgcgacgcttcccaacccaaactctcctaccgcaaaaactttaaaaactcgcaacgacactcacttcttactcaatttcgactcgctaccatccactttcacctcgaccgcctacacgaccgccatcttcccgaaaaacccgacccaaaaataaaaaaaataatacgttaatttccaaatcaaaatacgaaaccccacctcttccgaaaaaaaaaaaacgaacactctcgatacgccgcgactactactacgcaaacccaatactacgcttcgcgacaaaaacgtctacgataacaactcaatcaattaaactctatataccaaacgctcgcgaaaaaataactcttctaataatactcgacgtcaaacataacgaaaacgataaatttaaacaaaaaccccaacgaacccacccattcctcgactctattcgtaaaaaacgacgacaactccatatccttctacgtacgacccaacccgaccaaacgtcgactatcgacgctcatcctacacgacgacgacaccgtataccgaatacaaaaacccgaaaccgtactactaacccaacccgaaaaaacgctaaccgaaacctcgaataatttcatctccacgcaatacatcctaaactacgtaaaacgcaacgaaaaactaaaactaaaaacctatcgactaaaccccgcctcgacgacgaacaccgactcgaaaacaaaacccgaaaccctaaccgaaaacgccgcgaaaccgaaaccgcaacgacacgccgaacgaatcgccttcacgaatacgaacgacgtaaccatccttacctacgtaaaaaaaaatacccgctcgcccaactccgtcaccgataacgccttataaaaaacgataaaaaaaaactcgctcacgc

SEQ ID NO: 35379 - DNA, 1104 bp, Artificial Sequence
  chemically treated genomic DNA (Homo sapiens) CpG-island No: 35379
tttttagttttcgttttagttttttttttatagttttttaattttaggagtatgatagggagtatttcgtcggtgttagttgggaacggggagtcgggcgtgttcggggtatttcggggtacgtggtttgtagggcgtagttattacgttttagtatgtgcgtatttacgagagtcggtaagaaggtttcggtatagtagttttggtgggaatttcgcggcgttttttagtttagatttttttatcgtaaaggttttaaagattcgtagcgatatttattttttgtttagtttcggttcgttgttatttatttttatttcggtcgtttgtacggtcgttattttttcggagggttcgatttaaaagtaaggaggatagtacgttaatttttaggttaaggtgcgaagttttatttttttcgggggagagggggcgggtattttcgatgcgtcgcggttgttgttgcgtaggtttagtgttgcgtttcgcggtagaggcgtttgcggtgatagtttagttagttgagttttgtgtgttaggcgttcgcgagggggtagtttttttagtagtgttcggcgttagatatggcggaggcgatggatttgggtaaagattttaacgggtttatttatttttcgattttgttcgtgagggacgacggtagttttatgtttttttacgtgcggtttagttcggttaagcgtcggttgtcgacgtttattttgtacggcggcggtatcgtgtgtcgagtgtaggagttcggggtcgtgttgttggtttagttcggggaggcgttggtcgaggtttcgggtgattttatttttacgtagtatattttggattgcgtggagcgtaacgagaggttggagttggaggtttatcggttgggtttcgtttcggcggcggatatcggttcggaagtaaagttcggggttttggtcgagggcgtcgcggagtcggagtcgtagcggtacgtcgggcggatcgtttttacggatgcggacgacgtagttatttttatttacgtgaaggaaaatgttcgttcgtttagtttcgttatcggtaacgttttgtggaaagcgatggagaagagttcgtttacgt

SEQ ID NO: 35380 - DNA, 1104 bp, Artificial Sequence
  chemically treated genomic DNA (Homo sapiens) CpG-island No: 35380
acgtaaacgaactcttctccatcgctttccacaaaacgttaccgataacgaaactaaacgaacgaacattttccttcacgtaaataaaaataactacgtcgtccgcatccgtaaaaacgatccgcccgacgtaccgctacgactccgactccgcgacgccctcgaccaaaaccccgaactttacttccgaaccgatatccgccgccgaaacgaaacccaaccgataaacctccaactccaacctctcgttacgctccacgcaatccaaaatatactacgtaaaaataaaatcacccgaaacctcgaccaacgcctccccgaactaaaccaacaacacgaccccgaactcctacactcgacacacgataccgccgccgtacaaaataaacgtcgacaaccgacgcttaaccgaactaaaccgcacgtaaaaaaacataaaactaccgtcgtccctcacgaacaaaatcgaaaaataaataaacccgttaaaatctttacccaaatccatcgcctccgccatatctaacgccgaacactactaaaaaaactaccccctcgcgaacgcctaacacacaaaactcaactaactaaactatcaccgcaaacgcctctaccgcgaaacgcaacactaaacctacgcaacaacaaccgcgacgcatcgaaaatacccgccccctctcccccgaaaaaaataaaacttcgcaccttaacctaaaaattaacgtactatcctccttacttttaaatcgaaccctccgaaaaaataacgaccgtacaaacgaccgaaataaaaataaataacaacgaaccgaaactaaacaaaaaataaatatcgctacgaatctttaaaacctttacgataaaaaaatctaaactaaaaaacgccgcgaaattcccaccaaaactactataccgaaaccttcttaccgactctcgtaaatacgcacatactaaaacgtaataactacgccctacaaaccacgtaccccgaaataccccgaacacgcccgactccccgttcccaactaacaccgacgaaatactccctatcatactcctaaaattaaaaaactataaaaaaaaaactaaaacgaaaactaaaaa

SEQ ID NO: 35381 - DNA, 627 bp, Artificial Sequence
  chemically treated genomic DNA (Homo sapiens) CpG-island No: 35381
  unsure (121, 545..)
tacgatggttgcgttacggggttttggtttcgcgaattagttttatttatcgcggcgttgtttttggcgtttaagcgaggcggtaggttcgttaaagtagtagaatggggtagtcgacgantaagtcgcgggcgatgttgacgcgttgttgttcgttatcggaaaatgtcgatggtgttaggtgttataggcgtttcggtacgtttaggcgggtgagaagacgcgcggttttagcggcgtaggttttacgcggaacgtcggtatcgagtagcggttgtattattatttttagtgttgagatacgcgggatgacgcgtagaaattggtttatttagtcgacggtggttttgcggatttttattattttgcgcgttggcgcggtgattaggtttatttattcgttatcgtgtttgatttggatttgattttcgtcgggtagatagttggcgtatagcgagcgtagtagagttgatttgtcgttgtcggaatggtcgtggagtattacgtattcgttcgcgttgacggtgagcgaggcgcgattgagnngacgggtaaggtagtaacgtcgttttgttggtgtaggatgaaggttttattgacgttttgtacgttaattatttttcgttt

SEQ ID NO: 35382 - DNA, 627 bp, Artificial Sequence
  chemically treated genomic DNA (Homo sapiens) CpG-island No: 35382
  unsure (82..83, 507)
aaacgaaaaataattaacgtacaaaacgtcaataaaaccttcatcctacaccaacaaaacgacgttactaccttacccgtcnnctcaatcgcgcctcgctcaccgtcaacgcgaacgaatacgtaatactccacgaccattccgacaacgacaaatcaactctactacgctcgctatacgccaactatctacccgacgaaaatcaaatccaaatcaaacacgataacgaataaataaacctaatcaccgcgccaacgcgcaaaataataaaaatccgcaaaaccaccgtcgactaaataaaccaatttctacgcgtcatcccgcgtatctcaacactaaaaataataatacaaccgctactcgataccgacgttccgcgtaaaacctacgccgctaaaaccgcgcgtcttctcacccgcctaaacgtaccgaaacgcctataacacctaacaccatcgacattttccgataacgaacaacaacgcgtcaacatcgcccgcgacttantcgtcgactaccccattctactactttaacgaacctaccgcctcgcttaaacgccaaaaacaacgccgcgataaataaaactaattcgcgaaaccaaaaccccgtaacgcaaccatcgta

SEQ ID NO: 35383 - DNA, 627 bp, Artificial Sequence
  chemically treated genomic DNA (Homo sapiens) CpG-island No: 35383
  unsure (82..83, 507)
aggcgaaaaatgattaacgtataaaacgttagtaaaatttttattttgtattagtaaaacggcgttgttgttttgttcgttnntttaatcgcgtttcgtttatcgttaacgcgggcgaatgcgtggtgttttacggttatttcggtagcggtaaattaattttgttacgttcgttgtacgttaattatttgttcgacgaaggttaaatttagattaaatacggtgacgagtgggtagatttggttatcgcgttagcgcgtaaagtggtggaaattcgtaaaattatcgtcggttgggtgagttagtttttgcgcgttatttcgcgtattttagtattggaagtggtgatgtagtcgttgttcgatatcggcgtttcgcgtgaagtttgcgtcgttaaagtcgcgcgtttttttattcgtttgaacgtgtcggaacgtttgtggtatttggtattatcgatatttttcggtggcgaatagtagcgcgttaatatcgttcgcggtttantcgtcgattattttattttgttgttttgacgaatttatcgtttcgtttggacgttaaaaatagcgtcgcggtgggtggaattgattcgcgaagttaaaatttcgtggcgtagttatcgta

SEQ ID NO: 35384 - DNA, 627 bp, Artificial Sequence
  chemically treated genomic DNA (Homo sapiens) CpG-island No: 35384
  unsure (121, 545..)
tacgataactacgccacgaaattttaacttcgcgaatcaattccacccaccgcgacgctatttttaacgtccaaacgaaacgataaattcgtcaaaacaacaaaataaaataatcgacgantaaaccgcgaacgatattaacgcgctactattcgccaccgaaaaatatcgataataccaaataccacaaacgttccgacacgttcaaacgaataaaaaaacgcgcgactttaacgacgcaaacttcacgcgaaacgccgatatcgaacaacgactacatcaccacttccaatactaaaatacgcgaaataacgcgcaaaaactaactcacccaaccgacgataattttacgaatttccaccactttacgcgctaacgcgataaccaaatctacccactcgtcaccgtatttaatctaaatttaaccttcgtcgaacaaataattaacgtacaacgaacgtaacaaaattaatttaccgctaccgaaataaccgtaaaacaccacgcattcgcccgcgttaacgataaacgaaacgcgattaaannaacgaacaaaacaacaacgccgttttactaatacaaaataaaaattttactaacgttttatacgttaatcatttttcgcct

SEQ ID NO: 35385 - DNA, 578 bp, Artificial Sequence
  chemically treated genomic DNA (Homo sapiens) CpG-island No: 35385
tgtcggttgcgtggcgtggggtttcgtgggtgtggttttgttgttgtgtgttgtgtcgttttgcgagtcgtttttttttttcgtttggtttacgtcgtcgggtgattttttttgaacggtcgttggatggtcggttttgcggtttcgttgtttggcggcgtgtcgttttgttattcgcgggttttcggtggcgtcgcgatgcgcgtttcgttcggttgggttttttttttttcgtttttgttgtgttggagatttttgttcgcgggggcggggggtttcgtgtaggcgcgcgcggttcgcgtttgtcggtgtggcgggcgttatgttcgggtagtgtttttgggatttgtttatacgcgattcgtttgtatcgatttcggagaagttattcgttacgtcgcgattggagtagcgtcgcggtagtgcgattttggtgttttttttttcgcgtttagcgggcgtaggttataagttacgtcgggttgtgcgatgataatttttatgtttttcgggtttttgtttgggttttatcgtggtatttttagtttttttatttggcgtcgtgttgttttcggagt

SEQ ID NO: 35386 - DNA, 578 bp, Artificial Sequence
  chemically treated genomic DNA (Homo sapiens) CpG-island No: 35386
actccgaaaacaacacgacgccaaataaaaaaactaaaaataccacgataaaacccaaacaaaaacccgaaaaacataaaaattatcatcgcacaacccgacgtaacttataacctacgcccgctaaacgcgaaaaaaaaaacaccaaaatcgcactaccgcgacgctactccaatcgcgacgtaacgaataacttctccgaaatcgatacaaacgaatcgcgtataaacaaatcccaaaaacactacccgaacataacgcccgccacaccgacaaacgcgaaccgcgcgcgcctacacgaaaccccccgcccccgcgaacaaaaatctccaacacaacaaaaacgaaaaaaaaaaaacccaaccgaacgaaacgcgcatcgcgacgccaccgaaaacccgcgaataacaaaacgacacgccgccaaacaacgaaaccgcaaaaccgaccatccaacgaccgttcaaaaaaaatcacccgacgacgtaaaccaaacgaaaaaaaaaaacgactcgcaaaacgacacaacacacaacaacaaaaccacacccacgaaaccccacgccacgcaaccgaca

SEQ ID NO: 35387 - DNA, 578 bp, Artificial Sequence
  chemically treated genomic DNA (Homo sapiens) CpG-island No: 35387
gtttcgagggtaatacgacgttagatgaggagattaggggtattacggtggggtttagataaaggttcggaggatatgagaattattatcgtatagttcggcgtgatttataatttgcgttcgttagacgcggggaaaaggatattaaggtcgtattatcgcgacgttgttttagtcgcggcgtagcgggtgattttttcgaaatcgatataagcgggtcgcgtgtgggtaagttttagagatattgttcggatatgacgttcgttatatcggtagacgcgggtcgcgcgcgtttgtacggggtttttcgttttcgcgaatagagatttttaatatagtaggagcgaggagaagaaaatttaatcgagcgaggcgcgtatcgcgacgttatcgggggttcgcgagtagtaaagcgatacgtcgttaaataacgaagtcgtagagtcggttatttaacgatcgtttaagaagagttattcggcggcgtgaattagacgagagagaaagacgattcgtaaggcgatataatatatagtaataaaattatatttacgagattttacgttacgtagtcggta

SEQ ID NO: 35388 - DNA, 578 bp, Artificial Sequence
  chemically treated genomic DNA (Homo sapiens) CpG-island No: 35388
taccgactacgtaacgtaaaatctcgtaaatataattttattactatatattatatcgccttacgaatcgtctttctctctcgtctaattcacgccgccgaataactcttcttaaacgatcgttaaataaccgactctacgacttcgttatttaacgacgtatcgctttactactcgcgaacccccgataacgtcgcgatacgcgcctcgctcgattaaattttcttctcctcgctcctactatattaaaaatctctattcgcgaaaacgaaaaaccccgtacaaacgcgcgcgacccgcgtctaccgatataacgaacgtcatatccgaacaatatctctaaaacttacccacacgcgacccgcttatatcgatttcgaaaaaatcacccgctacgccgcgactaaaacaacgtcgcgataatacgaccttaatatccttttccccgcgtctaacgaacgcaaattataaatcacgccgaactatacgataataattctcatatcctccgaacctttatctaaaccccaccgtaatacccctaatctcctcatctaacgtcgtattaccctcgaaac

SEQ ID NO: 35389 - DNA, 569 bp, Artificial Sequence
  chemically treated genomic DNA (Homo sapiens) CpG-island No: 35389
gcggtttcggagcgttgagatcggagtcgcggtcgcgggatttcgagtttgatttaattggagtcgggagacgcgagttagagcggggtgggtatagcgtcggaggtttcgagcgttagggcgcgtaagtttaataagggaggggattcgatagtcgtggcggttttttaacggttcgttaagtttttttgttcggtcggggtttttatcgtttcgggattcggttcggttcgcgatttataacgattttcgggtcgtttttttttttttcgtttttttttttttttttcgtttcgatcgggtcggtatttattgagggaaggaggagcggtttaggtttgcgcgtatttacgtcgacgtatatcgttatcgcgtcgagtttcggttgacgcggacgtttttcgggcgtcgattagtaagggaacgggttacgtttttatttatattttttagtggatgggcggggtcgagcgcggggatttggcgtttacgaagggcgagggtttgttttttgagaagaaatcgggtagcggtgggtttgggttattgtagagtttggtagggttaga

SEQ ID NO: 35390 - DNA, 569 bp, Artificial Sequence
  chemically treated genomic DNA (Homo sapiens) CpG-island No: 35390
tctaaccctaccaaactctacaataacccaaacccaccgctacccgatttcttctcaaaaaacaaaccctcgcccttcgtaaacgccaaatccccgcgctcgaccccgcccatccactaaaaaatataaataaaaacgtaacccgttcccttactaatcgacgcccgaaaaacgtccgcgtcaaccgaaactcgacgcgataacgatatacgtcgacgtaaatacgcgcaaacctaaaccgctcctccttccctcaataaataccgacccgatcgaaacgaaaaaaaaaaaaaaaaacgaaaaaaaaaaaaacgacccgaaaatcgttataaatcgcgaaccgaaccgaatcccgaaacgataaaaaccccgaccgaacaaaaaaacttaacgaaccgttaaaaaaccgccacgactatcgaatcccctcccttattaaacttacgcgccctaacgctcgaaacctccgacgctatacccaccccgctctaactcgcgtctcccgactccaattaaatcaaactcgaaatcccgcgaccgcgactccgatctcaacgctccgaaaccgc

SEQ ID NO: 35391 - DNA, 569 bp, Artificial Sequence
  chemically treated genomic DNA (Homo sapiens) CpG-island No: 35391
tttggttttgttaggttttgtagtagtttaagtttatcgttgttcggtttttttttagagagtaagttttcgtttttcgtgagcgttaaattttcgcgttcggtttcgtttatttattgaggggtgtgggtaggggcgtggttcgtttttttgttggtcggcgttcggaaggcgttcgcgttagtcggagttcgacgcggtgacggtgtgcgtcgacgtaagtacgcgtaagtttgggtcgttttttttttttttagtgagtgtcggttcggtcggggcgggggagaagagggagggcgggggagggagaggcgattcgagagtcgttgtgggtcgcgggtcggatcgggtttcggggcggtgggagtttcggtcgggtagaagggtttggcgggtcgttagaggatcgttacggttgtcgagtttttttttttgttggatttgcgcgttttggcgttcggaattttcggcgttgtgtttatttcgttttagttcgcgtttttcgattttaattaggttaggttcggagtttcgcggtcgcggtttcggttttaacgtttcggggtcgt

SEQ ID NO: 35392 - DNA, 569 bp, Artificial Sequence
  chemically treated genomic DNA (Homo sapiens) CpG-island No: 35392
acgaccccgaaacgttaaaaccgaaaccgcgaccgcgaaactccgaacctaacctaattaaaatcgaaaaacgcgaactaaaacgaaataaacacaacgccgaaaattccgaacgccaaaacgcgcaaatccaacaaaaaaaaaaactcgacaaccgtaacgatcctctaacgacccgccaaacccttctacccgaccgaaactcccaccgccccgaaacccgatccgacccgcgacccacaacgactctcgaatcgcctctccctcccccgccctccctcttctcccccgccccgaccgaaccgacactcactaaaaaaaaaaaaaacgacccaaacttacgcgtacttacgtcgacgcacaccgtcaccgcgtcgaactccgactaacgcgaacgccttccgaacgccgaccaacaaaaaaacgaaccacgcccctacccacacccctcaataaataaacgaaaccgaacgcgaaaatttaacgctcacgaaaaacgaaaacttactctctaaaaaaaaaccgaacaacgataaacttaaactactacaaaacctaacaaaaccaaa

SEQ ID NO: 35393 - DNA, 674 bp, Artificial Sequence
  chemically treated genomic DNA (Homo sapiens) CpG-island No: 35393
ggtttcgtatttttttttttttattcgaggtcggggttttaaagtcggtgttacggtggtagtatttagcgttttgttggttttttcgttagtagcgtcgagcggggggttttttgttatagtatttgttgtatcgaatttttcggtcgtagaatttttttttttcgagggtcgatattttttgcgtgataatatcgttggtttcgttaaaatggatgttgtttttgggaattttttcggttggcgttatttttagggttttagtatcgttatttcgttaagtcgagtttttttggtcgcggtatattttgtttttcggtgtttttattttttcggtggcggtagcgttttggtagtcgatttgagggatttggaatcgtagttagttgcgtagagtttggggttttcgggcgacgtcggcgttgggcgggggagttcgtcgttttttcgagttagaggtagaggagttgcgcggacgtcgtttttttatagcgtcgcgagcgtcgacgtacgggtttttgttcggttttttgaatttagtttttcggcggcgtcgttggcgtttttatcgtaggtttttgcggtttcgttcgtcgttggttttttggttttagtaagtttcgatttcgcggtgttcgttatttttattttttgtttaaataattagttaaaat

SEQ ID NO: 35394 - DNA, 674 bp, Artificial Sequence
  chemically treated genomic DNA (Homo sapiens) CpG-island No: 35394
attttaactaattatttaaacaaaaaataaaaataacgaacaccgcgaaatcgaaacttactaaaaccaaaaaaccaacgacgaacgaaaccgcaaaaacctacgataaaaacgccaacgacgccgccgaaaaactaaattcaaaaaaccgaacaaaaacccgtacgtcgacgctcgcgacgctataaaaaaacgacgtccgcgcaactcctctacctctaactcgaaaaaacgacgaactcccccgcccaacgccgacgtcgcccgaaaaccccaaactctacgcaactaactacgattccaaatccctcaaatcgactaccaaaacgctaccgccaccgaaaaaataaaaacaccgaaaaacaaaatataccgcgaccaaaaaaactcgacttaacgaaataacgatactaaaaccctaaaaataacgccaaccgaaaaaattcccaaaaacaacatccattttaacgaaaccaacgatattatcacgcaaaaaatatcgaccctcgaaaaaaaaaaattctacgaccgaaaaattcgatacaacaaatactataacaaaaaaccccccgctcgacgctactaacgaaaaaaccaacaaaacgctaaatactaccaccgtaacaccgactttaaaaccccgacctcgaataaaaaaaaaaaaatacgaaacc

SEQ ID NO: 35395 - DNA, 674 bp, Artificial Sequence
  chemically treated genomic DNA (Homo sapiens) CpG-island No: 35395
attttggttagttatttggataagaggtagaaatagcgggtatcgcgaaatcgaaatttgttaggattaagaagttaacgacgggcgaaatcgtaggggtttgcgatagagacgttagcggcgtcgtcgggggattgggtttaggaggtcgagtaggaattcgtgcgtcggcgttcgcggcgttgtgaagagacggcgttcgcgtagtttttttgtttttggttcggaggagcggcgggttttttcgtttagcgtcggcgtcgttcgggaattttagattttgcgtaattggttgcgattttaaattttttagatcggttattagagcgttgtcgttatcgagaaaatggaggtatcgaggaataagatgtgtcgcgattaagagaattcggtttggcgaaatggcggtgttgggattttaagagtgacgttagtcggaggagtttttaaggataatatttattttggcggaattaacggtgttgttacgtagaaaatgtcgattttcggaaaagagaggttttgcgatcgagaaattcggtgtaataagtgttgtgatagaaaatttttcgttcggcgttgttggcgaaagagttaataaaacgttgggtgttgttatcgtgatatcgattttaggatttcggtttcggatggagaaaggagggtacggagtt

SEQ ID NO: 35396 - DNA, 674 bp, Artificial Sequence
  chemically treated genomic DNA (Homo sapiens) CpG-island No: 35396
aactccgtaccctcctttctccatccgaaaccgaaatcctaaaatcgatatcacgataacaacacccaacgttttattaactctttcgccaacaacgccgaacgaaaaattttctatcacaacacttattacaccgaatttctcgatcgcaaaacctctcttttccgaaaatcgacattttctacgtaacaacaccgttaattccgccaaaataaatattatccttaaaaactcctccgactaacgtcactcttaaaatcccaacaccgccatttcgccaaaccgaattctcttaatcgcgacacatcttattcctcgatacctccattttctcgataacgacaacgctctaataaccgatctaaaaaatttaaaatcgcaaccaattacgcaaaatctaaaattcccgaacgacgccgacgctaaacgaaaaaacccgccgctcctccgaaccaaaaacaaaaaaactacgcgaacgccgtctcttcacaacgccgcgaacgccgacgcacgaattcctactcgacctcctaaacccaatcccccgacgacgccgctaacgtctctatcgcaaacccctacgatttcgcccgtcgttaacttcttaatcctaacaaatttcgatttcgcgatacccgctatttctacctcttatccaaataactaaccaaaat

SEQ ID NO: 35397 - DNA, 558 bp, Artificial Sequence
  chemically treated genomic DNA (Homo sapiens) CpG-island No: 35397
gtcgtcgtcgttgtttcgggtaagtttatggtcgagtttttgttttgggttgatttcgttcgttttcgtttttgtcgttaacgttttcgtttttcgggtcgtacgtcgtcgttacgttcgtaaatttgagatgcgttatcgcgttaagtgggcggaggtgggaaggggcgggggaggacgcggagggtagtttaaaacgggggagtttaattataggtttacgttcggtacgtaggcgtagggattttttcggggttcgggggcgggtttaattttcgggttcgggggcgggtttaatttttagtttcgtttttgatttcgtttttttcgtgtcgttttatttttcgaggaaaagatttggtggttaagttagcggatttaattcgcgattattagcgatttattggttgcgtttttgtttagcgtttatattgcgttggtagagattgtcgggtgtattttgaggacgaggcgtggtttaggatgtgtcggggagttgttttgtattttttttttgttgtgtatttcgaattttttttagggtgggaaaggatattt

SEQ ID NO: 35398 - DNA, 558 bp, Artificial Sequence
  chemically treated genomic DNA (Homo sapiens) CpG-island No: 35398
aaatatcctttcccaccctaaaaaaaattcgaaatacacaacaaaaaaaaaatacaaaacaactccccgacacatcctaaaccacgcctcgtcctcaaaatacacccgacaatctctaccaacgcaatataaacgctaaacaaaaacgcaaccaataaatcgctaataatcgcgaattaaatccgctaacttaaccaccaaatcttttcctcgaaaaataaaacgacacgaaaaaaacgaaatcaaaaacgaaactaaaaattaaacccgcccccgaacccgaaaattaaacccgcccccgaaccccgaaaaaatccctacgcctacgtaccgaacgtaaacctataattaaactcccccgttttaaactaccctccgcgtcctcccccgccccttcccacctccgcccacttaacgcgataacgcatctcaaatttacgaacgtaacgacgacgtacgacccgaaaaacgaaaacgttaacgacaaaaacgaaaacgaacgaaatcaacccaaaacaaaaactcgaccataaacttacccgaaacaacgacgacgac

SEQ ID NO: 35399 - DNA, 558 bp, Artificial Sequence
  chemically treated genomic DNA (Homo sapiens) CpG-island No: 35399
aggtgtttttttttattttaaagaaaattcgagatgtatagtaagaaaaaaatgtaagatagtttttcgatatattttgagttacgtttcgtttttagggtgtattcgatagtttttgttagcgtagtgtggacgttggataaagacgtagttagtaggtcgttggtggtcgcgggttggattcgttgatttggttattaaatttttttttcggggagtgaagcggtacggaaggagcggagttaagggcggggttggggattggattcgttttcgggttcggggattggattcgttttcgggtttcggaggagtttttgcgtttgcgtgtcgggcgtggatttgtggttggattttttcgttttgggttgtttttcgcgttttttttcgtttttttttattttcgtttatttgacgcgatgacgtattttaggtttgcggacgtggcggcggcgtacggttcggaaggcggagacgttggcggtagaggcggaggcggacggggttagtttaaagtagaggttcggttatgaatttattcgggatagcggcggcggt

SEQ ID NO: 35400 - DNA, 558 bp, Artificial Sequence
  chemically treated genomic DNA (Homo sapiens) CpG-island No: 35400
accgccgccgctatcccgaataaattcataaccgaacctctactttaaactaaccccgtccgcctccgcctctaccgccaacgtctccgccttccgaaccgtacgccgccgccacgtccgcaaacctaaaatacgtcatcgcgtcaaataaacgaaaataaaaaaaaacgaaaaaaaacgcgaaaaacaacccaaaacgaaaaaatccaaccacaaatccacgcccgacacgcaaacgcaaaaactcctccgaaacccgaaaacgaatccaatccccgaacccgaaaacgaatccaatccccaaccccgcccttaactccgctccttccgtaccgcttcactccccgaaaaaaaaatttaataaccaaatcaacgaatccaacccgcgaccaccaacgacctactaactacgtctttatccaacgtccacactacgctaacaaaaactatcgaatacaccctaaaaacgaaacgtaactcaaaatatatcgaaaaactatcttacatttttttcttactatacatctcgaattttctttaaaataaaaaaaaacacct

SEQ ID NO: 35401 - DNA, 722 bp, Artificial Sequence
  chemically treated genomic DNA (Homo sapiens) CpG-island No: 35401
  unsure (360, 670, 699, 705, 710)
cgaaatagggttcgttttatttcggtcggggagcgcgggattttcgtggttatttagcgttatcgttcgcgggttcgttttgcgtaggcgcggcgttttcgtttattagatttcgggtcgggcgtcgcgtggtgcgtaggcgtaatgttttttattagtttttcgttttgatttcgtcggggggcgtaggcgtagtttgcgtaaggattggcgggattgttcggcggcgattttagacgtgtcgggggttcggagtttgtcgcggttgttaagcgtttagcgttttggggttggtcgttggtttaaggcggtgaggtttttgttcgggaatcgggcgaaggaagcgggggggcgagtcgncggagagatcggagacggttattagcgggtttaagtcggacgggacggtcgggtttttcgcgtttttttgttcgaggatatcggagagaggtggttgggaagagatttttggtcgggtgtaaagggggaagtcgtcgagaatggtattttggggtcgttggaggagtttcggatttttatgcgggttaggtcgcggttttcgggtagaaatagcgcgaattttcgtcggtttttgttttgggcggtttttttttcgtttcgttattagattcgggattttttgagtgttttcgagagattttcggtaggntttgaaggtacgtcgtttttcgttttttncgtcgngcggnggcgcgatttcg

SEQ ID NO: 35402 - DNA, 722 bp, Artificial Sequence
  chemically treated genomic DNA (Homo sapiens) CpG-island No: 35402
  unsure (13, 18, 24, 53, 363)
cgaaatcgcgccnccgcncgacgnaaaaaacgaaaaacgacgtaccttcaaancctaccgaaaatctctcgaaaacactcaaaaaatcccgaatctaataacgaaacgaaaaaaaaaccgcccaaaacaaaaaccgacgaaaattcgcgctatttctacccgaaaaccgcgacctaacccgcataaaaatccgaaactcctccaacgaccccaaaataccattctcgacgacttccccctttacacccgaccaaaaatctcttcccaaccacctctctccgatatcctcgaacaaaaaaacgcgaaaaacccgaccgtcccgtccgacttaaacccgctaataaccgtctccgatctctccgncgactcgcccccccgcttccttcgcccgattcccgaacaaaaacctcaccgccttaaaccaacgaccaaccccaaaacgctaaacgcttaacaaccgcgacaaactccgaacccccgacacgtctaaaatcgccgccgaacaatcccgccaatccttacgcaaactacgcctacgccccccgacgaaatcaaaacgaaaaactaataaaaaacattacgcctacgcaccacgcgacgcccgacccgaaatctaataaacgaaaacgccgcgcctacgcaaaacgaacccgcgaacgataacgctaaataaccacgaaaatcccgcgctccccgaccgaaataaaacgaaccctatttcg

SEQ ID NO: 35403 - DNA, 722 bp, Artificial Sequence
  chemically treated genomic DNA (Homo sapiens) CpG-island No: 35403
  unsure (13, 18, 24, 53, 363)
cgaggtcgcgttntcgtncggcgnaaaaggcgggaggcggcgtatttttagantttgtcgaaggtttttcggagatatttaagaggtttcggatttaatagcggggcgaaggggagatcgtttaaagtaagagtcggcgggggttcgcgttatttttattcgggaatcgcggtttaattcgtataagggttcgaagtttttttagcggttttagagtattattttcggcggtttttttttttgtattcggttaagagtttttttttagttattttttttcgatattttcgggtaagagagcgcgggagattcggtcgtttcgttcggtttggattcgttggtggtcgttttcggttttttcgncggttcgttttttcgtttttttcgttcggttttcgggtagagattttatcgttttgggttagcggttagttttagggcgttgagcgtttggtaatcgcgataggtttcggattttcgatacgtttgaggtcgtcgtcgggtagtttcgttagtttttgcgtagattgcgtttgcgtttttcggcgaggttaagacgaggagttagtgggggatattgcgtttgcgtattacgcgacgttcggttcggggtttaatgggcggggacgtcgcgtttgcgtaaagcggattcgcggacggtggcgttgggtggttacggaggtttcgcgtttttcgatcgagatagggcgggttttatttcg

SEQ ID NO: 35404 - DNA, 722 bp, Artificial Sequence
  chemically treated genomic DNA (Homo sapiens) CpG-island No: 35404
  unsure (360, 670, 699, 705, 710)
cgaaataaaacccgccctatctcgatcgaaaaacgcgaaacctccgtaaccacccaacgccaccgtccgcgaatccgctttacgcaaacgcgacgtccccgcccattaaaccccgaaccgaacgtcgcgtaatacgcaaacgcaatatcccccactaactcctcgtcttaacctcgccgaaaaacgcaaacgcaatctacgcaaaaactaacgaaactacccgacgacgacctcaaacgtatcgaaaatccgaaacctatcgcgattaccaaacgctcaacgccctaaaactaaccgctaacccaaaacgataaaatctctacccgaaaaccgaacgaaaaaaacgaaaaaacgaaccgncgaaaaaaccgaaaacgaccaccaacgaatccaaaccgaacgaaacgaccgaatctcccgcgctctcttacccgaaaatatcgaaaaaaaataactaaaaaaaaactcttaaccgaatacaaaaaaaaaaaccgccgaaaataatactctaaaaccgctaaaaaaacttcgaacccttatacgaattaaaccgcgattcccgaataaaaataacgcgaacccccgccgactcttactttaaacgatctccccttcgccccgctattaaatccgaaacctcttaaatatctccgaaaaaccttcgacaaantctaaaaatacgccgcctcccgccttttncgccgnacganaacgcgacctcg

SEQ ID NO: 35405 - DNA, 544 bp, Artificial Sequence
  chemically treated genomic DNA (Homo sapiens) CpG-island No: 35405
atagcgcgtagttcggcgttcgtacgtacggtgttgagcgttttatttcgtaggatgtaggttttttcggtcgtttgtcgttttatggtagcgtggtgtaggttgtagtaggttttcgaggtcgagtagttagtacggtcggtagtggggtgttcgtcgtcgttcggttcgggttagagcgtttgttagaggaggtatagggcgaacgtcggttttattttttgaggtttcgtacgtagagttgtttttaatttggatttgtttcgttcgaggacgtagagttgtgtttggagcgcggttatcgttttttatagttggtttttttaattcggtttttttttttttttttttcgttttcgttttcgacggattttttaattgttaagaattttttcgcgggtttagcggttaatagttttttttaggtcgcgataggaaatgtgtgcggagcgttgttaggttcggtgtagttttgagttattttggggttaggaatatagttggcgtcgggtataggggacgtagtcgattagaaggttaaata

SEQ ID NO: 35406 - DNA, 544 bp, Artificial Sequence
  chemically treated genomic DNA (Homo sapiens) CpG-island No: 35406
tatttaaccttctaatcgactacgtcccctatacccgacgccaactatattcctaaccccaaaataactcaaaactacaccgaacctaacaacgctccgcacacatttcctatcgcgacctaaaaaaaactattaaccgctaaacccgcgaaaaaattcttaacaattaaaaaatccgtcgaaaacgaaaacgaaaaaaaaaaaaaaaaaaaccgaattaaaaaaaccaactataaaaaacgataaccgcgctccaaacacaactctacgtcctcgaacgaaacaaatccaaattaaaaacaactctacgtacgaaacctcaaaaaataaaaccgacgttcgccctatacctcctctaacaaacgctctaacccgaaccgaacgacgacgaacaccccactaccgaccgtactaactactcgacctcgaaaacctactacaacctacaccacgctaccataaaacgacaaacgaccgaaaaaacctacatcctacgaaataaaacgctcaacaccgtacgtacgaacgccgaactacgcgctat

SEQ ID NO: 35407 - DNA, 544 bp, Artificial Sequence
  chemically treated genomic DNA (Homo sapiens) CpG-island No: 35407
tgtttgattttttagtcgattgcgttttttgtattcggcgttagttgtgtttttgattttagaataatttagggttgtatcgggtttggtagcgtttcgtatatattttttgtcgcggtttaagggaaattgttggtcgttgggttcgcggggggatttttggtagttggggggttcgtcgggagcgagggcggaggggaagggagggggaatcgggttggggaagttagttgtagagggcggtgatcgcgttttagatatagttttgcgttttcgagcgggatagatttaagttgggagtagttttgcgtgcggggttttagagaatgaggtcggcgttcgttttgtgttttttttggtaggcgttttggttcgggtcgggcggcggcgaatattttattgtcgatcgtgttggttgttcggtttcgggggtttgttatagtttgtattacgttattatgaagcggtaggcggtcgaggaggtttgtattttgcgaggtggggcgtttagtatcgtgcgtgcgggcgtcgagttgcgcgttgt

SEQ ID NO: 35408 - DNA, 544 bp, Artificial Sequence
  chemically treated genomic DNA (Homo sapiens) CpG-island No: 35408
acaacgcgcaactcgacgcccgcacgcacgatactaaacgccccacctcgcaaaatacaaacctcctcgaccgcctaccgcttcataataacgtaatacaaactataacaaacccccgaaaccgaacaaccaacacgatcgacaataaaatattcgccgccgcccgacccgaaccaaaacgcctaccaaaaaaaacacaaaacgaacgccgacctcattctctaaaaccccgcacgcaaaactactcccaacttaaatctatcccgctcgaaaacgcaaaactatatctaaaacgcgatcaccgccctctacaactaacttccccaacccgattccccctcccttcccctccgccctcgctcccgacgaaccccccaactaccaaaaatccccccgcgaacccaacgaccaacaatttcccttaaaccgcgacaaaaaatatatacgaaacgctaccaaacccgatacaaccctaaattattctaaaatcaaaaacacaactaacgccgaatacaaaaaacgcaatcgactaaaaaatcaaaca

SEQ ID NO: 35409 - DNA, 562 bp, Artificial Sequence
  chemically treated genomic DNA (Homo sapiens) CpG-island No: 35409
  unsure (11, 94, 98, 130, 132)
aagtaaagcgnttaaaatagcgtttttttgtcggtcgcgaaggcgtggcggtcgcggatcggcggatttcgggttatattagttgttcgggtgncgantagtagggattttacgatcgcgggtgtcgggnancgttttattgaggagttttatcgagattttcggtttggttaggcggggggttttttttttagttcgcggaacgtaggttcgggagacggcggggtttattgtgttttcggatttatattttgttcgggggtcggatttttgtaaagcgtttatttggaaagaagttttatttgtagggaaggcgggtgtacgtaatgatggttcgtgtgttcgggatgtgaatgttaattaagattgcgttcgttggtggagtgtgcgcgggtttttcgtgaggtgtttttggtagttatagtttacgagttagcgagaagatggttgggaggcggcgagtttcgttattcgggcgacgtatttcgaattttataggtatgggtgagttggttagtattggattcgagtgtttgtttttatttgagtatagatatttggt

SEQ ID NO: 35410 - DNA, 562 bp, Artificial Sequence
  chemically treated genomic DNA (Homo sapiens) CpG-island No: 35410
  unsure (431, 433, 465, 469, 552)
accaaatatctatactcaaataaaaacaaacactcgaatccaatactaaccaactcacccatacctataaaattcgaaatacgtcgcccgaataacgaaactcgccgcctcccaaccatcttctcgctaactcgtaaactataactaccaaaaacacctcacgaaaaacccgcgcacactccaccaacgaacgcaatcttaattaacattcacatcccgaacacacgaaccatcattacgtacacccgccttccctacaaataaaacttctttccaaataaacgctttacaaaaatccgacccccgaacaaaatataaatccgaaaacacaataaaccccgccgtctcccgaacctacgttccgcgaactaaaaaaaaaaccccccgcctaaccaaaccgaaaatctcgataaaactcctcaataaaacgntncccgacacccgcgatcgtaaaatccctactantcgncacccgaacaactaatataacccgaaatccgccgatccgcgaccgccacgccttcgcgaccgacaaaaaaacgctattttaancgctttactt

SEQ ID NO: 35411 - DNA, 562 bp, Artificial Sequence
  chemically treated genomic DNA (Homo sapiens) CpG-island No: 35411
  unsure (431, 433, 465, 469, 552)
attaggtgtttgtatttagataagaataagtattcgaatttaatgttaattaatttatttatatttatggagttcgaaatgcgtcgttcgggtagcggggttcgtcgttttttagttattttttcgttaattcgtgaattgtgattgttagaagtattttacggaggattcgcgtatattttattaacggacgtagttttggttggtatttatatttcggatatacggattattattgcgtatattcgttttttttgtaagtgaaatttttttttaagtggacgttttgtagaaattcggttttcgagtagagtgtaggttcgaaggtatagtgagtttcgtcgtttttcggatttgcgtttcgcggattgggaagaagatttttcgtttggttaggtcgaagatttcggtgaggttttttagtggagcgntnttcgatattcgcggtcgtggggtttttgttgntcgntattcggatagttggtatgattcggggttcgtcggttcgcggtcgttacgttttcgcggtcgataggggggcgttgttttgancgttttgttt

SEQ ID NO: 35412 - DNA, 562 bp, Artificial Sequence
  chemically treated genomic DNA (Homo sapiens) CpG-island No: 35412
  unsure (11, 94, 98, 130, 132)
aaacaaaacgntcaaaacaacgcccccctatcgaccgcgaaaacgtaacgaccgcgaaccgacgaaccccgaatcataccaactatccgaatancgancaacaaaaaccccacgaccgcgaatatcgaanancgctccactaaaaaacctcaccgaaatcttcgacctaaccaaacgaaaaatcttcttcccaatccgcgaaacgcaaatccgaaaaacgacgaaactcactataccttcgaacctacactctactcgaaaaccgaatttctacaaaacgtccacttaaaaaaaaatttcacttacaaaaaaaacgaatatacgcaataataatccgtatatccgaaatataaataccaaccaaaactacgtccgttaataaaatatacgcgaatcctccgtaaaatacttctaacaatcacaattcacgaattaacgaaaaaataactaaaaaacgacgaaccccgctacccgaacgacgcatttcgaactccataaatataaataaattaattaacattaaattcgaatacttattcttatctaaatacaaacacctaat

SEQ ID NO: 35413 - DNA, 613 bp, Artificial Sequence
  chemically treated genomic DNA (Homo sapiens) CpG-island No: 35413
ggttggggtcggttaagtcgaatatcggttatacgtaagcggcggcgggtgtggttggtgtgattaagatggtgatggcgatgcggtacgggtagttgttacgtacgttgtacgtggaatcgtcgtttttttggaggtggattggtcggcggggacggtttaattttttacggagaatacgttttggtttaggagtggtcgtgttcgtcgggtgggggtgtcgtcgttcgggattagtggtattaacgcgtacgttattttcgaatagttttcgggagtgtcgagttagtttgcggggtcgggttcgggttttgtcgtggatgtttcggtggtgtcgtggatggtgtcgggtaaaatattcgaagcgttattcgcgtaggtaacggcgttgatgatttatttggacgagcgatttgatgttttttcgttggatgttgggtattcgttggcgttgaatcggtcggcgttggatgagcgagcgggggtgttgggggtcgatcgtgagacgttgttgtgcggtgtgaaagcgttgtttgtcggttatgaggtttttgggttgtgatcgatttggggggttgggggtcgattgggtttgtgttttcggttagggtgg

SEQ ID NO: 35414 - DNA, 613 bp, Artificial Sequence
  chemically treated genomic DNA (Homo sapiens) CpG-island No: 35414
ccaccctaaccgaaaacacaaacccaatcgacccccaaccccccaaatcgatcacaacccaaaaacctcataaccgacaaacaacgctttcacaccgcacaacaacgtctcacgatcgacccccaacacccccgctcgctcatccaacgccgaccgattcaacgccaacgaatacccaacatccaacgaaaaaacatcaaatcgctcgtccaaataaatcatcaacgccgttacctacgcgaataacgcttcgaatattttacccgacaccatccacgacaccaccgaaacatccacgacaaaacccgaacccgaccccgcaaactaactcgacactcccgaaaactattcgaaaataacgtacgcgttaataccactaatcccgaacgacgacacccccacccgacgaacacgaccactcctaaaccaaaacgtattctccgtaaaaaattaaaccgtccccgccgaccaatccacctccaaaaaaacgacgattccacgtacaacgtacgtaacaactacccgtaccgcatcgccatcaccatcttaatcacaccaaccacacccgccgccgcttacgtataaccgatattcgacttaaccgaccccaacc

SEQ ID NO: 35415 - DNA, 613 bp, Artificial Sequence
  chemically treated genomic DNA (Homo sapiens) CpG-island No: 35415
ttattttggtcggaaatataaatttaatcggtttttagttttttagatcggttataatttaggagttttatgatcggtagatagcgtttttatatcgtataataacgttttacggtcgatttttagtattttcgttcgtttatttagcgtcgatcggtttaacgttagcgagtatttaatatttagcgaggagatattaggtcgttcgtttagataggttattaacgtcgttgtttgcgcggatagcgtttcgggtgttttgttcgatattatttacggtattatcggaatatttacgatagaattcgaattcggtttcgtagattgattcggtattttcgggggttgttcgaggatgacgtgcgcgttagtattattgatttcgaacgacgatatttttattcgacgaatacgattatttttgggttagggcgtgtttttcgtaaggagttgaatcgttttcgtcgattaatttatttttagaaagacggcgattttacgtgtaacgtgcgtggtagttgttcgtgtcgtatcgttattattattttgattatattagttatattcgtcgtcgtttgcgtatgatcgatgttcgatttgatcgattttaatt

SEQ ID NO: 35416 - DNA, 613 bp, Artificial Sequence
  chemically treated genomic DNA (Homo sapiens) CpG-island No: 35416
aattaaaatcgatcaaatcgaacatcgatcatacgcaaacgacgacgaatataactaatataatcaaaataataataacgatacgacacgaacaactaccacgcacgttacacgtaaaatcgccgtctttctaaaaataaattaatcgacgaaaacgattcaactccttacgaaaaacacgccctaacccaaaaataatcgtattcgtcgaataaaaatatcgtcgttcgaaatcaataatactaacgcgcacgtcatcctcgaacaacccccgaaaataccgaatcaatctacgaaaccgaattcgaattctatcgtaaatattccgataataccgtaaataatatcgaacaaaacacccgaaacgctatccgcgcaaacaacgacgttaataacctatctaaacgaacgacctaatatctcctcgctaaatattaaatactcgctaacgttaaaccgatcgacgctaaataaacgaacgaaaatactaaaaatcgaccgtaaaacgttattatacgatataaaaacgctatctaccgatcataaaactcctaaattataaccgatctaaaaaactaaaaaccgattaaatttatatttccgaccaaaataa

SEQ ID NO: 35417 - DNA, 740 bp, Artificial Sequence
  chemically treated genomic DNA (Homo sapiens) CpG-island No: 35417
tagtacgagtcgcggagcggtttaatttagagcgggtagttgcggacgagttggagaggaaggtgattataattagtgaattagtaatttttgtcgagttttaagtttcgatttagcggtataatgcgttgtgtcggcgtttcggggaaaggaaagaattttaaaggtattgagagcgtagggttaaaagaacgtttttaggttatttggagtttacggcggtgtatttaagcgtcgtagttgcggttgttttggtgtgggttgtttatcgtgcgtacgtttcgggcggcgcggtttttttaggcgcggtgttttatttcgggttcgggaagcgagtcgtttggttagtacgtgggttggggaaaagtttgtcgagatcggttgggagcgtttggtagttttggaattttagcggtcgtcgcggggttggcgacgttaggtaggagcgcggagcggcgggtgtagttattgggatgtttcgttttcgttcgcgagcgcggtttttaggtaaggggtgcgttcgtttatattttttgtttttttaattaattgtgtcgttttttgcgttttttttacggttattttatagttaagattttttttttttcgagttgtagaaggtagaacgttttcgggaggacgaagtgattcgaagggatgtggtaagcgtatttttcgatggagatgtagatcggttgaggtttgggatgtttttataagtaggtggtgttgtggtttaa

SEQ ID NO: 35418 - DNA, 740 bp, Artificial Sequence
  chemically treated genomic DNA (Homo sapiens) CpG-island No: 35418
ttaaaccacaacaccacctacttataaaaacatcccaaacctcaaccgatctacatctccatcgaaaaatacgcttaccacatcccttcgaatcacttcgtcctcccgaaaacgttctaccttctacaactcgaaaaaaaaaaaatcttaactataaaataaccgtaaaaaaaacgcaaaaaacgacacaattaattaaaaaaacaaaaaatataaacgaacgcaccccttacctaaaaaccgcgctcgcgaacgaaaacgaaacatcccaataactacacccgccgctccgcgctcctacctaacgtcgccaaccccgcgacgaccgctaaaattccaaaactaccaaacgctcccaaccgatctcgacaaacttttccccaacccacgtactaaccaaacgactcgcttcccgaacccgaaataaaacaccgcgcctaaaaaaaccgcgccgcccgaaacgtacgcacgataaacaacccacaccaaaacaaccgcaactacgacgcttaaatacaccgccgtaaactccaaataacctaaaaacgttcttttaaccctacgctctcaatacctttaaaattctttcctttccccgaaacgccgacacaacgcattataccgctaaatcgaaacttaaaactcgacaaaaattactaattcactaattataatcaccttcctctccaactcgtccgcaactacccgctctaaattaaaccgctccgcgactcgtacta

SEQ ID NO: 35419 - DNA, 740 bp, Artificial Sequence
  chemically treated genomic DNA (Homo sapiens) CpG-island No: 35419
ttggattatagtattatttatttatagaagtattttaagttttagtcggtttgtatttttatcggaaagtgcgtttgttatattttttcggattatttcgttttttcgagagcgttttgttttttatagttcggaaagaaagaaattttagttgtgaagtgatcgtggagaaagcgtaggaagcgatataattggttagggaggtagagagtgtgagcgggcgtattttttgtttggggatcgcgttcgcgggcggggacggagtattttagtggttgtattcgtcgtttcgcgtttttgtttggcgtcgttaatttcgcggcggtcgttggaattttagagttgttaggcgtttttagtcggtttcggtaaatttttttttagtttacgtgttaattaagcggttcgtttttcgagttcgggatggagtatcgcgtttagggaggtcgcgtcgttcgagacgtgcgtacggtaggtaatttatattaaggtagtcgtagttgcggcgtttgggtatatcgtcgtggattttaaatggtttaagagcgtttttttagttttgcgtttttagtgtttttagagttttttttttttttcggagcgtcggtataacgtattatgtcgttgggtcggagtttagggttcggtagaggttgttaatttattgattataattatttttttttttaattcgttcgtagttgttcgttttggattaagtcgtttcgcggttcgtgtta

SEQ ID NO: 35420 - DNA, 740 bp, Artificial Sequence
  chemically treated genomic DNA (Homo sapiens) CpG-island No: 35420
taacacgaaccgcgaaacgacttaatccaaaacgaacaactacgaacgaattaaaaaaaaaaataattataatcaataaattaacaacctctaccgaaccctaaactccgacccaacgacataatacgttataccgacgctccgaaaaaaaaaaaaaactctaaaaacactaaaaacgcaaaactaaaaaaacgctcttaaaccatttaaaatccacgacgatatacccaaacgccgcaactacgactaccttaatataaattacctaccgtacgcacgtctcgaacgacgcgacctccctaaacgcgatactccatcccgaactcgaaaaacgaaccgcttaattaacacgtaaactaaaaaaaaatttaccgaaaccgactaaaaacgcctaacaactctaaaattccaacgaccgccgcgaaattaacgacgccaaacaaaaacgcgaaacgacgaatacaaccactaaaatactccgtccccgcccgcgaacgcgatccccaaacaaaaaatacgcccgctcacactctctacctccctaaccaattatatcgcttcctacgctttctccacgatcacttcacaactaaaatttctttctttccgaactataaaaaacaaaacgctctcgaaaaaacgaaataatccgaaaaaatataacaaacgcactttccgataaaaatacaaaccgactaaaacttaaaatacttctataaataaataatactataatccaa

SEQ ID NO: 35421 - DNA, 872 bp, Artificial Sequence
  chemically treated genomic DNA (Homo sapiens) CpG-island No: 35421
aggacgtcgtcgagcgtttggagttgtgcgcgtgtgcgtgtgcgcgtgtgcgagtgtgaagtgtagcgttggagtgtaatatgttgtaatgggaggaaatttagcggcgtcggagcgttcgggatcgtcgcggtcgttttgagcgtagtggcgtcgagtagtttttttcgtagtcggtgtgatttgtttttttaggtgcgtggtcgtcggtcgtcggggagcgcggttcgggtatgcgggtgtcgagagggggcgacggggttcgggaggcgggggacggaaggtgcgtcgcgtttcgggggtgagcgggtgtggacggcgaatcggcgcgggcgggtggtgcgttttttttcggttgttcggcgagtcgggggaagcggagggcggcgtgggtgtcgtaggttcggttgaatttcgggcgtttggcggggtgtgtgtggcgggaagggtagtaggttcgcgggacgggtttggttggattgtgaacgtcggcgtttcgtgcgttgtttttcgggagtagggatttattgtgcgcgcgtggggagcgcggcgggtatttgggcgcgtacgaaatgtgcgtttgtgtttgtatatttgtacggcgttgtgttttttggcggggtttcgggggcgggggcgtgcgagatgtcgtgtttatagtagtgtgcgttatgtttattcgttttgttcgttggcgtttttcgggagcgttcgtttcgataaattttattgttttagcgcgtcggtatcggttcgggaggtgcgagttggtatcgggcgcgtagttggcgggggagggaaagcggtttttttttgtcgcgggaggtttcgtttttatttttttttcggtttatttgggtttagttttattt

SEQ ID NO: 35422 - DNA, 872 bp, Artificial Sequence
  chemically treated genomic DNA (Homo sapiens) CpG-island No: 35422
aaataaaactaaacccaaataaaccgaaaaaaaaataaaaacgaaacctcccgcgacaaaaaaaaaccgctttccctcccccgccaactacgcgcccgataccaactcgcacctcccgaaccgataccgacgcgctaaaacaataaaatttatcgaaacgaacgctcccgaaaaacgccaacgaacaaaacgaataaacataacgcacactactataaacacgacatctcgcacgcccccgcccccgaaaccccgccaaaaaacacaacgccgtacaaatatacaaacacaaacgcacatttcgtacgcgcccaaatacccgccgcgctccccacgcgcgcacaataaatccctactcccgaaaaacaacgcacgaaacgccgacgttcacaatccaaccaaacccgtcccgcgaacctactacccttcccgccacacacaccccgccaaacgcccgaaattcaaccgaacctacgacacccacgccgccctccgcttcccccgactcgccgaacaaccgaaaaaaaacgcaccacccgcccgcgccgattcgccgtccacacccgctcacccccgaaacgcgacgcaccttccgtcccccgcctcccgaaccccgtcgccccctctcgacacccgcatacccgaaccgcgctccccgacgaccgacgaccacgcacctaaaaaaacaaatcacaccgactacgaaaaaaactactcgacgccactacgctcaaaacgaccgcgacgatcccgaacgctccgacgccgctaaatttcctcccattacaacatattacactccaacgctacacttcacactcgcacacgcgcacacgcacacgcgcacaactccaaacgctcgacgacgtcct

SEQ ID NO: 35423 - DNA, 872 bp, Artificial Sequence
  chemically treated genomic DNA (Homo sapiens) CpG-island No: 35423
aggtggggttgagtttaggtgagtcgggagggagataggggcgaggtttttcgcggtagggagaggtcgttttttttttttcgttagttgcgcgttcggtgttagttcgtatttttcgggtcgatgtcggcgcgttggggtagtgaggtttgtcggggcgggcgttttcgagaggcgttagcgggtagggcgagtggatatggcgtatattgttgtggatacggtatttcgtacgttttcgttttcgaggtttcgttaggggatatagcgtcgtgtaaatgtataaatataaacgtatatttcgtgcgcgtttaggtgttcgtcgcgttttttacgcgcgtatagtaggtttttgttttcgggggatagcgtacgggacgtcgacgtttatagtttaattagattcgtttcgcggatttgttgtttttttcgttatatatatttcgttaagcgttcggagtttagtcgaatttgcggtatttacgtcgtttttcgtttttttcggttcgtcgagtagtcggggaagggcgtattattcgttcgcgtcggttcgtcgtttatattcgtttattttcggaacgcggcgtatttttcgtttttcgtttttcgggtttcgtcgttttttttcggtattcgtatgttcgagtcgcgtttttcgacggtcgacggttacgtatttgaagggataggttatatcggttgcgggaggggttgttcggcgttattgcgtttagaacggtcgcggcggtttcgggcgtttcgacgtcgttgggtttttttttattatagtatgttgtattttagcgttgtattttatattcgtatacgcgtatacgtatacgcgtataattttaggcgttcggcggcgtttt

SEQ ID NO: 35424 - DNA, 872 bp, Artificial Sequence
  chemically treated genomic DNA (Homo sapiens) CpG-island No: 35424
aaaacgccgccgaacgcctaaaattatacgcgtatacgtatacgcgtatacgaatataaaatacaacgctaaaatacaacatactataataaaaaaaaacccaacgacgtcgaaacgcccgaaaccgccgcgaccgttctaaacgcaataacgccgaacaacccctcccgcaaccgatataacctatcccttcaaatacgtaaccgtcgaccgtcgaaaaacgcgactcgaacatacgaataccgaaaaaaaacgacgaaacccgaaaaacgaaaaacgaaaaatacgccgcgttccgaaaataaacgaatataaacgacgaaccgacgcgaacgaataatacgcccttccccgactactcgacgaaccgaaaaaaacgaaaaacgacgtaaataccgcaaattcgactaaactccgaacgcttaacgaaatatatataacgaaaaaaacaacaaatccgcgaaacgaatctaattaaactataaacgtcgacgtcccgtacgctatcccccgaaaacaaaaacctactatacgcgcgtaaaaaacgcgacgaacacctaaacgcgcacgaaatatacgtttatatttatacatttacacgacgctatatcccctaacgaaacctcgaaaacgaaaacgtacgaaataccgtatccacaacaatatacgccatatccactcgccctacccgctaacgcctctcgaaaacgcccgccccgacaaacctcactaccccaacgcgccgacatcgacccgaaaaatacgaactaacaccgaacgcgcaactaacgaaaaaaaaaaaacgacctctccctaccgcgaaaaacctcgcccctatctccctcccgactcacctaaactcaaccccacct

SEQ ID NO: 35425 - DNA, 885 bp, Artificial Sequence
  chemically treated genomic DNA (Homo sapiens) CpG-island No: 35425
agacgcggtatatttagattttcgttaggttcgtatatatatttaggggtaatatagcgtcgtatttcgaggtcgagtcgtacgtttatatttcggatacgtaatttacggatacgacgtatagcgcgtttaatacggttttcgttatgcgaaatttcgtacgggaggtttcgcggtttcggacgcgcgttcgttttagatttcgcgttcgtagggacgcgtcgcgtagatcgcgtaggatcgttcgcgcgtttcgggattttagtttagttcggttcggtttcgtcgcggattcggggcgcgggttttttattttgtcgattagtttttcgcgtttgtatacgcggttcgagttcgggtttcgtaggaaggcggcgattagggggcgatttttgcgtcgtcgtcgcggtcggggttttatcgcgcggattttggcgtagtcgggtcgagattatcgcgttgcggtcgtttcggggtcgttttgagggcgtaggagtcgtcggggagcgttttattggtcgcgggggcggggagggggcggagttcgggcgtaggtttagttcggggaggggcgggaggtgttcggtcgtggagtggggggcgcgtgagcggcggggacgtcgcggttggggaagttttacggattagagcgcgttcgagtttcgtacgttaatcgggcgttaggggtcgcgtttagttcgcgagttttttcgattttgtatattcgggttggttgggaatcgttgatacgttcgttttatcgagcgggaaattgaggttttttcgcgcgtggggggttgggggttttcgggggttttttttttatagtgcgtttgaggtatgagtttcgacgttttgaatgtgtgttatttcgggttttttttg

SEQ ID NO: 35426 - DNA, 885 bp, Artificial Sequence
  chemically treated genomic DNA (Homo sapiens) CpG-island No: 35426
caaaaaaaacccgaaataacacacattcaaaacgtcgaaactcatacctcaaacgcactataaaaaaaaaacccccgaaaacccccaaccccccacgcgcgaaaaaacctcaatttcccgctcgataaaacgaacgtatcaacgattcccaaccaacccgaatatacaaaatcgaaaaaactcgcgaactaaacgcgacccctaacgcccgattaacgtacgaaactcgaacgcgctctaatccgtaaaacttccccaaccgcgacgtccccgccgctcacgcgccccccactccacgaccgaacacctcccgcccctccccgaactaaacctacgcccgaactccgccccctccccgcccccgcgaccaataaaacgctccccgacgactcctacgccctcaaaacgaccccgaaacgaccgcaacgcgataatctcgacccgactacgccaaaatccgcgcgataaaaccccgaccgcgacgacgacgcaaaaatcgccccctaatcgccgccttcctacgaaacccgaactcgaaccgcgtatacaaacgcgaaaaactaatcgacaaaataaaaaacccgcgccccgaatccgcgacgaaaccgaaccgaactaaactaaaatcccgaaacgcgcgaacgatcctacgcgatctacgcgacgcgtccctacgaacgcgaaatctaaaacgaacgcgcgtccgaaaccgcgaaacctcccgtacgaaatttcgcataacgaaaaccgtattaaacgcgctatacgtcgtatccgtaaattacgtatccgaaatataaacgtacgactcgacctcgaaatacgacgctatattacccctaaatatatatacgaacctaacgaaaatctaaatataccgcgtct

SEQ ID NO: 35427 - DNA, 885 bp, Artificial Sequence
  chemically treated genomic DNA (Homo sapiens) CpG-island No: 35427
tagggaggattcgaaatggtatatatttagaacgtcgaggtttatattttaagcgtattgtgggggagaagttttcggaagtttttaattttttacgcgcgagagagttttagtttttcgttcggtaaagcgggcgtattagcggtttttagttagttcgggtgtgtagggtcggaggagttcgcgggttgagcgcggtttttggcgttcggttggcgtgcgggattcgggcgcgttttggttcgtggaatttttttagtcgcggcgttttcgtcgtttacgcgttttttattttacggtcgggtatttttcgttttttttcgggttggatttgcgttcgggtttcgtttttttttcgttttcgcggttaataaaacgtttttcggcggtttttgcgtttttagagcggtttcggagcggtcgtagcgcggtggtttcggttcggttgcgttagagttcgcgcgatggagtttcggtcgcggcggcggcgtaggagtcgttttttggtcgtcgtttttttgcgagattcgggttcgggtcgcgtgtataggcgcgggaagttgatcggtaaggtgggaggttcgcgtttcgagttcgcgacggggtcggatcgggttgggttggggtttcggggcgcgcgggcgattttgcgcggtttacgcggcgcgtttttgcgagcgcggggtttggagcgggcgcgcgttcggagtcgcggggtttttcgtgcggggtttcgtatggcgggaatcgtgttgagcgcgttgtgcgtcgtgttcgtgggttgcgtgttcggggtgtgggcgtgcggttcggtttcgggatgcgacgttgtgttgtttttgggtgtgtgtgcgagtttggcgagggtttgagtgtgtcgcgttt

SEQ ID NO: 35428 - DNA, 885 bp, Artificial Sequence
  chemically treated genomic DNA (Homo sapiens) CpG-island No: 35428
aaacgcgacacactcaaaccctcgccaaactcgcacacacacccaaaaacaacacaacgtcgcatcccgaaaccgaaccgcacgcccacaccccgaacacgcaacccacgaacacgacgcacaacgcgctcaacacgattcccgccatacgaaaccccgcacgaaaaaccccgcgactccgaacgcgcgcccgctccaaaccccgcgctcgcaaaaacgcgccgcgtaaaccgcgcaaaatcgcccgcgcgccccgaaaccccaacccaacccgatccgaccccgtcgcgaactcgaaacgcgaacctcccaccttaccgatcaacttcccgcgcctatacacgcgacccgaacccgaatctcgcaaaaaaacgacgaccaaaaaacgactcctacgccgccgccgcgaccgaaactccatcgcgcgaactctaacgcaaccgaaccgaaaccaccgcgctacgaccgctccgaaaccgctctaaaaacgcaaaaaccgccgaaaaacgttttattaaccgcgaaaacgaaaaaaaaacgaaacccgaacgcaaatccaacccgaaaaaaaacgaaaaatacccgaccgtaaaataaaaaacgcgtaaacgacgaaaacgccgcgactaaaaaaattccacgaaccaaaacgcgcccgaatcccgcacgccaaccgaacgccaaaaaccgcgctcaacccgcgaactcctccgaccctacacacccgaactaactaaaaaccgctaatacgcccgctttaccgaacgaaaaactaaaactctctcgcgcgtaaaaaattaaaaacttccgaaaacttctcccccacaatacgcttaaaatataaacctcgacgttctaaatatataccatttcgaatcctcccta

SEQ ID NO: 35429 - DNA, 533 bp, Artificial Sequence
  chemically treated genomic DNA (Homo sapiens) CpG-island No: 35429
acgtcggtgggacgtaattcgggcgtcggcggggtaggggtagcgttcgggatttttagatttagggcggggtgatttcggttcgcgtatattttcgggttttgagcgcggcgttcggaatagtagtttcggggtagaggagggcggttagttttcgcgtcgcgttttcgttcgagtttgttaaggttattcggattcgggcgttcgatattagtttgcggtttcgggatttttgcgttcgcgttcgtcgggtagttttttgtcgtagattcgcgttcgtcgcgcgagggcgttcggggtcgtcgttttttttgattcgggtttgggcgcgtttgcggaggtcgcggtgggagggatcgttttaggttttttatttcgtttagtattttgggtttcgtcgttttcgttcgttttggggtcgtttagggagtcgggacgcgttgtttgggtttcgcgtagtcggtaagtttatttgtttatttttttatttttttcgggggaaattgaggtttagaggtgcggtttgttttgag

SEQ ID NO: 35430 - DNA, 533 bp, Artificial Sequence
  chemically treated genomic DNA (Homo sapiens) CpG-island No: 35430
ctcaaaacaaaccgcacctctaaacctcaatttcccccgaaaaaaataaaaaaataaacaaataaacttaccgactacgcgaaacccaaacaacgcgtcccgactccctaaacgaccccaaaacgaacgaaaacgacgaaacccaaaatactaaacgaaataaaaaacctaaaacgatccctcccaccgcgacctccgcaaacgcgcccaaacccgaatcaaaaaaaacgacgaccccgaacgccctcgcgcgacgaacgcgaatctacgacaaaaaactacccgacgaacgcgaacgcaaaaatcccgaaaccgcaaactaatatcgaacgcccgaatccgaataaccttaacaaactcgaacgaaaacgcgacgcgaaaactaaccgccctcctctaccccgaaactactattccgaacgccgcgctcaaaacccgaaaatatacgcgaaccgaaatcaccccgccctaaatctaaaaatcccgaacgctacccctaccccgccgacgcccgaattacgtcccaccgacgt

SEQ ID NO: 35431 - DNA, 533 bp, Artificial Sequence
  chemically treated genomic DNA (Homo sapiens) CpG-island No: 35431
tttaaggtaagtcgtatttttgggttttagtttttttcggagaaagtgggaggataggtagatggatttatcggttgcgcggagtttaggtagcgcgtttcggttttttgagcggttttagggcgagcggaagcggcggggtttaaggtgttgggcggggtggggagtttgggacggttttttttatcgcggttttcgtaggcgcgtttaggttcgggttaggaggggcggcggtttcgggcgttttcgcgcggcgggcgcggatttgcggtaggggattgttcggcggacgcgagcgtaggggtttcggagtcgtaggttggtgtcgggcgttcgggttcgggtgattttggtaggttcgggcgggggcgcggcgcggggattgatcgtttttttttgtttcggggttgttatttcgggcgtcgcgtttagggttcgggaatgtgcgcgaatcgaggttatttcgttttgggtttgggagtttcgggcgttgtttttatttcgtcgacgttcggattgcgttttatcggcgt

SEQ ID NO: 35432 - DNA, 533 bp, Artificial Sequence
  chemically treated genomic DNA (Homo sapiens) CpG-island No: 35432
acgccgataaaacgcaatccgaacgtcgacgaaataaaaacaacgcccgaaactcccaaacccaaaacgaaataacctcgattcgcgcacattcccgaaccctaaacgcgacgcccgaaataacaaccccgaaacaaaaaaaaacgatcaatccccgcgccgcgcccccgcccgaacctaccaaaatcacccgaacccgaacgcccgacaccaacctacgactccgaaacccctacgctcgcgtccgccgaacaatcccctaccgcaaatccgcgcccgccgcgcgaaaacgcccgaaaccgccgcccctcctaacccgaacctaaacgcgcctacgaaaaccgcgataaaaaaaaccgtcccaaactccccaccccgcccaacaccttaaaccccgccgcttccgctcgccctaaaaccgctcaaaaaaccgaaacgcgctacctaaactccgcgcaaccgataaatccatctacctatcctcccactttctccgaaaaaaactaaaacccaaaaatacgacttaccttaaa

SEQ ID NO: 35433 - DNA, 709 bp, Artificial Sequence
  chemically treated genomic DNA (Homo sapiens) CpG-island No: 35433
gcgttgttttaggtcgtttatggtttcgacgcgttcggggttggttgttcgagttcgttcgcggattagggtatttatttcgttgtacgcgtatcgttttttcgtagtttgagtcgcgatgtttcggtttcgcgtcggtgttcgttttcggtttttcgttaggattaatgggagggtagggcggataaaggaggaggggtttgtttcgtttttttcgtcgtatagtttttcgttacggtcgtcgttgtttagatttcgtcgggagagggcggggcgcggcggtttagggtatcgattggtcgggtcggagcgagacgtagttgattggaagggcggtgttagaggatgggattattggttgaagggtggagttagggcgaggagaggcgtgggggggcggaatcggggggaggggttaaagaaatattcgagtcgattggagaaacgggacgcgatttattggcgagattagtggagggcggggttgattataaaggaggtagggcggaatggtaggggcgggaacggggcgaggtttatcggaggaggcgggattacgtaaaagaatgattttgattaggtcggataggaggtcgggttgattttcgaaggaggggtgtgttggaaagtgggagaggttaaataaagggtaggacgcgttatcgtaatagtgaattcgtttttttgggttagttttgtcgttgtataa

SEQ ID NO: 35434 - DNA, 709 bp, Artificial Sequence
  chemically treated genomic DNA (Homo sapiens) CpG-island No: 35434
ttatacaacgacaaaactaacccaaaaaaacgaattcactattacgataacgcgtcctaccctttatttaacctctcccactttccaacacacccctccttcgaaaatcaacccgacctcctatccgacctaatcaaaatcattcttttacgtaatcccgcctcctccgataaacctcgccccgttcccgcccctaccattccgccctacctcctttataatcaaccccgccctccactaatctcgccaataaatcgcgtcccgtttctccaatcgactcgaatatttctttaacccctccccccgattccgcccccccacgcctctcctcgccctaactccacccttcaaccaataatcccatcctctaacaccgcccttccaatcaactacgtctcgctccgacccgaccaatcgataccctaaaccgccgcgccccgccctctcccgacgaaatctaaacaacgacgaccgtaacgaaaaactatacgacgaaaaaaacgaaacaaacccctcctcctttatccgccctaccctcccattaatcctaacgaaaaaccgaaaacgaacaccgacgcgaaaccgaaacatcgcgactcaaactacgaaaaaacgatacgcgtacaacgaaataaataccctaatccgcgaacgaactcgaacaaccaaccccgaacgcgtcgaaaccataaacgacctaaaacaacgc

SEQ ID NO: 35435 - DNA, 709 bp, Artificial Sequence
  chemically treated genomic DNA (Homo sapiens) CpG-island No: 35435
ttgtataacgataagattaatttagagaagcgggtttattgttgcgataacgcgttttattttttgtttgattttttttattttttaatatatttttttttcgagaattagttcggttttttgttcggtttaattagaattatttttttgcgtaatttcgtttttttcgataagtttcgtttcgttttcgtttttattatttcgttttgttttttttgtgattagtttcgttttttattggtttcgttaatgaatcgcgtttcgtttttttaatcggttcggatgtttttttagttttttttttcggtttcgtttttttacgttttttttcgttttggttttattttttagttaataattttattttttgatatcgtttttttaattagttacgtttcgtttcggttcggttaatcggtgttttgggtcgtcgcgtttcgttttttttcggcggggtttgggtagcggcggtcgtggcggagggttatgcggcgggggagacggggtaggtttttttttttttgttcgttttgtttttttattggttttagcggggggtcgggggcggatatcggcgcggggtcggagtatcgcggtttaggttgcgggaaagcggtgcgcgtgtagcggggtgggtgttttggttcgcgggcgagttcgagtagttaatttcgggcgcgtcggggttatggacggtttgaggtagcgt

SEQ ID NO: 35436 - DNA, 709 bp, Artificial Sequence
  chemically treated genomic DNA (Homo sapiens) CpG-island No: 35436
acgctacctcaaaccgtccataaccccgacgcgcccgaaattaactactcgaactcgcccgcgaaccaaaacacccaccccgctacacgcgcaccgctttcccgcaacctaaaccgcgatactccgaccccgcgccgatatccgcccccgaccccccgctaaaaccaataaaaaaacaaaacgaacaaaaaaaaaaaaacctaccccgtctcccccgccgcataaccctccgccacgaccgccgctacccaaaccccgccgaaaaaaaacgaaacgcgacgacccaaaacaccgattaaccgaaccgaaacgaaacgtaactaattaaaaaaacgatatcaaaaaataaaattattaactaaaaaataaaaccaaaacgaaaaaaaacgtaaaaaaacgaaaccgaaaaaaaaaactaaaaaaacatccgaaccgattaaaaaaacgaaacgcgattcattaacgaaaccaataaaaaacgaaactaatcacaaaaaaaacaaaacgaaataataaaaacgaaaacgaaacgaaacttatcgaaaaaaacgaaattacgcaaaaaaataattctaattaaaccgaacaaaaaaccgaactaattctcgaaaaaaaaatatattaaaaaataaaaaaaatcaaacaaaaaataaaacgcgttatcgcaacaataaacccgcttctctaaattaatcttatcgttatacaa

SEQ ID NO: 35437 - DNA, 522 bp, Artificial Sequence
  chemically treated genomic DNA (Homo sapiens) CpG-island No: 35437
cgttttagcgttggaggttaagtaggtgattgcggggttcggtttatcgttttcgtttttaggcgcggttcggcggtttattcgttttcgttttcgtttttcgtagttcgtttttgacgtggagagatatgtagtatttggtggttcgcgcgtttaagtcggcgtatttgtaggtcgaggattggaggattaacggcgtggggcgttaaggtgcggcggggtcgggcgggggcggggattcggggtttacggggcgagtgattgttgttttttcgcgtagtgagttattattacggatacgggttgttggacgtcgggttgttggtggatatcgttcgtatttggttgtttatttagtcgtagaggaagtgcgtcgttcgggtttagagtcgttttacgtgagatttttgcgcgttttttcgttattttcgttgggggtgtgggggataggtttgaggttttagtttatttatttgtaaaacgagggttggatttcgtgatttttgagtttcgatttcgttt

SEQ ID NO: 35438 - DNA, 522 bp, Artificial Sequence
  chemically treated genomic DNA (Homo sapiens) CpG-island No: 35438
aaacgaaatcgaaactcaaaaatcacgaaatccaaccctcgttttacaaataaataaactaaaacctcaaacctatcccccacacccccaacgaaaataacgaaaaaacgcgcaaaaatctcacgtaaaacgactctaaacccgaacgacgcacttcctctacgactaaataaacaaccaaatacgaacgatatccaccaacaacccgacgtccaacaacccgtatccgtaataataactcactacgcgaaaaaacaacaatcactcgccccgtaaaccccgaatccccgcccccgcccgaccccgccgcaccttaacgccccacgccgttaatcctccaatcctcgacctacaaatacgccgacttaaacgcgcgaaccaccaaatactacatatctctccacgtcaaaaacgaactacgaaaaacgaaaacgaaaacgaataaaccgccgaaccgcgcctaaaaacgaaaacgataaaccgaaccccgcaatcacctacttaacctccaacgctaaaacg

SEQ ID NO: 35439 - DNA, 522 bp, Artificial Sequence
  chemically treated genomic DNA (Homo sapiens) CpG-island No: 35439
aggcgaggtcggggtttagaggttacggggtttagttttcgttttatagatgggtaaattgaggttttaggtttgttttttatatttttagcggggatagcggaggggcgcgtaggggttttacgtggggcggttttggattcggacggcgtattttttttgcggttgggtgggtagttaggtgcgggcggtgtttattagtagttcggcgtttagtagttcgtattcgtagtgatggtttattgcgcggaagggtagtagttattcgtttcgtgggtttcgggttttcgttttcgttcggtttcgtcgtattttggcgttttacgtcgttggttttttagttttcggtttgtaggtgcgtcggtttggacgcgcggattattaggtgttgtatgtttttttacgttaggaacgggttgcggggggcgggggcgggggcgggtgagtcgtcgggtcgcgtttgggggcgagggcggtggatcgggtttcgtagttatttatttggtttttagcgttagggcg

SEQ ID NO: 35440 - DNA, 522 bp, Artificial Sequence
  chemically treated genomic DNA (Homo sapiens) CpG-island No: 35440
cgccctaacgctaaaaaccaaataaataactacgaaacccgatccaccgccctcgcccccaaacgcgacccgacgactcacccgcccccgcccccgccccccgcaacccgttcctaacgtaaaaaaacatacaacacctaataatccgcgcgtccaaaccgacgcacctacaaaccgaaaactaaaaaaccaacgacgtaaaacgccaaaatacgacgaaaccgaacgaaaacgaaaacccgaaacccacgaaacgaataactactacccttccgcgcaataaaccatcactacgaatacgaactactaaacgccgaactactaataaacaccgcccgcacctaactacccacccaaccgcaaaaaaaatacgccgtccgaatccaaaaccgccccacgtaaaacccctacgcgcccctccgctatccccgctaaaaatataaaaaacaaacctaaaacctcaatttacccatctataaaacgaaaactaaaccccgtaacctctaaaccccgacctcgcct

SEQ ID NO: 35441 - DNA, 1104 bp, Artificial Sequence
  chemically treated genomic DNA (Homo sapiens) CpG-island No: 35441
gttttcgtgtacgaagggtgcggagatgggagttttggcgaggttgggatcgtttacgtcgttgtcgaggagggagagttggtcgtcggcgggggtttcggggggttttttggtttttaggttcggggacgtgttggagttggttttgggggcggcgattttttcggtttggattacggcgtcgttggttttgcgcggcgggggttcggtcggggcgttttcgggcgtggagtttcgtagtggtagggtcgtggcgggaagcgtgttgcgtaggatgtggggtacgtttttatttcggatgcgtcgttaggtcgtgttcggcgcggttattttggggagcggtcggggtttttcgtcgttgttgcggcgcgcggcgtcggttgaggtaggggtcgcggggacggcgtcgtcgggtttgcgggttacgttgatgtgcggtagcgacgcgtagcgtttgatagttttcggtcgggcggcgggcgcgcgtataggtaggcgggacgggttttcggaggtggtgcgtcgggtagggcgttcgttagggttgggtcgggtcgcggggggtcgttgtcgggtcggggtcgggttttgtcggggtgtcgttcggagtttttcgtagcgcgaggagtagaggaagacggcgggtagcgcgggtcggtcgcggcggggcgaggcgttttggggggtagaggtcgcggattcggtcgaggatagttcggagcggcggcgtcgtaagttcggcgattttttgatgaaggttagttgtcgtcggaagttcgagcggtcggaggattcgttgtcgttggagagggttgaggttatacgtattaggtttaggcggttttcgcgcgttttcgggttcgtttcggttttcgttcggtttttggggttcggtttcgggattgttcgagttagcggtggcggtttacgtcgggtcggtttttgtatgaacgggattcgtacgggcgatttttgcgttttgtgttgtttcgttagaagggtgcgcgtcggcgttttgggtatcggggaggtttcggggtcgggtagggttttagtagtttgggtgatcggggggcgttttttgggtaggggttgggaggcggg

SEQ ID NO: 35442 - DNA, 1104 bp, Artificial Sequence
  chemically treated genomic DNA (Homo sapiens) CpG-island No: 35442
cccgcctcccaacccctacccaaaaaacgccccccgatcacccaaactactaaaaccctacccgaccccgaaacctccccgatacccaaaacgccgacgcgcacccttctaacgaaacaacacaaaacgcaaaaatcgcccgtacgaatcccgttcatacaaaaaccgacccgacgtaaaccgccaccgctaactcgaacaatcccgaaaccgaaccccaaaaaccgaacgaaaaccgaaacgaacccgaaaacgcgcgaaaaccgcctaaacctaatacgtataacctcaaccctctccaacgacaacgaatcctccgaccgctcgaacttccgacgacaactaaccttcatcaaaaaatcgccgaacttacgacgccgccgctccgaactatcctcgaccgaatccgcgacctctaccccccaaaacgcctcgccccgccgcgaccgacccgcgctacccgccgtcttcctctactcctcgcgctacgaaaaactccgaacgacaccccgacaaaacccgaccccgacccgacaacgaccccccgcgacccgacccaaccctaacgaacgccctacccgacgcaccacctccgaaaacccgtcccgcctacctatacgcgcgcccgccgcccgaccgaaaactatcaaacgctacgcgtcgctaccgcacatcaacgtaacccgcaaacccgacgacgccgtccccgcgacccctacctcaaccgacgccgcgcgccgcaacaacgacgaaaaaccccgaccgctccccaaaataaccgcgccgaacacgacctaacgacgcatccgaaataaaaacgtaccccacatcctacgcaacacgcttcccgccacgaccctaccactacgaaactccacgcccgaaaacgccccgaccgaacccccgccgcgcaaaaccaacgacgccgtaatccaaaccgaaaaaatcgccgcccccaaaaccaactccaacacgtccccgaacctaaaaaccaaaaaaccccccgaaacccccgccgacgaccaactctccctcctcgacaacgacgtaaacgatcccaacctcgccaaaactcccatctccgcacccttcgtacacgaaaac

SEQ ID NO: 35443 - DNA, 1104 bp, Artificial Sequence
  chemically treated genomic DNA (Homo sapiens) CpG-island No: 35443
ttcgttttttagtttttgtttagaaagcgtttttcggttatttaggttgttggggttttgttcggtttcggagttttttcggtgtttaaaacgtcggcgcgtatttttttggcgaagtagtataagacgtagagatcgttcgtgcggatttcgtttatgtagaggtcggttcggcgtgggtcgttatcgttggttcgggtagtttcggagtcgggttttaggggtcgggcggggatcgaggcgggttcgggggcgcgcgggggtcgtttgggtttggtgcgtgtggttttagttttttttagcggtagcgagtttttcgatcgttcgggttttcggcgatagttaatttttattaaggagtcgtcgggtttgcggcgtcgtcgtttcgagttgttttcggtcgagttcgcggtttttgttttttagggcgtttcgtttcgtcgcggtcggttcgcgttgttcgtcgtttttttttgtttttcgcgttgcgaagagtttcgagcggtatttcggtagggttcggtttcggttcggtagcggtttttcgcggttcgatttagttttggcgagcgttttgttcggcgtattattttcgagagttcgtttcgtttgtttgtgcgcgcgttcgtcgttcggtcggagattgttaagcgttacgcgtcgttgtcgtatattagcgtggttcgtaggttcgacggcgtcgttttcgcggtttttgttttagtcgacgtcgcgcgtcgtagtagcgacggggagtttcggtcgttttttagggtggtcgcgtcgggtacgatttggcggcgtattcgagatgaggacgtgttttatattttgcgtagtacgtttttcgttacggttttgttattgcggggttttacgttcgaggacgtttcggtcgggttttcgtcgcgtaagattagcgacgtcgtggtttagatcgaggaggtcgtcgtttttaagattaattttagtacgttttcgagtttggagattagggagtttttcggggttttcgtcggcggttagtttttttttttcggtagcgacgtggacggttttagtttcgttaaggtttttattttcgtatttttcgtgtacgagggt

SEQ ID NO: 35444 - DNA, 1104 bp, Artificial Sequence
  chemically treated genomic DNA (Homo sapiens) CpG-island No: 35444
accctcgtacacgaaaaatacgaaaataaaaaccttaacgaaactaaaaccgtccacgtcgctaccgaaaaaaaaaaactaaccgccgacgaaaaccccgaaaaactccctaatctccaaactcgaaaacgtactaaaattaatcttaaaaacgacgacctcctcgatctaaaccacgacgtcgctaatcttacgcgacgaaaacccgaccgaaacgtcctcgaacgtaaaaccccgcaataacaaaaccgtaacgaaaaacgtactacgcaaaatataaaacacgtcctcatctcgaatacgccgccaaatcgtacccgacgcgaccaccctaaaaaacgaccgaaactccccgtcgctactacgacgcgcgacgtcgactaaaacaaaaaccgcgaaaacgacgccgtcgaacctacgaaccacgctaatatacgacaacgacgcgtaacgcttaacaatctccgaccgaacgacgaacgcgcgcacaaacaaacgaaacgaactctcgaaaataatacgccgaacaaaacgctcgccaaaactaaatcgaaccgcgaaaaaccgctaccgaaccgaaaccgaaccctaccgaaataccgctcgaaactcttcgcaacgcgaaaaacaaaaaaaaacgacgaacaacgcgaaccgaccgcgacgaaacgaaacgccctaaaaaacaaaaaccgcgaactcgaccgaaaacaactcgaaacgacgacgccgcaaacccgacgactccttaataaaaattaactatcgccgaaaacccgaacgatcgaaaaactcgctaccgctaaaaaaaactaaaaccacacgcaccaaacccaaacgacccccgcgcgcccccgaacccgcctcgatccccgcccgacccctaaaacccgactccgaaactacccgaaccaacgataacgacccacgccgaaccgacctctacataaacgaaatccgcacgaacgatctctacgtcttatactacttcgccaaaaaaatacgcgccgacgttttaaacaccgaaaaaactccgaaaccgaacaaaaccccaacaacctaaataaccgaaaaacgctttctaaacaaaaactaaaaaacgaa

SEQ ID NO: 35445 - DNA, 669 bp, Artificial Sequence
  chemically treated genomic DNA (Homo sapiens) CpG-island No: 35445
cgaggcggcgttagagaagttgatcggcgtgtttttcgcggagttagtgtaggagtcgtttttttgggtcggggtcggggcgggtattaatatgtagacgggtacggggagtgcgcggcgatttggtattagcgcggaggttattttgcgtagtcgggtaggtacggcggtttttaggtattttcgtagtagttttagtttttggttcgcggcgtcgcgagggcgagaattcgtgggcgtcggttttttttttcgtcgtcggtgttttgtaaagtggaggtcggcgttttcggcgttttcgtcgcgttcggggtaggtcgagggtagtagtcgtagttttacgttttgttgtacgtagtgttcgtgtaaggttagcgcgttgaggttggaggcgtacgagaagttttcgtttggtttttttacggtaaagcgtacgttgtttgcgtttagtttagatggtagtcggtagcgttttcggtagtcggcgatgtttaggaagcgttttacgtagtttttttattgtaggttgaattgggtggtttcggggggattttgtggcgcgggcgttagcggtggcgttttgtttcggttgggaggtatggtttgttcggggttgtcgggtagttcgttagggttgatggtgtcgttgttttgttcgttgtaaggttt

SEQ ID NO: 35446 - DNA, 669 bp, Artificial Sequence
  chemically treated genomic DNA (Homo sapiens) CpG-island No: 35446
aaaccttacaacgaacaaaacaacgacaccatcaaccctaacgaactacccgacaaccccgaacaaaccatacctcccaaccgaaacaaaacgccaccgctaacgcccgcgccacaaaatccccccgaaaccacccaattcaacctacaataaaaaaactacgtaaaacgcttcctaaacatcgccgactaccgaaaacgctaccgactaccatctaaactaaacgcaaacaacgtacgctttaccgtaaaaaaaccaaacgaaaacttctcgtacgcctccaacctcaacgcgctaaccttacacgaacactacgtacaacaaaacgtaaaactacgactactaccctcgacctaccccgaacgcgacgaaaacgccgaaaacgccgacctccactttacaaaacaccgacgacgaaaaaaaaaaccgacgcccacgaattctcgccctcgcgacgccgcgaaccaaaaactaaaactactacgaaaatacctaaaaaccgccgtacctacccgactacgcaaaataacctccgcgctaataccaaatcgccgcgcactccccgtacccgtctacatattaatacccgccccgaccccgacccaaaaaaacgactcctacactaactccgcgaaaaacacgccgatcaacttctctaacgccgcctcg

SEQ ID NO: 35447 - DNA, 669 bp, Artificial Sequence
  chemically treated genomic DNA (Homo sapiens) CpG-island No: 35447
gaattttgtagcgggtagggtagcggtattattagttttagcgagttgttcgatagtttcggatagattatgttttttagtcggagtaagacgttatcgttggcgttcgcgttatagggttttttcgaggttatttagtttagtttgtagtgggagagttacgtgaagcgttttttggatatcgtcgattgtcgggagcgttgtcggttgttatttgagttggacgtaggtagcgtgcgttttatcgtggagaagttagacgagaatttttcgtgcgtttttagttttagcgcgttggttttgtacgagtattacgtgtagtaggacgtggagttgcggttgttgttttcggtttgtttcgagcgcggcgggggcgtcgggggcgtcggtttttattttgtagggtatcggcggcgggaggaggggtcggcgtttacgggttttcgttttcgcggcgtcgcggattaggagttggaattgttgcgggagtgtttgggagtcgtcgtgtttgttcggttgcgtaaggtggttttcgcgttggtgttaggtcgtcgcgtatttttcgtgttcgtttatatgttggtgttcgtttcggtttcggtttaggaggacgatttttgtattgatttcgcggagggtacgtcggttaatttttttagcgtcgtttcg

SEQ ID NO: 35448 - DNA, 669 bp, Artificial Sequence
  chemically treated genomic DNA (Homo sapiens) CpG-island No: 35448
cgaaacgacgctaaaaaaattaaccgacgtaccctccgcgaaatcaatacaaaaatcgtcctcctaaaccgaaaccgaaacgaacaccaacatataaacgaacacgaaaaatacgcgacgacctaacaccaacgcgaaaaccaccttacgcaaccgaacaaacacgacgactcccaaacactcccgcaacaattccaactcctaatccgcgacgccgcgaaaacgaaaacccgtaaacgccgacccctcctcccgccgccgataccctacaaaataaaaaccgacgcccccgacgcccccgccgcgctcgaaacaaaccgaaaacaacaaccgcaactccacgtcctactacacgtaatactcgtacaaaaccaacgcgctaaaactaaaaacgcacgaaaaattctcgtctaacttctccacgataaaacgcacgctacctacgtccaactcaaataacaaccgacaacgctcccgacaatcgacgatatccaaaaaacgcttcacgtaactctcccactacaaactaaactaaataacctcgaaaaaaccctataacgcgaacgccaacgataacgtcttactccgactaaaaaacataatctatccgaaactatcgaacaactcgctaaaactaataataccgctaccctacccgctacaaaattc

SEQ ID NO: 35449 - DNA, 511 bp, Artificial Sequence
  chemically treated genomic DNA (Homo sapiens) CpG-island No: 35449
atcgtcgtcgttaaagtagttcgaatcggaagtatagttttgggttaggtcgtttaggtgtcgtaggggcggtagcggttttttagtggcggtttcggttgtcggcgggttttgtttttttaggtgttttagcgtttgcgcgaggtgtcgtgcgtttagttcggtttttagcgttcgttgtttgcgtacgtataggttgggtacgtagttgtttggggatacggcggtggcggtcgtttggtgtttggcgggtcgatgggttagtaggttgcgtagggcggcggcgttgtttatggcgattattttgtgtttggagtgtattagattacgtagtatgtttacggcgtttaggttttatagtagtttttggttacgggcgttgcgggtcgataggttttagagcgtgtcgtacgcgttgtttacgatggttaggttgtgcgaagttagatgttgtagtagcgtttgtagatagttgtgatttcggagtatttgtttgtaggtatagggcggg

SEQ ID NO: 35450 - DNA, 511 bp, Artificial Sequence
  chemically treated genomic DNA (Homo sapiens) CpG-island No: 35450
cccgccctatacctacaaacaaatactccgaaatcacaactatctacaaacgctactacaacatctaacttcgcacaacctaaccatcgtaaacaacgcgtacgacacgctctaaaacctatcgacccgcaacgcccgtaaccaaaaactactataaaacctaaacgccgtaaacatactacgtaatctaatacactccaaacacaaaataatcgccataaacaacgccgccgccctacgcaacctactaacccatcgacccgccaaacaccaaacgaccgccaccgccgtatccccaaacaactacgtacccaacctatacgtacgcaaacaacgaacgctaaaaaccgaactaaacgcacgacacctcgcgcaaacgctaaaacacctaaaaaaacaaaacccgccgacaaccgaaaccgccactaaaaaaccgctaccgcccctacgacacctaaacgacctaacccaaaactatacttccgattcgaactactttaacgacgacgat

SEQ ID NO: 35451 - DNA, 511 bp, Artificial Sequence
  chemically treated genomic DNA (Homo sapiens) CpG-island No: 35451
ttcgttttgtgtttataggtaggtgtttcgggattataattgtttgtagacgttgttgtagtatttgatttcgtatagtttgattatcgtgagtaacgcgtgcggtacgttttggaatttgtcggttcgtagcgttcgtgattaggagttgttgtgggatttgggcgtcgtgggtatgttgcgtaatttggtgtattttaagtataagatgatcgttatgggtagcgtcgtcgttttgcgtaatttgttggtttatcggttcgttaagtattaggcggtcgttatcgtcgtgtttttaggtagttgcgtgtttagtttgtacgtgcgtaagtagcgggcgttggaggtcgagttggacgtacggtatttcgcgtaggcgttggagtatttggagaagtagggttcgtcggtagtcgaggtcgttattaagaagtcgttgtcgtttttgcgatatttggacggtttggtttaagattatgttttcgattcgggttgttttgacgacgacgat

SEQ ID NO: 35452 - DNA, 511 bp, Artificial Sequence
  chemically treated genomic DNA (Homo sapiens) CpG-island No: 35452
atcgtcgtcgtcaaaacaacccgaatcgaaaacataatcttaaaccaaaccgtccaaatatcgcaaaaacgacaacgacttcttaataacgacctcgactaccgacgaaccctacttctccaaatactccaacgcctacgcgaaataccgtacgtccaactcgacctccaacgcccgctacttacgcacgtacaaactaaacacgcaactacctaaaaacacgacgataacgaccgcctaatacttaacgaaccgataaaccaacaaattacgcaaaacgacgacgctacccataacgatcatcttatacttaaaatacaccaaattacgcaacatacccacgacgcccaaatcccacaacaactcctaatcacgaacgctacgaaccgacaaattccaaaacgtaccgcacgcgttactcacgataatcaaactatacgaaatcaaatactacaacaacgtctacaaacaattataatcccgaaacacctacctataaacacaaaacgaa

SEQ ID NO: 35453 - DNA, 507 bp, Artificial Sequence
  chemically treated genomic DNA (Homo sapiens) CpG-island No: 35453
ggtcgcgtttttgttttttttttcgaggatatatattcgtttacgtgtagttgggttggcggggcgtttgggtttggggttttttttttttgcgcggtttcgcgggttttatcggaaatttcggttcggggtggtttcggagcgcgcgggtttcggggttttcgcggcgcgggtaggggtttcggggcggataaagttcggttcgggtttgggtaggcggcgttgtcgtttttagcgttgggcgagattatcgcgagcgggggaggatgcgggatgagggatgcgggtgagatagttaatgagggcgcgggaagacgggttggtgttatggtaatagttaatggcggttcggggcggggatcggcgtcggtcgcggggcgtcgggttttcgcgcgggtttaggggtcgtgagtgcggggggcgaaattttttcgagggaagggggtgtttcgaggattaagatttttgtgtttcgtattttattgtagggtgtaacggttttttaaa

SEQ ID NO: 35454 - DNA, 507 bp, Artificial Sequence
  chemically treated genomic DNA (Homo sapiens) CpG-island No: 35454
tttaaaaaaccgttacaccctacaataaaatacgaaacacaaaaatcttaatcctcgaaacacccccttccctcgaaaaaatttcgccccccgcactcacgacccctaaacccgcgcgaaaacccgacgccccgcgaccgacgccgatccccgccccgaaccgccattaactattaccataacaccaacccgtcttcccgcgccctcattaactatctcacccgcatccctcatcccgcatcctcccccgctcgcgataatctcgcccaacgctaaaaacgacaacgccgcctacccaaacccgaaccgaactttatccgccccgaaacccctacccgcgccgcgaaaaccccgaaacccgcgcgctccgaaaccaccccgaaccgaaatttccgataaaacccgcgaaaccgcgcaaaaaaaaaaaaccccaaacccaaacgccccgccaacccaactacacgtaaacgaatatatatcctcgaaaaaaaaaacaaaaacgcgacc

SEQ ID NO: 35455 - DNA, 507 bp, Artificial Sequence
  chemically treated genomic DNA (Homo sapiens) CpG-island No: 35455
tttaagaggtcgttgtattttgtaataaagtgcgggatataggaattttggttttcggggtatttttttttttcgggggggtttcgtttttcgtatttacggtttttgagttcgcgcggaggttcgacgtttcgcggtcgacgtcggttttcgtttcgggtcgttattggttgttgttatggtattagttcgttttttcgcgtttttattggttgttttattcgtattttttatttcgtattttttttcgttcgcggtggtttcgtttagcgttaggagcggtagcgtcgtttgtttaggttcggatcgggttttgttcgtttcggagtttttgttcgcgtcgcggagatttcggagttcgcgcgtttcgaggttatttcgggtcgggattttcggtggggttcgcggagtcgcgtagagggaggaggttttagatttaggcgtttcgttagtttagttgtacgtaagcgggtgtgtgttttcggggaggagggtaggggcgcgatt

SEQ ID NO: 35456 - DNA, 507 bp, Artificial Sequence
  chemically treated genomic DNA (Homo sapiens) CpG-island No: 35456
aatcgcgcccctaccctcctccccgaaaacacacacccgcttacgtacaactaaactaacgaaacgcctaaatctaaaacctcctccctctacgcgactccgcgaaccccaccgaaaatcccgacccgaaataacctcgaaacgcgcgaactccgaaatctccgcgacgcgaacaaaaactccgaaacgaacaaaacccgatccgaacctaaacaaacgacgctaccgctcctaacgctaaacgaaaccaccgcgaacgaaaaaaaatacgaaataaaaaatacgaataaaacaaccaataaaaacgcgaaaaaacgaactaataccataacaacaaccaataacgacccgaaacgaaaaccgacgtcgaccgcgaaacgtcgaacctccgcgcgaactcaaaaaccgtaaatacgaaaaacgaaacccccccgaaaaaaaaaaataccccgaaaaccaaaattcctatatcccgcactttattacaaaatacaacgacctcttaaa

SEQ ID NO: 35457 - DNA, 1043 bp, Artificial Sequence
  chemically treated genomic DNA (Homo sapiens) CpG-island No: 35457
gtcgttttagttggcgtagttttcgcgtcggcgtagtgaggaggggttcgagggttttttgtagaggtcgagggttgggttgggcgagttttgcgtttgcgtagattcggggttgggggtcgtagcggcgtacgagaggggtttttattttcgttagtttttcgaggcggtttttcggtaacggtttttacggcgacggtattagattttcgattttgtagttttcgcgcgttcgttttatgcgtttttcgtcgtcgcgttcgttgttttcgcggtgtggatttcgtttcgtttttgcgcggttcggagttttttttaacggttcgatttacgcgttttatttggttttcgaagaaggtcgagtgtagtaggtttaggagttttaggagttttatggagtcgcggtcgtttcggattcgtcgcgtttcgtttttcggcggttagggtgggggtgcgggacgcgaacggggtcgttttgcgtttgcgcggagaggggcgggaggggttagttcgcgggttcggggcggggtttttttcgaaaggggcgagggcgtatcgtggggtttgggggtgttcgcgggggttggggagtttcgcgggatcgaggttgcggaggggcggtgggagatttaaggatgggagagaggggaggggattcgcgtgggtcgagcggcgttagggttcgggttcgattacgttggggagttcgaatgcggaggaggttgggggggttcgaggcggcggggaggaggtcgggtgggggtgggggtacgagaggttttacggggaatgggggtcgcggggggttagaggcggcgtcgttatgcggttgtggttcgttgttcgcggacggttattttgcggaagttcggaattattttcgaattagttcggtttggcgcgttgaggtttattagttatttagtaaatattatttgcgcgtataaggtttgttgggcgtcgagttgggcgcgcggggggtcgtcgtaagggggcgatatcgaacgcggatatttatgtaataagtatttataaagtattta

SEQ ID NO: 35458 - DNA, 1043 bp, Artificial Sequence
  chemically treated genomic DNA (Homo sapiens) CpG-island No: 35458
taaatactttataaatacttattacataaatatccgcgttcgatatcgcccccttacgacgaccccccgcgcgcccaactcgacgcccaacaaaccttatacgcgcaaataatatttactaaataactaataaacctcaacgcgccaaaccgaactaattcgaaaataattccgaacttccgcaaaataaccgtccgcgaacaacgaaccacaaccgcataacgacgccgcctctaaccccccgcgacccccattccccgtaaaacctctcgtacccccacccccacccgacctcctccccgccgcctcgaacccccccaacctcctccgcattcgaactccccaacgtaatcgaacccgaaccctaacgccgctcgacccacgcgaatcccctcccctctctcccatccttaaatctcccaccgcccctccgcaacctcgatcccgcgaaactccccaacccccgcgaacacccccaaaccccacgatacgccctcgcccctttcgaaaaaaaccccgccccgaacccgcgaactaacccctcccgcccctctccgcgcaaacgcaaaacgaccccgttcgcgtcccgcacccccaccctaaccgccgaaaaacgaaacgcgacgaatccgaaacgaccgcgactccataaaactcctaaaactcctaaacctactacactcgaccttcttcgaaaaccaaataaaacgcgtaaatcgaaccgttaaaaaaaactccgaaccgcgcaaaaacgaaacgaaatccacaccgcgaaaacaacgaacgcgacgacgaaaaacgcataaaacgaacgcgcgaaaactacaaaatcgaaaatctaataccgtcgccgtaaaaaccgttaccgaaaaaccgcctcgaaaaactaacgaaaataaaaacccctctcgtacgccgctacgacccccaaccccgaatctacgcaaacgcaaaactcgcccaacccaaccctcgacctctacaaaaaaccctcgaacccctcctcactacgccgacgcgaaaactacgccaactaaaacgac

SEQ ID NO: 35459 - DNA, 1043 bp, Artificial Sequence
  chemically treated genomic DNA (Homo sapiens) CpG-island No: 35459
taggtgttttataaatgtttgttgtatgaatgttcgcgttcggtgtcgtttttttacggcggtttttcgcgcgtttagttcggcgtttagtaagttttgtgcgcgtaggtgatgtttgttgaatgattaatgaattttagcgcgttaagtcgggttgattcgggggtggtttcgagttttcgtagggtgatcgttcgcgggtagcggattatagtcgtatggcgacgtcgtttttggtttttcgcgatttttatttttcgtgggatttttcgtgtttttatttttattcggtttttttttcgtcgtttcgggtttttttagtttttttcgtattcgaattttttagcgtggtcggattcggattttggcgtcgttcggtttacgcgagttttttttttttttttttatttttggattttttatcgttttttcgtagtttcggtttcgcgagattttttagttttcgcgagtatttttagattttacggtacgttttcgtttttttcgggaggagtttcgtttcgggttcgcggattgatttttttcgttttttttcgcgtaggcgtagggcggtttcgttcgcgtttcgtatttttattttggtcgtcgaggggcggggcgcggcgggttcggggcggtcgcggttttatggggtttttggggtttttgagtttgttgtattcggtttttttcggggattaggtagggcgcgtgggtcgagtcgttggggagggtttcgggtcgcgtaggaacggggcggggtttatatcgcgggaatagcgggcgcggcggcggggggcgtatggggcgagcgcgcggaggttgtagagtcgggggtttagtgtcgtcgtcgtagagatcgttgtcgggaaatcgtttcggaaggttggcggggatggaagtttttttcgtgcgtcgttgcgatttttagtttcgggtttgcgtaagcgtagggttcgtttagtttagttttcggtttttgtaggagattttcggatttttttttattgcgtcgacgcggaggttgcgttagttggggcggt

SEQ ID NO: 35460 - DNA, 1043 bp, Artificial Sequence
  chemically treated genomic DNA (Homo sapiens) CpG-island No: 35460
accgccccaactaacgcaacctccgcgtcgacgcaataaaaaaaaatccgaaaatctcctacaaaaaccgaaaactaaactaaacgaaccctacgcttacgcaaacccgaaactaaaaatcgcaacgacgcacgaaaaaaacttccatccccgccaaccttccgaaacgatttcccgacaacgatctctacgacgacgacactaaacccccgactctacaacctccgcgcgctcgccccatacgccccccgccgccgcgcccgctattcccgcgatataaaccccgccccgttcctacgcgacccgaaaccctccccaacgactcgacccacgcgccctacctaatccccgaaaaaaaccgaatacaacaaactcaaaaaccccaaaaaccccataaaaccgcgaccgccccgaacccgccgcgccccgcccctcgacgaccaaaataaaaatacgaaacgcgaacgaaaccgccctacgcctacgcgaaaaaaaacgaaaaaaatcaatccgcgaacccgaaacgaaactcctcccgaaaaaaacgaaaacgtaccgtaaaatctaaaaatactcgcgaaaactaaaaaatctcgcgaaaccgaaactacgaaaaaacgataaaaaatccaaaaataaaaaaaaaaaaaaaaaactcgcgtaaaccgaacgacgccaaaatccgaatccgaccacgctaaaaaattcgaatacgaaaaaaactaaaaaaacccgaaacgacgaaaaaaaaaccgaataaaaataaaaacacgaaaaatcccacgaaaaataaaaatcgcgaaaaaccaaaaacgacgtcgccatacgactataatccgctacccgcgaacgatcaccctacgaaaactcgaaaccacccccgaatcaacccgacttaacgcgctaaaattcattaatcattcaacaaacatcacctacgcgcacaaaacttactaaacgccgaactaaacgcgcgaaaaaccgccgtaaaaaaacgacaccgaacgcgaacattcatacaacaaacatttataaaacaccta

SEQ ID NO: 35461 - DNA, 893 bp, Artificial Sequence
  chemically treated genomic DNA (Homo sapiens) CpG-island No: 35461
taacggggggtaggttgtaaataagtaaaaattttaacgtttttggatagttttttgggcgtaagattatatttagttttaaattcgcgcggagatcgtgttcgtttatcgtcgtagaggcgtttggattttcgtttcgtcgtttttattcggataagttttatcgttggtttagtttttgttcgcgattttcgcggtcgtttttattaggatatgtttagtagttggtcgaggtttacgtcgcggtaggtgaatttgcggaaggttcgtttttttttttgttttatttttgtttgtgcgggcgcggatcgggcgttagcgggatttcgatatttatttttcggggttatcgggttcgaggatatcgcggaagacgcgcggcgtcgtcggggatagaagttcgatagggatatatcgtttcgattcgttttcggggattattcgcggtttcgggttacgaggattcggatatgaaggttcggataggtttttttagtttcgcgtcgtttcgatatttattaagttcgtttttcgttttaatatttagtcgtttgtagggtcgggagtaagtcgtcgtagtcgcggggacgaattgcggttttcgcgagacggttagaggttggatggagtcggataggttcggtagagacgcgttaaatcgtaatatttattattttgtcggatttttagaagagatcgttttggttcgcgtttgcgtagttatcgcgagattgtcggtatgtttcgttttttcggtcgtgcgcgtatacgcgttttcgttttttcggcggcgaatacgcgttttttgtcgtttggagggtaaaatataggttgtagggattagagtagtcgtcgtttgaggtttgtagagtcgttttttttacggagtggga

SEQ ID NO: 35462 - DNA, 893 bp, Artificial Sequence
  chemically treated genomic DNA (Homo sapiens) CpG-island No: 35462
tcccactccgtaaaaaaaacgactctacaaacctcaaacgacgactactctaatccctacaacctatattttaccctccaaacgacaaaaaacgcgtattcgccgccgaaaaaacgaaaacgcgtatacgcgcacgaccgaaaaaacgaaacataccgacaatctcgcgataactacgcaaacgcgaaccaaaacgatctcttctaaaaatccgacaaaataataaatattacgatttaacgcgtctctaccgaacctatccgactccatccaacctctaaccgtctcgcgaaaaccgcaattcgtccccgcgactacgacgacttactcccgaccctacaaacgactaaatattaaaacgaaaaacgaacttaataaatatcgaaacgacgcgaaactaaaaaaacctatccgaaccttcatatccgaatcctcgtaacccgaaaccgcgaataatccccgaaaacgaatcgaaacgatatatccctatcgaacttctatccccgacgacgccgcgcgtcttccgcgatatcctcgaacccgataaccccgaaaaataaatatcgaaatcccgctaacgcccgatccgcgcccgcacaaacaaaaataaaacaaaaaaaaaaacgaaccttccgcaaattcacctaccgcgacgtaaacctcgaccaactactaaacatatcctaataaaaacgaccgcgaaaatcgcgaacaaaaactaaaccaacgataaaacttatccgaataaaaacgacgaaacgaaaatccaaacgcctctacgacgataaacgaacacgatctccgcgcgaatttaaaactaaatataatcttacgcccaaaaaactatccaaaaacgttaaaatttttacttatttacaacctaccccccgtta

SEQ ID NO: 35463 - DNA, 893 bp, Artificial Sequence
  chemically treated genomic DNA (Homo sapiens) CpG-island No: 35463
ttttatttcgtggaggaagcggttttgtagattttaggcggcggttgttttaatttttgtagtttgtgttttgttttttagacggtagagggcgcgtgttcgtcgtcgggaaagcggaagcgcgtgtgcgcgtacggtcgagggggcgggatatgtcggtagtttcgcgataattgcgtaggcgcggattaaagcgattttttttgaggattcggtaagatggtgagtgttgcgatttggcgcgtttttgtcgggtttattcggttttatttaatttttgatcgtttcgcgggggtcgtagttcgttttcgcggttacggcggtttgttttcgattttgtaggcggttggatgttggggcgaggggcggatttggtgggtgtcgggacgacgcggggttgggaaggtttgttcgggtttttatgttcgggttttcgtaattcggagtcgcgagtgattttcggggacgggtcgaagcggtgtgtttttgtcgggtttttgttttcggcggcgtcgcgcgtttttcgcggtgttttcgggttcggtggtttcgggagatgggtgtcgggatttcgttgacgttcgattcgcgttcgtataggtagaagtagagtagaagaagaagcggatttttcgtaagtttatttatcgcggcgtggatttcgattagttgttggatatgttttagtaagggcggtcgcgggggtcgcgggtaggggttgggttagcggtggggtttgttcgggtgagggcggcggggcgggggtttaagcgtttttgcggcggtgggcgggtacggttttcgcgcgggtttggaattgagtgtggttttgcgtttagaaaattgtttagagacgttgaggtttttgtttatttgtaatttgtttttcgttg

SEQ ID NO: 35464 - DNA, 893 bp, Artificial Sequence
  chemically treated genomic DNA (Homo sapiens) CpG-island No: 35464
caacgaaaaacaaattacaaataaacaaaaacctcaacgtctctaaacaattttctaaacgcaaaaccacactcaattccaaacccgcgcgaaaaccgtacccgcccaccgccgcaaaaacgcttaaacccccgccccgccgccctcacccgaacaaaccccaccgctaacccaacccctacccgcgacccccgcgaccgcccttactaaaacatatccaacaactaatcgaaatccacgccgcgataaataaacttacgaaaaatccgcttcttcttctactctacttctacctatacgaacgcgaatcgaacgtcaacgaaatcccgacacccatctcccgaaaccaccgaacccgaaaacaccgcgaaaaacgcgcgacgccgccgaaaacaaaaacccgacaaaaacacaccgcttcgacccgtccccgaaaatcactcgcgactccgaattacgaaaacccgaacataaaaacccgaacaaaccttcccaaccccgcgtcgtcccgacacccaccaaatccgcccctcgccccaacatccaaccgcctacaaaatcgaaaacaaaccgccgtaaccgcgaaaacgaactacgacccccgcgaaacgatcaaaaattaaataaaaccgaataaacccgacaaaaacgcgccaaatcgcaacactcaccatcttaccgaatcctcaaaaaaaatcgctttaatccgcgcctacgcaattatcgcgaaactaccgacatatcccgccccctcgaccgtacgcgcacacgcgcttccgctttcccgacgacgaacacgcgccctctaccgtctaaaaaacaaaacacaaactacaaaaattaaaacaaccgccgcctaaaatctacaaaaccgcttcctccacgaaataaaa

SEQ ID NO: 35465 - DNA, 680 bp, Artificial Sequence
  chemically treated genomic DNA (Homo sapiens) CpG-island No: 35465
ggggtgagtgttcgtcgtcgtgacgttcggggtggttttatgagtgtgcgcgtggggtgagtgttcgtcgtcgtgacgttcggggtggttttatgagtgtgcgcgtggggtgagtgttcgtcgtcgtgacgttcggggtggttttatgagtgtgcgcgtggggtgagtgttcgtcgtcgtgacgttcggggtggttttatgagtgtgcgcgtggggtgagtgttcgtcgtcgtgacgttcgggatggttttatgagtgtgcgcgtggggtgagtgttcgttgtcgtgattgtagggatggttttatgagtgtgcgcgtggggtgagtgttcgtcgtcgtgattgtagggatggttttatgagtgtgcgcgtggggtgagtgttcgtcgtcgtgattgtagggatggttttatgagtgtgcgcgtggggtgagtgttcgttgtcgttgacgatcgggatggttttatgagtgtgtgcgtggggtgagtgttcgttgtcgtgacggtcgggatggttttacgagtgtgtgcgtggggtgagtgttcgttgtcgtgacggttgggatggttttatgagtgtgtgcgtggggtgagtgttcgttgtcgtgacggtcgggatggttttatgagtgtttgtatgggttagaattattaagtggtgtagtttattacgtgtttatta

SEQ ID NO: 35466 - DNA, 680 bp, Artificial Sequence
  chemically treated genomic DNA (Homo sapiens) CpG-island No: 35466
taataaacacgtaataaactacaccacttaataattctaacccatacaaacactcataaaaccatcccgaccgtcacgacaacgaacactcaccccacgcacacactcataaaaccatcccaaccgtcacgacaacgaacactcaccccacgcacacactcgtaaaaccatcccgaccgtcacgacaacgaacactcaccccacgcacacactcataaaaccatcccgatcgtcaacgacaacgaacactcaccccacgcgcacactcataaaaccatccctacaatcacgacgacgaacactcaccccacgcgcacactcataaaaccatccctacaatcacgacgacgaacactcaccccacgcgcacactcataaaaccatccctacaatcacgacaacgaacactcaccccacgcgcacactcataaaaccatcccgaacgtcacgacgacgaacactcaccccacgcgcacactcataaaaccaccccgaacgtcacgacgacgaacactcaccccacgcgcacactcataaaaccaccccgaacgtcacgacgacgaacactcaccccacgcgcacactcataaaaccaccccgaacgtcacgacgacgaacactcaccccacgcgcacactcataaaaccaccccgaacgtcacgacgacgaacactcacccc

SEQ ID NO: 35467 - DNA, 680 bp, Artificial Sequence
  chemically treated genomic DNA (Homo sapiens) CpG-island No: 35467
taatgggtacgtagtaaattgtattatttgatgattttgatttatataaatatttatgaaattatttcgatcgttacggtagcgagtatttattttacgtatatatttatgaaattattttaatcgttacggtagcgagtatttattttacgtatatattcgtgaaattatttcgatcgttacggtagcgagtatttattttacgtatatatttatgaaattatttcgatcgttaacggtagcgagtatttattttacgcgtatatttatgaaattatttttatagttacggcggcgagtatttattttacgcgtatatttatgaaattatttttatagttacggcggcgagtatttattttacgcgtatatttatgaaattatttttatagttacggtagcgagtatttattttacgcgtatatttatgaaattatttcgaacgttacggcggcgagtatttattttacgcgtatatttatgaaattatttcgaacgttacggcggcgagtatttattttacgcgtatatttatgaaattatttcgaacgttacggcggcgagtatttattttacgcgtatatttatgaaattatttcgaacgttacggcggcgagtatttattttacgcgtatatttatgaaattatttcgaacgttacggcggcgagtatttatttt

SEQ ID NO: 35468 - DNA, 680 bp, Artificial Sequence
  chemically treated genomic DNA (Homo sapiens) CpG-island No: 35468
aaaataaatactcgccgccgtaacgttcgaaataatttcataaatatacgcgtaaaataaatactcgccgccgtaacgttcgaaataatttcataaatatacgcgtaaaataaatactcgccgccgtaacgttcgaaataatttcataaatatacgcgtaaaataaatactcgccgccgtaacgttcgaaataatttcataaatatacgcgtaaaataaatactcgccgccgtaacgttcgaaataatttcataaatatacgcgtaaaataaatactcgctaccgtaactataaaaataatttcataaatatacgcgtaaaataaatactcgccgccgtaactataaaaataatttcataaatatacgcgtaaaataaatactcgccgccgtaactataaaaataatttcataaatatacgcgtaaaataaatactcgctaccgttaacgatcgaaataatttcataaatatatacgtaaaataaatactcgctaccgtaacgatcgaaataatttcacgaatatatacgtaaaataaatactcgctaccgtaacgattaaaataatttcataaatatatacgtaaaataaatactcgctaccgtaacgatcgaaataatttcataaatatttatataaatcaaaatcatcaaataatacaatttactacgtacccatta

SEQ ID NO: 35469 - DNA, 1330 bp, Artificial Sequence
  chemically treated genomic DNA (Homo sapiens) CpG-island No: 35469
ttatatcgtgacgttcgggcgcgataaggagtcggtgttcgcggttattgggatgttcgagaacgtggatcgcgcgcgcgaggagatcgaggcgtatattacgttgcgtattggcgtttttatcgacgcgggtttcgatagcgatttttacgttaacggtatcgacgtttgtttggatttgttcggggcggtcgttagtttttgggttaagatttttaattagggacgacggttttttacggttacggtcggttttcgcggggatacggttttgggcgtttttagcgttttcgaggttttttacgcgggtagtcgcggcggttttttcgtgtcggatttaggtttcgttagtttttatagcggtttcggtaacgggggtttcgttttcggcgcggagggtttcggtgtttcggtggggacggtcgttttcgacgattgcgatttcggtttcgatttcgattttttggcgttggatttgatcgtgttcgtcgcggttattatttgggcgttttttgagcgcgtcgtttttttgttcgtttttagcggttgttttacggttaacggagtttcgggatttttcgtcgtcggcgttcggcgtagtagtggggtcgggatttttcgttattcgtttacgttgttcgagttcggcggttttcgtttggagttttcgttgtttcgtcgtggcgtttcggattcggtgggcgcgttgttttggcgattttcgtagggtttcgtattttttttaggcggcgtcgttttttttacggttatttcgttgtttagtagtttcgcggtcgtcgtttgcgtttttttggatttcggcgttttcgagaatagtcgtaagtttttttcggcgttttcggtttcggttttggcgcgagagtgcgtggtgtgcgtcgagggcgaggtgatggttgcgttggttttttgcggttataattttttttgtatggattgcgtcgttcgtatttgcggtaagagcgagttcgagtgtttcgtttgtcgtacgtcggttatttaggttatttatatttttttttagagcgcggattattacgtggtcggggttatttgcgggggttaggggtgggcgcgggagacggggcgggattcggggtgggagagggacggggagggggcgaggggcggaggtcgagggggtaggggggtgggcggcggttagtgtttatagatgagttttaattgtcgttttaggcgtggagacggagatttcgtagttcggcggcgttttagttttttaacgatagtattgagtggttaggttataataaatcggagagaaaaggttcgtttgtattttttttagttt

SEQ ID NO: 35470 - DNA, 1330 bp, Artificial Sequence
  chemically treated genomic DNA (Homo sapiens) CpG-island No: 35470
aaactaaaaaaaatacaaacgaaccttttctctccgatttattataacctaaccactcaatactatcgttaaaaaactaaaacgccgccgaactacgaaatctccgtctccacgcctaaaacgacaattaaaactcatctataaacactaaccgccgcccacccccctaccccctcgacctccgcccctcgccccctccccgtccctctcccaccccgaatcccgccccgtctcccgcgcccacccctaacccccgcaaataaccccgaccacgtaataatccgcgctctaaaaaaaaatataaataacctaaataaccgacgtacgacaaacgaaacactcgaactcgctcttaccgcaaatacgaacgacgcaatccatacaaaaaaaattataaccgcaaaaaaccaacgcaaccatcacctcgccctcgacgcacaccacgcactctcgcgccaaaaccgaaaccgaaaacgccgaaaaaaacttacgactattctcgaaaacgccgaaatccaaaaaaacgcaaacgacgaccgcgaaactactaaacaacgaaataaccgtaaaaaaaacgacgccgcctaaaaaaaatacgaaaccctacgaaaatcgccaaaacaacgcgcccaccgaatccgaaacgccacgacgaaacaacgaaaactccaaacgaaaaccgccgaactcgaacaacgtaaacgaataacgaaaaatcccgaccccactactacgccgaacgccgacgacgaaaaatcccgaaactccgttaaccgtaaaacaaccgctaaaaacgaacaaaaaaacgacgcgctcaaaaaacgcccaaataataaccgcgacgaacacgatcaaatccaacgccaaaaaatcgaaatcgaaaccgaaatcgcaatcgtcgaaaacgaccgtccccaccgaaacaccgaaaccctccgcgccgaaaacgaaacccccgttaccgaaaccgctataaaaactaacgaaacctaaatccgacacgaaaaaaccgccgcgactacccgcgtaaaaaacctcgaaaacgctaaaaacgcccaaaaccgtatccccgcgaaaaccgaccgtaaccgtaaaaaaccgtcgtccctaattaaaaatcttaacccaaaaactaacgaccgccccgaacaaatccaaacaaacgtcgataccgttaacgtaaaaatcgctatcgaaacccgcgtcgataaaaacgccaatacgcaacgtaatatacgcctcgatctcctcgcgcgcgcgatccacgttctcgaacatcccaataaccgcgaacaccgactccttatcgcgcccgaacgtcacgatataa

SEQ ID NO: 35471 - DNA, 1330 bp, Artificial Sequence
  chemically treated genomic DNA (Homo sapiens) CpG-island No: 35471
aaattaaaaaaagtgtaagcggatttttttttttcggtttattgtaatttgattatttaatattgtcgttgaagggttgaggcgtcgtcgggttgcggggttttcgtttttacgtttgaggcggtagttaaagtttatttgtaaatattggtcgtcgtttatttttttgttttttcggttttcgtttttcgtttttttttcgttttttttttatttcgggtttcgtttcgtttttcgcgtttatttttggttttcgtagatggtttcggttacgtggtggttcgcgttttaggaaaagatatgaatggtttgggtggtcggcgtgcggtaggcgggatattcgggttcgtttttgtcgtagatgcggacggcgtagtttatgtagaagaggttgtggtcgtaggggattagcgtagttattatttcgttttcggcgtatattacgtattttcgcgttagggtcggggtcgaggacgtcgaagggggtttgcggttgttttcggaggcgtcggagtttaggggggcgtaggcggcggtcgcggggttgttgggtagcgaggtggtcgtggagaaggcggcgtcgtttgggaaggatacggggttttgcgggggtcgttaggatagcgcgtttatcgggttcggggcgttacggcgagatagcgggagttttaggcggaggtcgtcgggttcgggtagcgtgggcgagtggcggggggtttcggttttattgttgcgtcgggcgtcggcggcgggaggtttcggggtttcgttgatcgtggagtagtcgttgaaggcgggtaagggggcggcgcgtttaaaaggcgtttagatggtggtcgcggcgggtacggttaggtttagcgttaggaagtcgaagtcgaagtcgaagtcgtagtcgtcgggggcggtcgtttttatcggggtatcgggatttttcgcgtcgaaggcgaagttttcgttgtcggagtcgttgtaggggttggcggggtttgggttcggtacggaggggtcgtcgcggttgttcgcgtagaaggtttcgggggcgttgggggcgtttagggtcgtgttttcgcggaggtcggtcgtggtcgtggggggtcgtcgtttttggttgggggttttggtttagaggttggcggtcgtttcgagtaggtttaggtagacgtcggtgtcgttggcgtggaagtcgttgtcggggttcgcgtcggtgaaggcgttagtgcgtagcgtgatgtgcgtttcgattttttcgcgcgcgcggtttacgttttcgggtattttagtgatcgcgaatatcggttttttgtcgcgttcgggcgttacgatgtag

SEQ ID NO: 35472 - DNA, 1330 bp, Artificial Sequence
  chemically treated genomic DNA (Homo sapiens) CpG-island No: 35472
ctacatcgtaacgcccgaacgcgacaaaaaaccgatattcgcgatcactaaaatacccgaaaacgtaaaccgcgcgcgcgaaaaaatcgaaacgcacatcacgctacgcactaacgccttcaccgacgcgaaccccgacaacgacttccacgccaacgacaccgacgtctacctaaacctactcgaaacgaccgccaacctctaaaccaaaacccccaaccaaaaacgacgaccccccacgaccacgaccgacctccgcgaaaacacgaccctaaacgcccccaacgcccccgaaaccttctacgcgaacaaccgcgacgacccctccgtaccgaacccaaaccccgccaacccctacaacgactccgacaacgaaaacttcgccttcgacgcgaaaaatcccgataccccgataaaaacgaccgcccccgacgactacgacttcgacttcgacttcgacttcctaacgctaaacctaaccgtacccgccgcgaccaccatctaaacgccttttaaacgcgccgcccccttacccgccttcaacgactactccacgatcaacgaaaccccgaaacctcccgccgccgacgcccgacgcaacaataaaaccgaaaccccccgccactcgcccacgctacccgaacccgacgacctccgcctaaaactcccgctatctcgccgtaacgccccgaacccgataaacgcgctatcctaacgacccccgcaaaaccccgtatccttcccaaacgacgccgccttctccacgaccacctcgctacccaacaaccccgcgaccgccgcctacgcccccctaaactccgacgcctccgaaaacaaccgcaaacccccttcgacgtcctcgaccccgaccctaacgcgaaaatacgtaatatacgccgaaaacgaaataataactacgctaatcccctacgaccacaacctcttctacataaactacgccgtccgcatctacgacaaaaacgaacccgaatatcccgcctaccgcacgccgaccacccaaaccattcatatcttttcctaaaacgcgaaccaccacgtaaccgaaaccatctacgaaaaccaaaaataaacgcgaaaaacgaaacgaaacccgaaataaaaaaaaaacgaaaaaaaaacgaaaaacgaaaaccgaaaaaacaaaaaaataaacgacgaccaatatttacaaataaactttaactaccgcctcaaacgtaaaaacgaaaaccccgcaacccgacgacgcctcaacccttcaacgacaatattaaataatcaaattacaataaaccgaaaaaaaaaaatccgcttacactttttttaattt

SEQ ID NO: 35473 - DNA, 710 bp, Artificial Sequence
  chemically treated genomic DNA (Homo sapiens) CpG-island No: 35473
gtatttaatcgtatttttggcgttagcgtcggaaaataacggtatcggtagttacgatttggcgatgaattttggtattcggggtttgaattcgcgtttcgttagtcgttcgatcgttttgatggacggtattttcgtttttttcgttttttacggttagtcgtagtttttattggttttcgtttcgttcggtaatatggatgttattgacgtggtacgcggtggtggtgcggtgcgttacggatcgtagagcgtgggcgtcgtggtgaattttgttattcgtgttatttcgtagattttggtatcgaggcgggcgtggaaggttagtttagtttaatttttttataaaataattcgaaagagacgtataatttgatggtgggcggtatagcggataacggttttggtaacggttgttttatttcggtacgcgcggtagtgatttgcgcgagtatagcgttattcgtatcgacgatttgatgttgaaaagtaaatatgcgtcggatgaggtgtatatttttaatagtttgttgtaatattacgacggtgaagtcgatacgttcggtggtttgtttcgcgcggattacgacgtcgatcgttggtaatttattcgttcgtatgatcgtttttggggtcgtcgtaagttggcgagtttgggttattagttttagttagatagttagtataaatttaatatttaggggttttat

SEQ ID NO: 35474 - DNA, 710 bp, Artificial Sequence
  chemically treated genomic DNA (Homo sapiens) CpG-island No: 35474
ataaaacccctaaatattaaatttatactaactatctaactaaaactaataacccaaactcgccaacttacgacgaccccaaaaacgatcatacgaacgaataaattaccaacgatcgacgtcgtaatccgcgcgaaacaaaccaccgaacgtatcgacttcaccgtcgtaatattacaacaaactattaaaaatatacacctcatccgacgcatatttacttttcaacatcaaatcgtcgatacgaataacgctatactcgcgcaaatcactaccgcgcgtaccgaaataaaacaaccgttaccaaaaccgttatccgctataccgcccaccatcaaattatacgtctctttcgaattattttataaaaaaattaaactaaactaaccttccacgcccgcctcgataccaaaatctacgaaataacacgaataacaaaattcaccacgacgcccacgctctacgatccgtaacgcaccgcaccaccaccgcgtaccacgtcaataacatccatattaccgaacgaaacgaaaaccaataaaaactacgactaaccgtaaaaaacgaaaaaaacgaaaataccgtccatcaaaacgatcgaacgactaacgaaacgcgaattcaaaccccgaataccaaaattcatcgccaaatcgtaactaccgataccgttattttccgacgctaacgccaaaaatacgattaaatac

SEQ ID NO: 35475 - DNA, 710 bp, Artificial Sequence
  chemically treated genomic DNA (Homo sapiens) CpG-island No: 35475
gtagaatttttgaatgttgaatttatgttggttgtttggttggaattggtagtttaggttcgttagtttgcgacgattttagaagcggttatacgggcgggtggattgttagcgatcggcgtcgtaattcgcgcgagataggttatcgggcgtgtcggttttatcgtcgtaatattgtagtaggttgttgaaggtgtgtattttattcggcgtatatttgttttttagtattaggtcgtcgatgcgggtggcgttgtgttcgcgtaggttattgtcgcgcgtgtcggagtagagtagtcgttgttaaaatcgttgttcgttgtgtcgtttattattaggttgtgcgtttttttcgggttgttttgtgaagaggttgggttgagttgattttttacgttcgtttcgatattaaagtttgcggaatggtacgggtaataaagtttattacgacgtttacgttttgcggttcgtaacgtatcgtattattatcgcgtattacgttaatggtatttatgttgtcgagcgaaacgggagttagtgaaagttgcggttgatcgtaaggggcgaaggggacggggatgtcgtttattaggacggtcgagcggttggcgaggcgcgggtttaggtttcggatgttaaagtttatcgttaggtcgtggttgtcggtgtcgttgtttttcggcgttgacgttagggatgcggttaagtat

SEQ ID NO: 35476 - DNA, 710 bp, Artificial Sequence
  chemically treated genomic DNA (Homo sapiens) CpG-island No: 35476
atacttaaccgcatccctaacgtcaacgccgaaaaacaacgacaccgacaaccacgacctaacgataaactttaacatccgaaacctaaacccgcgcctcgccaaccgctcgaccgtcctaataaacgacatccccgtccccttcgccccttacgatcaaccgcaactttcactaactcccgtttcgctcgacaacataaataccattaacgtaatacgcgataataatacgatacgttacgaaccgcaaaacgtaaacgtcgtaataaactttattacccgtaccattccgcaaactttaatatcgaaacgaacgtaaaaaatcaactcaacccaacctcttcacaaaacaacccgaaaaaaacgcacaacctaataataaacgacacaacgaacaacgattttaacaacgactactctactccgacacgcgcgacaataacctacgcgaacacaacgccacccgcatcgacgacctaatactaaaaaacaaatatacgccgaataaaatacacaccttcaacaacctactacaatattacgacgataaaaccgacacgcccgataacctatctcgcgcgaattacgacgccgatcgctaacaatccacccgcccgtataaccgcttctaaaatcgtcgcaaactaacgaacctaaactaccaattccaaccaaacaaccaacataaattcaacattcaaaaattctac

SEQ ID NO: 35477 - DNA, 547 bp, Artificial Sequence
  chemically treated genomic DNA (Homo sapiens) CpG-island No: 35477
tcggtgtcgttattggtgatagtgttttcgttttcgttattgacgatggtttggtcgtcgttaatttggatatcgatggatttcggatcggtgacggttatggtgtttttgttatttatcgttgcgttgtcgtcggtgatattaatatcgtgatcgtcgtcgttgatatttagatcgtcgttttgaattattttttcgttattgttagtaattttcgtatcggtggaatttttgtcgttaacggtggttttgtcgttgttgtttgtcgtggcgttattatcgttaatttgcgtgtcggtgttatcgttggtgatggcgtttcgttttcgttgttaataatcgtttggtcgtcgttaatttggatatcgatggatttcggatcggtgacggttatggtgtttttgttatttatcgttgcgtgtcgtcggtgatattaatatcgtgatcgtcgtcgttgatatttagatcgtcgttttgaataattttttcgttattatcgttgatttacgtatcggtggaatttttgtcgttaacggtggttttgtcg

SEQ ID NO: 35478 - DNA, 547 bp, Artificial Sequence
  chemically treated genomic DNA (Homo sapiens) CpG-island No: 35478
cgacaaaaccaccgttaacgacaaaaattccaccgatacgtaaatcaacgataataacgaaaaaattattcaaaacgacgatctaaatatcaacgacgacgatcacgatattaatatcaccgacgacacgcaacgataaataacaaaaacaccataaccgtcaccgatccgaaatccatcgatatccaaattaacgacgaccaaacgattattaacaacgaaaacgaaacgccatcaccaacgataacaccgacacgcaaattaacgataataacgccacgacaaacaacaacgacaaaaccaccgttaacgacaaaaattccaccgatacgaaaattactaacaataacgaaaaaataattcaaaacgacgatctaaatatcaacgacgacgatcacgatattaatatcaccgacgacaacgcaacgataaataacaaaaacaccataaccgtcaccgatccgaaatccatcgatatccaaattaacgacgaccaaaccatcgtcaataacgaaaacgaaaacactatcaccaataacgacaccga

SEQ ID NO: 35479 - DNA, 547 bp, Artificial Sequence
  chemically treated genomic DNA (Homo sapiens) CpG-island No: 35479
cggtaaaattatcgttgacggtaaggattttatcggtacgtaaattaacggtaataacggaaaagttatttaggacggcgatttggatgttagcggcggcggttacggtattgatattatcggcgatacgtaacggtggataataagggtattatgatcgttatcgattcggagtttatcggtatttaggttgacggcgattaggcggttgttaataacgaaggcgagacgttattattaacggtggtatcggtacgtagattaacggtgatgacgttacggtaaataataacggtaaaattatcgttgacggtaaggattttatcggtacggaaattgttggtaataacgggaaggtgatttaggacggcgatttggatgttagcggcggcggttacggtattgatattatcggcgatagcgtaacggtggataataagggtattatgatcgttatcgattcggagtttatcggtatttagattgacggcgattaggttatcgttaataacgaaggcgagagtattattattaatggcggtatcgg

SEQ ID NO: 35480 - DNA, 547 bp, Artificial Sequence
  chemically treated genomic DNA (Homo sapiens) CpG-island No: 35480
ccgataccgccattaataataatactctcgccttcgttattaacgataacctaatcgccgtcaatctaaataccgataaactccgaatcgataacgatcataatacccttattatccaccgttacgctatcgccgataatatcaataccgtaaccgccgccgctaacatccaaatcgccgtcctaaatcaccttcccgttattaccaacaatttccgtaccgataaaatccttaccgtcaacgataattttaccgttattatttaccgtaacgtcatcaccgttaatctacgtaccgataccaccgttaataataacgtctcgccttcgttattaacaaccgcctaatcgccgtcaacctaaataccgataaactccgaatcgataacgatcataatacccttattatccaccgttacgtatcgccgataatatcaataccgtaaccgccgccgctaacatccaaatcgccgtcctaaataacttttccgttattaccgttaatttacgtaccgataaaatccttaccgtcaacgataattttaccg

SEQ ID NO: 35481 - DNA, 887 bp, Artificial Sequence
  chemically treated genomic DNA (Homo sapiens) CpG-island No: 35481
ggaagcgattgttcgcgtcggggatgtggtgcgttttttcgtagatagcgaattgttcgttttttatgacggtttgatttttgggtaggagagtttgaaggtttacgtttgcgttggtttgttattgtttgtcgggtaaaatttgatcggcgtattgacgttcgacgggatgtagttcgattagttcgatgtttttagcgacgaagagttacggttgattgttgcgttggcggcgggagttttaagtaatgcgttgttgattgaataattggaaagttagaatatgttgttaggcgatgttacgtcgtttgaagcggtgaaatagacgtagatgattggtttgttttttggtatgacgtaattgataaaagagattgatattgtggcggcgttcgattttaacgttttgattagcggtgagattggaatcggtaaggagttggtggcgaaagcgtatttatgaagtttcgttacgggcggtgaattcgttggtttattttaattgtgttgtattgtcggaaagtgtggcggaaagtgagttgttcgggtatgtgaaaggagcgtttattggcgttattagtaatcgtagcgggaagtttgaaatggcggataacggtacgttgtttttggatgagatcggcgagttgtcgttggtattgtaggttaagttgttgaaggtgttgtagtatggcgatatttagcgcgttggcgatgatcgttgtttgtaggtcgatgtgcgtatgattggggcgattaatcgtaatttaagggaagaggtgttggtagggcgatttcgcgtcgatttgttatatcgtttgaacgtgttattaatttcggtgtcgcgttgcgtaaagagggcgtgatgtattatgttggcggggtatttt

SEQ ID NO: 35482 - DNA, 887 bp, Artificial Sequence
  chemically treated genomic DNA (Homo sapiens) CpG-island No: 35482
aaaataccccgccaacataatacatcacgccctctttacgcaacgcgacaccgaaattaataacacgttcaaacgatataacaaatcgacgcgaaatcgccctaccaacacctcttcccttaaattacgattaatcgccccaatcatacgcacatcgacctacaaacaacgatcatcgccaacgcgctaaatatcgccatactacaacaccttcaacaacttaacctacaataccaacgacaactcgccgatctcatccaaaaacaacgtaccgttatccgccatttcaaacttcccgctacgattactaataacgccaataaacgctcctttcacatacccgaacaactcactttccgccacactttccgacaatacaacacaattaaaataaaccaacgaattcaccgcccgtaacgaaacttcataaatacgctttcgccaccaactccttaccgattccaatctcaccgctaatcaaaacgttaaaatcgaacgccgccacaatatcaatctcttttatcaattacgtcataccaaaaaacaaaccaatcatctacgtctatttcaccgcttcaaacgacgtaacatcgcctaacaacatattctaactttccaattattcaatcaacaacgcattacttaaaactcccgccgccaacgcaacaatcaaccgtaactcttcgtcgctaaaaacatcgaactaatcgaactacatcccgtcgaacgtcaatacgccgatcaaattttacccgacaaacaataacaaaccaacgcaaacgtaaaccttcaaactctcctacccaaaaatcaaaccgtcataaaaaacgaacaattcgctatctacgaaaaaacgcaccacatccccgacgcgaacaatcgcttcc

SEQ ID NO: 35483 - DNA, 887 bp, Artificial Sequence
  chemically treated genomic DNA (Homo sapiens) CpG-island No: 35483
aaaatatttcgttagtataatatattacgttttttttacgtagcgcggtatcgaaattgataatacgtttaggcgatataataaatcggcgcggaatcgttttgttagtatttttttttttaaattgcggttagtcgttttagttatgcgtatatcgatttgtaaataacggttatcgttaacgcgttgaatatcgttatattgtaatatttttagtagtttggtttgtaatgttaacgataattcgtcgattttatttagaaatagcgtgtcgttattcgttattttaaatttttcgttgcgattattgatagcgttagtaaacgttttttttatatgttcgaataatttatttttcgttatatttttcggtagtgtagtatagttgagatagattagcggatttatcgttcgtggcgaggttttatgaatgcgttttcgttattagttttttatcggttttagttttatcgttgattaggacgttgagatcggacgtcgttataatgttaattttttttgttagttgcgttatgttaggggataagttaattatttgcgtttgttttatcgttttaaacggcgtggtatcgtttggtagtatattttggttttttagttgtttaattagtaacgtattgtttaaggttttcgtcgttagcgtagtaattagtcgtagtttttcgtcgttgaaaatatcgaattgatcgggttgtatttcgtcgagcgttagtgcgtcgattaggttttgttcggtaaataatggtagattaacgtaggcgtgaatttttagatttttttgtttaggaattaaatcgttatagggagcgggtaattcgttgtttgcgggaaagcgtattatattttcggcgcgggtaatcgttttt

SEQ ID NO: 35484 - DNA, 887 bp, Artificial Sequence
  chemically treated genomic DNA (Homo sapiens) CpG-island No: 35484
aaaaacgattacccgcgccgaaaatataatacgctttcccgcaaacaacgaattacccgctccctataacgatttaattcctaaacaaaaaaatctaaaaattcacgcctacgttaatctaccattatttaccgaacaaaacctaatcgacgcactaacgctcgacgaaatacaacccgatcaattcgatattttcaacgacgaaaaactacgactaattactacgctaacgacgaaaaccttaaacaatacgttactaattaaacaactaaaaaaccaaaatatactaccaaacgataccacgccgtttaaaacgataaaacaaacgcaaataattaacttatcccctaacataacgcaactaacaaaaaaaattaacattataacgacgtccgatctcaacgtcctaatcaacgataaaactaaaaccgataaaaaactaataacgaaaacgcattcataaaacctcgccacgaacgataaatccgctaatctatctcaactatactacactaccgaaaaatataacgaaaaataaattattcgaacatataaaaaaaacgtttactaacgctatcaataatcgcaacgaaaaatttaaaataacgaataacgacacgctatttctaaataaaatcgacgaattatcgttaacattacaaaccaaactactaaaaatattacaatataacgatattcaacgcgttaacgataaccgttatttacaaatcgatatacgcataactaaaacgactaaccgcaatttaaaaaaaaaaatactaacaaaacgattccgcgccgatttattatatcgcctaaacgtattatcaatttcgataccgcgctacgtaaaaaaaacgtaatatattatactaacgaaatatttt

SEQ ID NO: 35485 - DNA, 707 bp, Artificial Sequence
  chemically treated genomic DNA (Homo sapiens) CpG-island No: 35485
ttttggagttggagcgtaatacgcgtatcggtaagtacgttcgttttttgtcgacggtttatagcgacgtttgtatcggttgcggtaagtgcgaaaaagtatgcgtgttggaataatcggtaattaaggtgttatcgttgttattggcgaaaggggagttaggttattattatcgtttcggttggttggaggggaataatggtaaatcgtaaacgtgacgtcgggcgcgaggcgttggagaaaaaaggttggtggcgtagttatcgttggttggtgttacgtcgtttttgttagtttttcgtgttggggatgtttttgaggcggtttatggtttggtgtgtggattttgtacggtaattatagtagtagtttgttattcgatatcgtttcgttgatcgattcgttgatgacgttgtaaagttttgttagtggtatttgtttgttacggtggcgttgatcggtgcggtgattattatcgtgttttacgtttttggcgggaaagcgattattttgtagttgggtttgttcgttgaattcgattatcgatttagcgaattggttacgtaggcgttttgattttaattagtttgcgacgatttttcgttatattcgttacgtgttgttggtggttattttggtgggattagttttaattggtacgtttatttgggaatggattaatttcgtttttttgatggggcgtagtt

SEQ ID NO: 35486 - DNA, 707 bp, Artificial Sequence
  chemically treated genomic DNA (Homo sapiens) CpG-island No: 35486
aactacgccccatcaaaaaaacgaaattaatccattcccaaataaacgtaccaattaaaactaatcccaccaaaataaccaccaacaacacgtaacgaatataacgaaaaatcgtcgcaaactaattaaaatcaaaacgcctacgtaaccaattcgctaaatcgataatcgaattcaacgaacaaacccaactacaaaataatcgctttcccgccaaaaacgtaaaacacgataataatcaccgcaccgatcaacgccaccgtaacaaacaaataccactaacaaaactttacaacgtcatcaacgaatcgatcaacgaaacgatatcgaataacaaactactactataattaccgtacaaaatccacacaccaaaccataaaccgcctcaaaaacatccccaacacgaaaaactaacaaaaacgacgtaacaccaaccaacgataactacgccaccaaccttttttctccaacgcctcgcgcccgacgtcacgtttacgatttaccattattcccctccaaccaaccgaaacgataataataacctaactcccctttcgccaataacaacgataacaccttaattaccgattattccaacacgcatactttttcgcacttaccgcaaccgatacaaacgtcgctataaaccgtcgacaaaaaacgaacgtacttaccgatacgcgtattacgctccaactccaaaa

SEQ ID NO: 35487 - DNA, 707 bp, Artificial Sequence
  chemically treated genomic DNA (Homo sapiens) CpG-island No: 35487
ggttacgttttattagagaaacggggttgatttatttttaaatgagcgtgttagttaaggttgattttattagaatgattattaatagtacgtagcgaatgtggcgagggatcgtcgtagattgattgaggttaaagcgtttgcgtaattagttcgttaagtcggtaatcgggtttagcgggtagatttagttgtaaaataatcgttttttcgttagggacgtagagtacggtgataattatcgtatcggttaacgttatcgtggtaggtagatattattggtaagattttgtagcgttattagcggatcggttagcggaacggtgtcgaataataggttattgttgtagttgtcgtgtaagatttatatattaaattatggatcgttttaaaaatatttttagtacgaagaattgataaaggcgacgtaatattagttaacggtgattgcgttattagttttttttttttagcgtttcgcgttcggcgttacgtttacgatttgttattgtttttttttagttagtcgaagcggtaatggtgatttaatttttttttcgttagtgatagcggtaatattttgattgtcggttgttttagtacgtatattttttcgtatttatcgtaatcggtataggcgtcgttgtgaatcgtcggtagaaagcgggcgtgtttatcggtacgcgtgttgcgttttagttttaggg

SEQ ID NO: 35488 - DNA, 707 bp, Artificial Sequence
  chemically treated genomic DNA (Homo sapiens) CpG-island No: 35488
ccctaaaactaaaacgcaacacgcgtaccgataaacacgcccgctttctaccgacgattcacaacgacgcctataccgattacgataaatacgaaaaaatatacgtactaaaacaaccgacaatcaaaatattaccgctatcactaacgaaaaaaaaattaaatcaccattaccgcttcgactaactaaaaaaaaacaataacaaatcgtaaacgtaacgccgaacgcgaaacgctaaaaaaaaaaaactaataacgcaatcaccgttaactaatattacgtcgcctttatcaattcttcgtactaaaaatatttttaaaacgatccataatttaatatataaatcttacacgacaactacaacaataacctattattcgacaccgttccgctaaccgatccgctaataacgctacaaaatcttaccaataatatctacctaccacgataacgttaaccgatacgataattatcaccgtactctacgtccctaacgaaaaaacgattattttacaactaaatctacccgctaaacccgattaccgacttaacgaactaattacgcaaacgctttaacctcaatcaatctacgacgatccctcgccacattcgctacgtactattaataatcattctaataaaatcaaccttaactaacacgctcatttaaaaataaatcaaccccgtttctctaataaaacgtaacc

SEQ ID NO: 35489 - DNA, 614 bp, Artificial Sequence
  chemically treated genomic DNA (Homo sapiens) CpG-island No: 35489
ttttttcggcgtttaatttatttagtatgtcgttggcgtttttaaatagtcgttgcgttttaacgtttattattttattttttagaatgcgcggatatttttcggttagcgattaggttataaagaacggtgtttagtcgatgtaattacgtagcgtttcgatgttggtttcgattttttgtacgtcgagacggtgcgttatcggcggcgtgtaagtttgttagttaaaagcgaaatcgttatcgcgcgtcgtttttagcgtgatcggtggtgtgcgcggttttttgcgttcgtgttgaatacgtacgggttcgtattttttgcgggtacgagcgataaaattattacgttgggtatcggaaagtagcgtcgttattatattaacggtacgcgaggtattttgtatatatatcgtcgggtcgttgtagttttgttcgatttttatcgtcgcgtgcgtttttgaggtcgtcgcgtcgttaattagtaacggaatagtgaagttttgacgttttatttttttcgttacgttaattatttcgtttaacgacgggggtgataagttttcgaaagggttaattagaatagtaatttattttttttaagcgggaatcgga

SEQ ID NO: 35490 - DNA, 614 bp, Artificial Sequence
  chemically treated genomic DNA (Homo sapiens) CpG-island No: 35490
tccgattcccgcttaaaaaaaataaattactattctaattaaccctttcgaaaacttatcacccccgtcgttaaacgaaataattaacgtaacgaaaaaaataaaacgtcaaaacttcactattccgttactaattaacgacgcgacgacctcaaaaacgcacgcgacgataaaaatcgaacaaaactacaacgacccgacgatatatatacaaaatacctcgcgtaccgttaatataataacgacgctactttccgatacccaacgtaataattttatcgctcgtacccgcaaaaaatacgaacccgtacgtattcaacacgaacgcaaaaaaccgcgcacaccaccgatcacgctaaaaacgacgcgcgataacgatttcgcttttaactaacaaacttacacgccgccgataacgcaccgtctcgacgtacaaaaaatcgaaaccaacatcgaaacgctacgtaattacatcgactaaacaccgttctttataacctaatcgctaaccgaaaaatatccgcgcattctaaaaaataaaataataaacgttaaaacgcaacgactatttaaaaacgccaacgacatactaaataaattaaacgccgaaaaaa

SEQ ID NO: 35491 - DNA, 614 bp, Artificial Sequence
  chemically treated genomic DNA (Homo sapiens) CpG-island No: 35491
ttcggttttcgtttaaagaaagtgaattgttgttttgattggttttttcgggggtttattattttcgtcgttgaacgagatggttaacgtggcgaaagagatggagcgttagggttttattatttcgttattgattggcggcgcgacgattttaaaagcgtacgcggcggtgaaaatcgagtagaattatagcggttcgacggtgtatgtgtagaatgtttcgcgtatcgttggtgtggtggcggcgttgtttttcgatatttagcgtgatgattttgtcgttcgtattcgtaaggagtacgaattcgtacgtatttagtacgggcgtaagaaatcgcgtatattatcggttacgttggaagcggcgcgcgataacgatttcgtttttgattggtaggtttatacgtcgtcggtggcgtatcgtttcggcgtgtaggaagtcgaagttagtatcgaaacgttgcgtaattatatcgattggatatcgttttttatgatttggtcgttggtcgggaagtattcgcgtattttggaagatgaagtggtgggcgttgaggcgtagcggttgtttaaagacgttaacgatatgttggataaattaagcgtcgagaaaa

SEQ ID NO: 35492 - DNA, 614 bp, Artificial Sequence
  chemically treated genomic DNA (Homo sapiens) CpG-island No: 35492
ttttctcgacgcttaatttatccaacatatcgttaacgtctttaaacaaccgctacgcctcaacgcccaccacttcatcttccaaaatacgcgaatacttcccgaccaacgaccaaatcataaaaaacgatatccaatcgatataattacgcaacgtttcgatactaacttcgacttcctacacgccgaaacgatacgccaccgacgacgtataaacctaccaatcaaaaacgaaatcgttatcgcgcgccgcttccaacgtaaccgataatatacgcgatttcttacgcccgtactaaatacgtacgaattcgtactccttacgaatacgaacgacaaaatcatcacgctaaatatcgaaaaacaacgccgccaccacaccaacgatacgcgaaacattctacacatacaccgtcgaaccgctataattctactcgattttcaccgccgcgtacgcttttaaaatcgtcgcgccgccaatcaataacgaaataataaaaccctaacgctccatctctttcgccacgttaaccatctcgttcaacgacgaaaataataaacccccgaaaaaaccaatcaaaacaacaattcactttctttaaacgaaaaccgaa

SEQ ID NO: 35493 - DNA, 637 bp, Artificial Sequence
  chemically treated genomic DNA (Homo sapiens) CpG-island No: 35493
gcgttaggtttcgtttttttttcgggttcgttttcggtttggttattggtcgtagagttcgggggcgtggtcgagttggggttgggggcgttcgcggtgttcgttcgcgagtttcgttgtttttttttcggggttgcgggttcggcggtcgggttggttgggtcgcgtttgggttttcgcgtcggttttcgtattcgtaatggggaatttatattataagaggaaggtttttagcggttttcgggttcgtagtttttggcggttcgggcggtcggcgaagcggtcggtaggtaggggtcggggtgggggcggggtaggtagggaagagggtttttattgcggtcgtcgttatcgttgttgtcgtttttcggggtttggagggtgtgagtgtgggggggtcgggaatcgtcgcgtagattttattttttataggtatacggagatatacgtatacggtaatatttacgggcgggtatacgtatatgttcgtagtttatatagttatacgtataatatttatttaaatgtacggatacgtagatataggattatatatattattatatttatattttcgtattatcgtagtaggacgtatatagtttgagatataggtatatgtatatttatgtatgcg

SEQ ID NO: 35494 - DNA, 637 bp, Artificial Sequence
  chemically treated genomic DNA (Homo sapiens) CpG-island No: 35494
cgcatacataaatatacatatacctatatctcaaactatatacgtcctactacgataatacgaaaatataaatataataatatatataatcctatatctacgtatccgtacatttaaataaatattatacgtataactatataaactacgaacatatacgtatacccgcccgtaaatattaccgtatacgtatatctccgtatacctataaaaaataaaatctacgcgacgattcccgacccccccacactcacaccctccaaaccccgaaaaacgacaacaacgataacgacgaccgcaataaaaaccctcttccctacctaccccgcccccaccccgacccctacctaccgaccgcttcgccgaccgcccgaaccgccaaaaactacgaacccgaaaaccgctaaaaaccttcctcttataatataaattccccattacgaatacgaaaaccgacgcgaaaacccaaacgcgacccaaccaacccgaccgccgaacccgcaaccccgaaaaaaaaacaacgaaactcgcgaacgaacaccgcgaacgcccccaaccccaactcgaccacgcccccgaactctacgaccaataaccaaaccgaaaacgaacccgaaaaaaaaacgaaacctaacgc

SEQ ID NO: 35495 - DNA, 637 bp, Artificial Sequence
  chemically treated genomic DNA (Homo sapiens) CpG-island No: 35495
cgtatgtataggtatatatgtatttatgttttaggttgtgtgcgttttattgcgatggtacgagagtgtgggtgtgatggtgtatgtgattttgtgtttgcgtgttcgtatatttgagtgggtgttgtgcgtgtgattgtgtaaattgcgaatatgtacgtgtgttcgttcgtaggtattatcgtgtacgtgtgttttcgtgtgtttgtgaggggtggggtttgcgcggcgattttcgatttttttatatttatattttttaagtttcgggaggcggtagtagcggtggcgacgatcgtagtagggatttttttttttgtttgtttcgtttttatttcggtttttatttgtcggtcgtttcgtcgatcgttcgaatcgttagaagttgcggattcggggatcgttgggggttttttttttgtggtgtgagttttttattgcgggtgcgggagtcggcgcgggaatttaagcgcggtttagttagttcggtcgtcgggttcgtagtttcgggagggaggtagcgagattcgcgggcgggtatcgcgggcgtttttagttttagttcgattacgttttcgagttttgcggttaatggttaggtcgggggcgggttcggaggaggggcggggtttggcgt

SEQ ID NO: 35496 - DNA, 637 bp, Artificial Sequence
  chemically treated genomic DNA (Homo sapiens) CpG-island No: 35496
acgccaaaccccgcccctcctccgaacccgcccccgacctaaccattaaccgcaaaactcgaaaacgtaatcgaactaaaactaaaaacgcccgcgatacccgcccgcgaatctcgctacctccctcccgaaactacgaacccgacgaccgaactaactaaaccgcgcttaaattcccgcgccgactcccgcacccgcaataaaaaactcacaccacaaaaaaaaaacccccaacgatccccgaatccgcaacttctaacgattcgaacgatcgacgaaacgaccgacaaataaaaaccgaaataaaaacgaaacaaacaaaaaaaaaaatccctactacgatcgtcgccaccgctactaccgcctcccgaaacttaaaaaatataaatataaaaaaatcgaaaatcgccgcgcaaaccccacccctcacaaacacacgaaaacacacgtacacgataatacctacgaacgaacacacgtacatattcgcaatttacacaatcacacgcacaacacccactcaaatatacgaacacgcaaacacaaaatcacatacaccatcacacccacactctcgtaccatcgcaataaaacgcacacaacctaaaacataaatacatatatacctatacatacg

SEQ ID NO: 35497 - DNA, 800 bp, Artificial Sequence
  chemically treated genomic DNA (Homo sapiens) CpG-island No: 35497
tcgcgcgcggattttcggtagagttttttcggtcgtattttcgacgttttttcgcgtttagtttaggtgtcgatcgttttatttcggtttttgtttttggtttttttggttttgtttttcgtttttttggttcggggggcggtcggttcggcgttttcggttttcgtcgttttttttttgcgtcgtttgtttcgtagttagttgaaggcgcggcggaggtcggacgcgtcggagcgggatttttttttgcgcggggggtcgttcgggtttttcggtttttcggtcgtaggtgcggcggggggcgcgcgggtcgttatggtaggcgggggcggagcgggcggcgggttaggttttttgcggcgcggtgtttatgtcgggggcggtcgtcggggacgcgcgttcggagaaaagtttgggcggcggaggtcgagcgggcgcggagagcggacggcgggagcggcgcgggaggggtcggtcgagcggcgggcggggcgtaggtcggcgggagggaaggagcggggcgggagcggtcgtagggcgggagcgtcgttgtttgcggttttttttcgtttttttcggtttcggcggagggcgaggtttagtttcgagaggagggggtttcgggagttcggggtcgtgtttttcgttggggttcgagagggcgggtcgtggggtcgttcgggagggggcggtattgagggttcgtttcgtagggggttattcgcggggagatttgttcggaagaagggggtatgggggtggggatcgaaaaggggaagggttttagaaaaggaggaata

SEQ ID NO: 35498 - DNA, 800 bp, Artificial Sequence
  chemically treated genomic DNA (Homo sapiens) CpG-island No: 35498
tattcctccttttctaaaacccttccccttttcgatccccacccccatacccccttcttccgaacaaatctccccgcgaataaccccctacgaaacgaaccctcaataccgccccctcccgaacgaccccacgacccgccctctcgaaccccaacgaaaaacacgaccccgaactcccgaaaccccctcctctcgaaactaaacctcgccctccgccgaaaccgaaaaaaacgaaaaaaaaccgcaaacaacgacgctcccgccctacgaccgctcccgccccgctccttccctcccgccgacctacgccccgcccgccgctcgaccgacccctcccgcgccgctcccgccgtccgctctccgcgcccgctcgacctccgccgcccaaacttttctccgaacgcgcgtccccgacgaccgcccccgacataaacaccgcgccgcaaaaaacctaacccgccgcccgctccgcccccgcctaccataacgacccgcgcgccccccgccgcacctacgaccgaaaaaccgaaaaacccgaacgaccccccgcgcaaaaaaaaatcccgctccgacgcgtccgacctccgccgcgccttcaactaactacgaaacaaacgacgcaaaaaaaaaacgacgaaaaccgaaaacgccgaaccgaccgccccccgaaccaaaaaaacgaaaaacaaaaccaaaaaaaccaaaaacaaaaaccgaaataaaacgatcgacacctaaactaaacgcgaaaaaacgtcgaaaatacgaccgaaaaaactctaccgaaaatccgcgcgcga

SEQ ID NO: 35499 - DNA, 800 bp, Artificial Sequence
  chemically treated genomic DNA (Homo sapiens) CpG-island No: 35499
tgtttttttttttttggggtttttttttttttcggtttttatttttatatttttttttttcgaatagattttttcgcgggtggttttttgcgggacggatttttagtgtcgttttttttcgggcggttttacgattcgttttttcgggttttagcggggggtacgatttcgggttttcgggatttttttttttcgggattggatttcgtttttcgtcgggatcgggggaggcggggaggggtcgtaggtagcggcgttttcgttttgcggtcgttttcgtttcgttttttttttttcgtcggtttgcgtttcgttcgtcgttcggtcggtttttttcgcgtcgttttcgtcgttcgtttttcgcgttcgttcggttttcgtcgtttaaattttttttcgggcgcgcgttttcggcggtcgttttcggtatgggtatcgcgtcgtagggggtttgattcgtcgttcgtttcgttttcgtttgttatggcggttcgcgcgtttttcgtcgtatttgcggtcgaggagtcggggaattcgggcggtttttcgcgtaggaagaagtttcgtttcggcgcgttcggttttcgtcgcgtttttagttggttgcggggtaagcggcgtaagaagaaggcggcgggggtcgagggcgtcgaatcggtcgtttttcgggttaagaaggcggaggataaggttaagagggttaagggtaaaggtcgaggtaaggcggtcggtatttgggttgagcgcgggggggcgtcgagggtgcggtcgagggggttttgtcgggggttcgcgcgcgg

SEQ ID NO: 35500 - DNA, 800 bp, Artificial Sequence
  chemically treated genomic DNA (Homo sapiens) CpG-island No: 35500
ccgcgcgcgaacccccgacaaaaccccctcgaccgcaccctcgacgcccccccgcgctcaacccaaataccgaccgccttacctcgacctttacccttaaccctcttaaccttatcctccgccttcttaacccgaaaaacgaccgattcgacgccctcgacccccgccgccttcttcttacgccgcttaccccgcaaccaactaaaaacgcgacgaaaaccgaacgcgccgaaacgaaacttcttcctacgcgaaaaaccgcccgaattccccgactcctcgaccgcaaatacgacgaaaaacgcgcgaaccgccataacaaacgaaaacgaaacgaacgacgaatcaaaccccctacgacgcgatacccataccgaaaacgaccgccgaaaacgcgcgcccgaaaaaaaatttaaacgacgaaaaccgaacgaacgcgaaaaacgaacgacgaaaacgacgcgaaaaaaaccgaccgaacgacgaacgaaacgcaaaccgacgaaaaaaaaaaaacgaaacgaaaacgaccgcaaaacgaaaacgccgctacctacgacccctccccgcctcccccgatcccgacgaaaaacgaaatccaatcccgaaaaaaaaaaatcccgaaaacccgaaatcgtaccccccgctaaaacccgaaaaaacgaatcgtaaaaccgcccgaaaaaaaacgacactaaaaatccgtcccgcaaaaaaccacccgcgaaaaaatctattcgaaaaaaaaaaatataaaaataaaaaccgaaaaaaaaaaaaaccccaaaaaaaaaaaaaca

SEQ ID NO: 35501 - DNA, 553 bp, Artificial Sequence
  chemically treated genomic DNA (Homo sapiens) CpG-island No: 35501
ggcggggttcgggattaggtgaacgttgatttgatagttgatacgggacgattgtggtattatttttgttgtcgttaatatttcgagagggaggaggttgggtcgggagggtttttcggggcggggcggaggaggagggaatgtaaaatagagtttcgttttcggaatttaagaagtagtaacgttttttattataaattcggagttgttttttcgttaatgattttagcgtttgatagttaggattttaggtagtagcgagtgataggacgtttggatcggcgcgtcgttagtagttttgtcgggtcgcggcggtgatcgatggggagcggttggagcggatttagcgagtgagggcgtatagtcgggacgtcgaggcggcgggcgggagattcgtattagcgtagtcggttttcggcgggacgtgacgtagcgttcggggcgcgggtgagttcgcgcggatcgttaggtatgtttgggggattttaagggcggggtgttaagttttatgttacggtgttttaattgttggttttatattgggaagttttcg

SEQ ID NO: 35502 - DNA, 553 bp, Artificial Sequence
  chemically treated genomic DNA (Homo sapiens) CpG-island No: 35502
cgaaaacttcccaatataaaaccaacaattaaaacaccgtaacataaaacttaacaccccgcccttaaaatcccccaaacatacctaacgatccgcgcgaactcacccgcgccccgaacgctacgtcacgtcccgccgaaaaccgactacgctaatacgaatctcccgcccgccgcctcgacgtcccgactatacgccctcactcgctaaatccgctccaaccgctccccatcgatcaccgccgcgacccgacaaaactactaacgacgcgccgatccaaacgtcctatcactcgctactacctaaaatcctaactatcaaacgctaaaatcattaacgaaaaaacaactccgaatttataataaaaaacgttactacttcttaaattccgaaaacgaaactctattttacattccctcctcctccgccccgccccgaaaaaccctcccgacccaacctcctccctctcgaaatattaacgacaacaaaaataataccacaatcgtcccgtatcaactatcaaatcaacgttcacctaatcccgaaccccgcc

SEQ ID NO: 35503 - DNA, 553 bp, Artificial Sequence
  chemically treated genomic DNA (Homo sapiens) CpG-island No: 35503
cgagagttttttagtatagagttagtagttaggatatcgtgatatgaaatttagtatttcgtttttgaagttttttaagtatgtttggcggttcgcgcggatttattcgcgtttcgggcgttgcgttacgtttcgtcgagggtcggttgcgttggtgcgggtttttcgttcgtcgtttcggcgtttcggttgtgcgtttttattcgttgggttcgttttagtcgttttttatcgattatcgtcgcggttcggtagagttgttagcggcgcgtcggtttagacgttttgttattcgttgttgtttggggttttggttgttaggcgttggaattattggcgaggaggtagtttcgaatttatagtgaggggcgttgttgttttttgggtttcggggacgaggttttgttttgtatttttttttttttcgtttcgtttcgggagattttttcggtttaattttttttttttcgggatattgacggtagtaaggatgatgttatagtcgtttcgtgttaattattagattagcgtttatttggtttcgaatttcgtt

SEQ ID NO: 35504 - DNA, 553 bp, Artificial Sequence
  chemically treated genomic DNA (Homo sapiens) CpG-island No: 35504
aacgaaattcgaaaccaaataaacgctaatctaataattaacacgaaacgactataacatcatccttactaccgtcaatatcccgaaaaaaaaaaaattaaaccgaaaaaatctcccgaaacgaaacgaaaaaaaaaaaaatacaaaacaaaacctcgtccccgaaacccaaaaaacaacaacgcccctcactataaattcgaaactacctcctcgccaataattccaacgcctaacaaccaaaaccccaaacaacaacgaataacaaaacgtctaaaccgacgcgccgctaacaactctaccgaaccgcgacgataatcgataaaaaacgactaaaacgaacccaacgaataaaaacgcacaaccgaaacgccgaaacgacgaacgaaaaacccgcaccaacgcaaccgaccctcgacgaaacgtaacgcaacgcccgaaacgcgaataaatccgcgcgaaccgccaaacatacttaaaaaacttcaaaaacgaaatactaaatttcatatcacgatatcctaactactaactctatactaaaaaactctcg

SEQ ID NO: 35505 - DNA, 525 bp, Artificial Sequence
  chemically treated genomic DNA (Homo sapiens) CpG-island No: 35505
ttacggtattagtttttggaaagttagggagacgcggattttttagattcgtagttcggtcgcgtggggcggcgcgtaggtgacggattaggagttgcgttttgttacgagtgaggggcggacgggagacgtcgaggtcggcgagggggtacgcgttagttttatagttcggcgggtaagaaggagggtaggtaggggtttcgagtcgcgggcggcgggggttcgttatatatatatttattgtcgtagttgcgaataggaagtattaatcgggaattaaaacgcgtagagggacggggaggggcgaggataaatgaggtaaggaggtcgcgttcgcgtagattcgggagggaaggtattttcggggataatatagttttagttatcgttttttcgttttcgtttatttgtcgcgtttgatgtgcgtatgcgtagtgggtgcgaatcgttttttgtttcgtttataattattaggtttgttttttttgttttttttttttttttttttaattttttttgaagtta

SEQ ID NO: 35506 - DNA, 525 bp, Artificial Sequence
  chemically treated genomic DNA (Homo sapiens) CpG-island No: 35506
taacttcaaaaaaaattaaaaaaaaaaaaaaaaaaaacaaaaaaaacaaacctaataattataaacgaaacaaaaaacgattcgcacccactacgcatacgcacatcaaacgcgacaaataaacgaaaacgaaaaaacgataactaaaactatattatccccgaaaataccttccctcccgaatctacgcgaacgcgacctccttacctcatttatcctcgcccctccccgtccctctacgcgttttaattcccgattaatacttcctattcgcaactacgacaataaatatatatataacgaacccccgccgcccgcgactcgaaacccctacctaccctccttcttacccgccgaactataaaactaacgcgtaccccctcgccgacctcgacgtctcccgtccgcccctcactcgtaacaaaacgcaactcctaatccgtcacctacgcgccgccccacgcgaccgaactacgaatctaaaaaatccgcgtctccctaactttccaaaaactaataccgtaa

SEQ ID NO: 35507 - DNA, 525 bp, Artificial Sequence
  chemically treated genomic DNA (Homo sapiens) CpG-island No: 35507
tagttttaagagaagttgggaaggggaagggggaaagtaaggaaggtaaatttaataattatgggcggggtagagaacggttcgtatttattacgtatgcgtatattaggcgcggtaggtgggcggggacggaaaggcggtgattagagttgtgttgttttcggaagtgttttttttttcgggtttgcgcggacgcggtttttttattttatttgttttcgttttttttcgtttttttacgcgttttggttttcggttggtgttttttgttcgtagttgcggtagtgagtatgtgtgtgacggattttcgtcgttcgcggttcgggatttttgtttatttttttttttgttcgtcgggttgtggaattagcgcgtgttttttcgtcggtttcgacgtttttcgttcgttttttattcgtggtagggcgtagtttttggttcgttatttgcgcgtcgttttacgcggtcgggttgcgggtttagggggttcgcgtttttttggttttttaagggttaatgtcgtga

SEQ ID NO: 35508 - DNA, 525 bp, Artificial Sequence
  chemically treated genomic DNA (Homo sapiens) CpG-island No: 35508
tcacgacattaacccttaaaaaaccaaaaaaacgcgaaccccctaaacccgcaacccgaccgcgtaaaacgacgcgcaaataacgaaccaaaaactacgccctaccacgaataaaaaacgaacgaaaaacgtcgaaaccgacgaaaaaacacgcgctaattccacaacccgacgaacaaaaaaaaaaataaacaaaaatcccgaaccgcgaacgacgaaaatccgtcacacacatactcactaccgcaactacgaacaaaaaacaccaaccgaaaaccaaaacgcgtaaaaaaacgaaaaaaaacgaaaacaaataaaataaaaaaaccgcgtccgcgcaaacccgaaaaaaaaaacacttccgaaaacaacacaactctaatcaccgcctttccgtccccgcccacctaccgcgcctaatatacgcatacgtaataaatacgaaccgttctctaccccgcccataattattaaatttaccttccttactttcccccttccccttcccaacttctcttaaaacta

SEQ ID NO: 35509 - DNA, 1098 bp, Artificial Sequence
  chemically treated genomic DNA (Homo sapiens) CpG-island No: 35509
atttgtagcgaggttcggaaatcggtttcgttagagtcgattttattcgttaggaatgcgtttcgttttcgtcgttttttcgcggtaatcgtttttgggtttttttcgttttaggggtaggagatagttcgaggggagcgtcgtttcggttcgttataatatcgtcgggtcggtcgtcggtcgtataggtattaggaggatagggtttggggcggattttacgttttatttcggttttcgcggttcgggagacgttcgcgtttgggtcgggtaggggattcggagttgatcgaggtttgattttttaagtcggttacggtttcgagtttacgttggatattggaggagacgttttttttatcggattttcgaatttatttttgtttcgggtaggggcgttagggttgcggttcggttagagttttttgggtcgtaagcgagagtcgttttttttttttcgtttcggggcgtaagttttttcgggtgttcgttcgtatttttaattttttagagcggcggtagcgtagggtggcgggcgagtaggtttattttttagtagcggcgatagtagtttgaggaagcgcgggggagggttttttcgatgcgtcgaggcgttttttaatcggggcggagacgacggaggggaggagtttcgacggtcgttttttcgaatttttttttcgtagttgtggttcgacggttgttttcgggaattagcgtcgtaattattatttttttttttcgtagttttcgtttttttttttttttttttttatttttttttttcgttttcggtcgtttcgttttagcgcgtcgttcgcgtgttgtgcgttatggcgttacgtttatcgggttcgttgcgggcggttttggacgcggttgtttttttgcgtacgttcgtttcgcgttcgcgtaggagtcgtttcgttgtattcgggtggtttcgattgcggtttttacgtttgtttttggcggaggggatttcgtttcgagcgcgtcgggtagtggggtcggtgtttttttggtcggtttttcgtggtttagagagcgttttttttaaggataggtcggggtggttggagttgcgttcggttgaag

SEQ ID NO: 35510 - DNA, 1098 bp, Artificial Sequence
  chemically treated genomic DNA (Homo sapiens) CpG-island No: 35510
cttcaaccgaacgcaactccaaccaccccgacctatccttaaaaaaaacgctctctaaaccacgaaaaaccgaccaaaaaaacaccgaccccactacccgacgcgctcgaaacgaaatcccctccgccaaaaacaaacgtaaaaaccgcaatcgaaaccacccgaatacaacgaaacgactcctacgcgaacgcgaaacgaacgtacgcaaaaaaacaaccgcgtccaaaaccgcccgcaacgaacccgataaacgtaacgccataacgcacaacacgcgaacgacgcgctaaaacgaaacgaccgaaaacgaaaaaaaaaaataaaaaaaaaaaaaaaaaaaaacgaaaactacgaaaaaaaaaaataataattacgacgctaattcccgaaaacaaccgtcgaaccacaactacgaaaaaaaaattcgaaaaaacgaccgtcgaaactcctcccctccgtcgtctccgccccgattaaaaaacgcctcgacgcatcgaaaaaaccctcccccgcgcttcctcaaactactatcgccgctactaaaaaataaacctactcgcccgccaccctacgctaccgccgctctaaaaaattaaaaatacgaacgaacacccgaaaaaacttacgccccgaaacgaaaaaaaaaaaacgactctcgcttacgacccaaaaaactctaaccgaaccgcaaccctaacgcccctacccgaaacaaaaataaattcgaaaatccgataaaaaaaacgtctcctccaatatccaacgtaaactcgaaaccgtaaccgacttaaaaaatcaaacctcgatcaactccgaatcccctacccgacccaaacgcgaacgtctcccgaaccgcgaaaaccgaaataaaacgtaaaatccgccccaaaccctatcctcctaatacctatacgaccgacgaccgacccgacgatattataacgaaccgaaacgacgctcccctcgaactatctcctacccctaaaacgaaaaaaacccaaaaacgattaccgcgaaaaaacgacgaaaacgaaacgcattcctaacgaataaaatcgactctaacgaaaccgatttccgaacctcgctacaaat

SEQ ID NO: 35511 - DNA, 1098 bp, Artificial Sequence
  chemically treated genomic DNA (Homo sapiens) CpG-island No: 35511
ttttaatcgggcgtagttttagttatttcgatttgtttttggaggagacgttttttgggttacggagaatcggttagggagatatcggttttattgttcggcgcgttcgaggcgaagtttttttcgttagggataggcgtgggggtcgtagtcggggttattcgggtgtagcggggcggtttttgcgcgggcgcggaacgaacgtgcgtaagggaatagtcgcgtttagagtcgttcgtagcgggttcggtgggcgtgacgttatgacgtatagtacgcgggcggcgcgttggggcggggcggtcgggggcgggaggaagaagtgggaggaggaggaggggaaagcgggggttgcgggagggggaggtggtagttgcggcgttggttttcgggagtagtcgtcgagttataattgcggaggaggagttcgggaaagcggtcgtcgggatttttttttttcgtcgttttcgtttcggttgagaggcgtttcggcgtatcggagggattttttttcgcgtttttttaggttgttgtcgtcgttgttgggagatgggtttattcgttcgttattttgcgttgtcgtcgttttgaggagttaaaggtacgggcgggtattcggaggagtttgcgtttcggagcgggagagaaggggcggttttcgtttacgatttagggagttttggtcgggtcgtagttttagcgtttttgttcgggatagaaatggattcggaagttcggtgggaaaggcgttttttttagtgtttagcgtgggttcggggtcgtggtcggtttagggggttaggtttcggttagtttcgggttttttattcggtttaggcgcgggcgtttttcgggtcgcgggggtcgaggtggagcgtgggattcgttttaagttttgtttttttggtgtttgtgcggtcggcggtcggttcggcgatattatgacgggtcgaggcggcgtttttttcgagttgttttttgtttttaaagcgggggagatttaagggcggttgtcgcggggaggcggcgggggcggaacgtatttttgacgggtgaaatcggttttaacgggatcgattttcgggtttcgttgtaaat

SEQ ID NO: 35512 - DNA, 1098 bp, Artificial Sequence
  chemically treated genomic DNA (Homo sapiens) CpG-island No: 35512
atttacaacgaaacccgaaaatcgatcccgttaaaaccgatttcacccgtcaaaaatacgttccgcccccgccgcctccccgcgacaaccgcccttaaatctcccccgctttaaaaacaaaaaacaactcgaaaaaaacgccgcctcgacccgtcataatatcgccgaaccgaccgccgaccgcacaaacaccaaaaaaacaaaacttaaaacgaatcccacgctccacctcgacccccgcgacccgaaaaacgcccgcgcctaaaccgaataaaaaacccgaaactaaccgaaacctaaccccctaaaccgaccacgaccccgaacccacgctaaacactaaaaaaaacgcctttcccaccgaacttccgaatccatttctatcccgaacaaaaacgctaaaactacgacccgaccaaaactccctaaatcgtaaacgaaaaccgccccttctctcccgctccgaaacgcaaactcctccgaatacccgcccgtacctttaactcctcaaaacgacgacaacgcaaaataacgaacgaataaacccatctcccaacaacgacgacaacaacctaaaaaaacgcgaaaaaaaatccctccgatacgccgaaacgcctctcaaccgaaacgaaaacgacgaaaaaaaaaaatcccgacgaccgctttcccgaactcctcctccgcaattataactcgacgactactcccgaaaaccaacgccgcaactaccacctccccctcccgcaacccccgctttcccctcctcctcctcccacttcttcctcccgcccccgaccgccccgccccaacgcgccgcccgcgtactatacgtcataacgtcacgcccaccgaacccgctacgaacgactctaaacgcgactattcccttacgcacgttcgttccgcgcccgcgcaaaaaccgccccgctacacccgaataaccccgactacgacccccacgcctatccctaacgaaaaaaacttcgcctcgaacgcgccgaacaataaaaccgatatctccctaaccgattctccgtaacccaaaaaacgtctcctccaaaaacaaatcgaaataactaaaactacgcccgattaaaa

SEQ ID NO: 35513 - DNA, 557 bp, Artificial Sequence
  chemically treated genomic DNA (Homo sapiens) CpG-island No: 35513
taattggaaaaaaagttacgtacgcgttgattttcggtaaatttattattagattaacggattgcgattacgtaacgcgaaatcgaatttttcgtacgtatcggagtgtcgagcgtttattcgaacgcgtatcgaaatttttttaatttaatcgttatagtattcgttatagttttttttcgtttatggttatatttttaattttttatatcgaatttttacgtatagcgtatattcgcgttagttatcgttatattagtatcgattatttatttttataagttcgcgaggggttattattcgaatatttattttcgttaacgtattacgtttttattttattaagttacgtattatatatgttcgaaattaacgtacgagcgacgatatatattacgtcggatttaatttaagatataattttttgtatttagttacgatcgtttttttttcggtttagtaattatttatttatttagtttcggtacggtacggattattttttattaatatttttatttatgttacgtagtaagtacgtttttattacgattatt

SEQ ID NO: 35514 - DNA, 557 bp, Artificial Sequence
  chemically treated genomic DNA (Homo sapiens) CpG-island No: 35514
aataatcgtaataaaaacgtacttactacgtaacataaataaaaatattaataaaaaataatccgtaccgtaccgaaactaaataaataaataattactaaaccgaaaaaaaaacgatcgtaactaaatacaaaaaattatatcttaaattaaatccgacgtaatatatatcgtcgctcgtacgttaatttcgaacatatataatacgtaacttaataaaataaaaacgtaatacgttaacgaaaataaatattcgaataataacccctcgcgaacttataaaaataaataatcgatactaatataacgataactaacgcgaatatacgctatacgtaaaaattcgatataaaaaattaaaaatataaccataaacgaaaaaaaactataacgaatactataacgattaaattaaaaaaatttcgatacgcgttcgaataaacgctcgacactccgatacgtacgaaaaattcgatttcgcgttacgtaatcgcaatccgttaatctaataataaatttaccgaaaatcaacgcgtacgtaactttttttccaatta

SEQ ID NO: 35515 - DNA, 557 bp, Artificial Sequence
  chemically treated genomic DNA (Homo sapiens) CpG-island No: 35515
agtggtcgtagtgggggcgtgtttgttgcgtagtatggatgagggtgttaatgagggatggttcgtatcgtgtcggagttgggtggatgggtgattgttgagtcgggaggagaacggtcgtagttgggtgtagggagttgtgttttaggttgggttcgacgtgatgtgtgtcgtcgttcgtacgttagtttcgggtatgtgtggtgcgtagtttagtggggtggaagcgtggtacgttggcgagggtgggtgttcgggtgatggtttttcgcgggtttgtagagataggtaatcggtgttggtgtagcggtggttggcgcgagtgtgcgttatgcgtaggagttcggtatggagagttaagggtatagttatgagcggagggaggttatagcgggtattgtagcgattaggttgaagaggtttcggtgcgcgttcgagtaagcgttcgatatttcgatacgtgcggggagttcggtttcgcgttgcgtaatcgtagttcgttagtttggtgatgagtttgtcggaagttagcgcgtgcgtagttttttttttaattg

SEQ ID NO: 35516 - DNA, 557 bp, Artificial Sequence
  chemically treated genomic DNA (Homo sapiens) CpG-island No: 35516
caattaaaaaaaaaactacgcacgcgctaacttccgacaaactcatcaccaaactaacgaactacgattacgcaacgcgaaaccgaactccccgcacgtatcgaaatatcgaacgcttactcgaacgcgcaccgaaacctcttcaacctaatcgctacaatacccgctataacctccctccgctcataactatacccttaactctccataccgaactcctacgcataacgcacactcgcgccaaccaccgctacaccaacaccgattacctatctctacaaacccgcgaaaaaccatcacccgaacacccaccctcgccaacgtaccacgcttccaccccactaaactacgcaccacacatacccgaaactaacgtacgaacgacgacacacatcacgtcgaacccaacctaaaacacaactccctacacccaactacgaccgttctcctcccgactcaacaatcacccatccacccaactccgacacgatacgaaccatccctcattaacaccctcatccatactacgcaacaaacacgcccccactacgaccact

SEQ ID NO: 35517 - DNA, 1009 bp, Artificial Sequence
  chemically treated genomic DNA (Homo sapiens) CpG-island No: 35517
tttttacgtacggttttagaaagacggggatagggcgcggtttaggttttatatattttgttagttaatgatcgcgtcgtttttttttcggtcggcgattcgattaatttaagaaggttggtgtaattttcggttttattcggttgttttcgttgatgcgggtagtttgggggtcgtcgtcgttaaatagacgtttttttttttaattttttttttatgtgtttattttcgggttcggcgtcgattcggatgttcgaggtagaaggatgtttgattttcggataagcgaggcgttgttgtgtatttatttcgggttgtatcggtggcgatagtagaggttcgggcggcgatttttcggttagcggcggcggtaggaggtattagcggtagtgtagggatcgaattcgagtagcgttgcgttatttttttttttcgtttttttttttttatttcgttcgttcgttcgttcgttttttgcgtggttcgtttttttttttcggtcgtcggcgggtgtgatgtgtcgtcgtcgttgttttcgtcggcgttgacggattgggggcgtcgttcgcgttcgggatcgatttttttgttcgcggtcgcgtttttgaggtaaagttttttgcgcgtaggtgtttcgttgttagtttcggttcggcggttgtttcggcgcggtcgcggcgttttttttttcgggtggggttggggtttcgggcgggtggggtggggtgcggcgggggcggcgtcgtaggcgcgggtgtcgggggaggggtgggcgagattatggcgggtggttcggagcgttggtaggagggggtcgcggtcggagttgaaggcgcggagggttaggggtagcgggggtcgcgggtggcgggtcgggttgggtgtaaaagttgtcggagtggtgcggcgcgattggggcggcgagggaggtgggttaattgggtcggcgggggtttttttaggagagattgggaggtggggagtgtcgtttacggtgttttttgattgt

SEQ ID NO: 35518 - DNA, 1009 bp, Artificial Sequence
  chemically treated genomic DNA (Homo sapiens) CpG-island No: 35518
acaatcaaaaaacaccgtaaacgacactccccacctcccaatctctcctaaaaaaacccccgccgacccaattaacccacctccctcgccgccccaatcgcgccgcaccactccgacaacttttacacccaacccgacccgccacccgcgacccccgctacccctaaccctccgcgccttcaactccgaccgcgaccccctcctaccaacgctccgaaccacccgccataatctcgcccacccctcccccgacacccgcgcctacgacgccgcccccgccgcaccccaccccacccgcccgaaaccccaaccccacccgaaaaaaaaaacgccgcgaccgcgccgaaacaaccgccgaaccgaaactaacaacgaaacacctacgcgcaaaaaactttacctcaaaaacgcgaccgcgaacaaaaaaatcgatcccgaacgcgaacgacgcccccaatccgtcaacgccgacgaaaacaacgacgacgacacatcacacccgccgacgaccgaaaaaaaaaaacgaaccacgcaaaaaacgaacgaacgaacgaacgaaataaaaaaaaaaaaacgaaaaaaaaaaataacgcaacgctactcgaattcgatccctacactaccgctaatacctcctaccgccgccgctaaccgaaaaatcgccgcccgaacctctactatcgccaccgatacaacccgaaataaatacacaacaacgcctcgcttatccgaaaatcaaacatccttctacctcgaacatccgaatcgacgccgaacccgaaaataaacacataaaaaaaaaattaaaaaaaaaaacgtctatttaacgacgacgacccccaaactacccgcatcaacgaaaacaaccgaataaaaccgaaaattacaccaaccttcttaaattaatcgaatcgccgaccgaaaaaaaaacgacgcgatcattaactaacaaaatatataaaacctaaaccgcgccctatccccgtctttctaaaaccgtacgtaaaaa

SEQ ID NO: 35519 - DNA, 1009 bp, Artificial Sequence
  chemically treated genomic DNA (Homo sapiens) CpG-island No: 35519
atagttaaggagtatcgtgggcgatattttttattttttaattttttttaaggaagttttcgtcggtttagttggtttatttttttcgtcgttttagtcgcgtcgtattatttcggtaatttttgtatttagttcgattcgttattcgcggttttcgttgtttttagtttttcgcgtttttagtttcgatcgcggtttttttttgttaacgtttcgggttattcgttatggtttcgtttatttttttttcgatattcgcgtttgcggcgtcgttttcgtcgtattttattttattcgttcgggattttagttttattcgggagggagggcgtcgcggtcgcgtcgaggtagtcgtcgggtcggggttggtagcggagtatttacgcgtagggggttttattttaaaggcgcggtcgcgagtagaggggtcggtttcgggcgcgggcggcgtttttagttcgttagcgtcggcgggggtagcggcggcggtatattatattcgtcggcggtcggaggaggaaagcgagttacgtagggagcgagcgagcgagcgagcgaggtaggggggaaggagcgagagagagaggtaacgtagcgttgttcggattcggtttttgtattgtcgttggtgttttttatcgtcgtcgttggtcggagagtcgtcgttcgagtttttgttgtcgttatcgatgtagttcggaatgaatgtatagtagcgtttcgtttattcggaggttaaatatttttttgtttcgggtattcggatcgacgtcggattcggaagtgaatatatggaaaaaaaattaaaaaggaaagcgtttgtttagcggcggcggtttttaagttgttcgtattagcgaaaatagtcgagtagagtcgaagattgtattaatttttttggattggtcggatcgtcgatcggaaaggagacggcgcggttattggttggtaaggtgtataaagtttaagtcgcgttttattttcgtttttttagagtcgtgcgtgaggg

SEQ ID NO: 35520 - DNA, 1009 bp, Artificial Sequence
  chemically treated genomic DNA (Homo sapiens) CpG-island No: 35520
ccctcacgcacgactctaaaaaaacgaaaataaaacgcgacttaaactttatacaccttaccaaccaataaccgcgccgtctcctttccgatcgacgatccgaccaatccaaaaaaattaatacaatcttcgactctactcgactattttcgctaatacgaacaacttaaaaaccgccgccgctaaacaaacgctttcctttttaattttttttccatatattcacttccgaatccgacgtcgatccgaatacccgaaacaaaaaaatatttaacctccgaataaacgaaacgctactatacattcattccgaactacatcgataacgacaacaaaaactcgaacgacgactctccgaccaacgacgacgataaaaaacaccaacgacaatacaaaaaccgaatccgaacaacgctacgttacctctctctctcgctccttcccccctacctcgctcgctcgctcgctcgctccctacgtaactcgctttcctcctccgaccgccgacgaatataatataccgccgccgctacccccgccgacgctaacgaactaaaaacgccgcccgcgcccgaaaccgacccctctactcgcgaccgcgcctttaaaataaaaccccctacgcgtaaatactccgctaccaaccccgacccgacgactacctcgacgcgaccgcgacgccctccctcccgaataaaactaaaatcccgaacgaataaaataaaatacgacgaaaacgacgccgcaaacgcgaatatcgaaaaaaaaataaacgaaaccataacgaataacccgaaacgttaacaaaaaaaaaccgcgatcgaaactaaaaacgcgaaaaactaaaaacaacgaaaaccgcgaataacgaatcgaactaaatacaaaaattaccgaaataatacgacgcgactaaaacgacgaaaaaaataaaccaactaaaccgacgaaaacttccttaaaaaaaattaaaaaataaaaaatatcgcccacgatactccttaactat

SEQ ID NO: 35521 - DNA, 680 bp, Artificial Sequence
  chemically treated genomic DNA (Homo sapiens) CpG-island No: 35521
attacgaggttttacgagaaggggaggtatttgcgaggcggttaggttattattaggcggcgcgtcggattcgagtagcgaagagtagttagcgaggttttgtaggtttatggtggtgagggttgcgcggggagatcgggagatacgcgtcgggcgggttttgagttttttcgttaggttcgtagttaggacgttagagttcgggggagagaagttttttcgagttgtgcgcgtcgtattttttcggcgcggggaattcgaggggtagcgtgggtgttacggggtttatttggtagcgttgtgggttcggcgttcgggggattttcgtatatcgatatcgggttttcgtttgtgtattcggggaagaattttcgcggaggagcgaattggtcgggtatataaacgttgaacgcgggttagttttcggggtatcgagcgcgtagatttcgttcggttcgaattaatcgttttattttttttttcggttttttcggtttgtagagtagcgttcggttcggtagtgttagtattttgttggggtagatgttgtcgaaggttcgacggtcggtcgcgtcgttttcgtacgtttgtattgtgttttttgttttcgggtgtcgattgttcggaggcggcggttcgggttggggtagcgatttatattttgtattttttttagtgtt

SEQ ID NO: 35522 - DNA, 680 bp, Artificial Sequence
  chemically treated genomic DNA (Homo sapiens) CpG-island No: 35522
aacactaaaaaaaatacaaaatataaatcgctaccccaacccgaaccgccgcctccgaacaatcgacacccgaaaacaaaaaacacaatacaaacgtacgaaaacgacgcgaccgaccgtcgaaccttcgacaacatctaccccaacaaaatactaacactaccgaaccgaacgctactctacaaaccgaaaaaaccgaaaaaaaaaataaaacgattaattcgaaccgaacgaaatctacgcgctcgataccccgaaaactaacccgcgttcaacgtttatatacccgaccaattcgctcctccgcgaaaattcttccccgaatacacaaacgaaaacccgatatcgatatacgaaaatcccccgaacgccgaacccacaacgctaccaaataaaccccgtaacacccacgctacccctcgaattccccgcgccgaaaaaatacgacgcgcacaactcgaaaaaacttctctcccccgaactctaacgtcctaactacgaacctaacgaaaaaactcaaaacccgcccgacgcgtatctcccgatctccccgcgcaaccctcaccaccataaacctacaaaacctcgctaactactcttcgctactcgaatccgacgcgccgcctaataataacctaaccgcctcgcaaatacctccccttctcgtaaaacctcgtaat

SEQ ID NO: 35523 - DNA, 680 bp, Artificial Sequence
  chemically treated genomic DNA (Homo sapiens) CpG-island No: 35523
ggtattgaagggagtgtagggtgtggatcgttgttttagttcgggtcgtcgttttcgagtagtcggtattcggaggtaggaggtataatgtaggcgtgcgggggcggcgcggtcggtcgtcgggttttcgatagtatttgttttaatagaatgttggtattgtcgggtcgggcgttgttttgtaagtcggggaagtcggagaggaaggtggggcggttgattcgggtcgggcggggtttgcgcgttcggtgtttcgagggttgattcgcgtttaacgtttgtgtgttcggttagttcgttttttcgcggaagttttttttcggatgtataggcgggagttcggtgtcggtgtacgaggatttttcggacgtcgagtttatagcgttgttaggtgagtttcgtggtatttacgttatttttcgggtttttcgcgtcgggagggtgcggcgcgtatagttcggaggagtttttttttttcgggttttgacgttttagttgcgagtttggcggagaggtttagggttcgttcggcgcgtgtttttcggttttttcgcgtagtttttattattatagatttgtaggatttcgttgattgtttttcgttattcgggttcgacgcgtcgtttggtggtgatttggtcgtttcgtaggtatttttttttttcgtggagtttcgtggt

SEQ ID NO: 35524 - DNA, 680 bp, Artificial Sequence
  chemically treated genomic DNA (Homo sapiens) CpG-island No: 35524
accacgaaactccacgaaaaaaaaaaatacctacgaaacgaccaaatcaccaccaaacgacgcgtcgaacccgaataacgaaaaacaatcaacgaaatcctacaaatctataataataaaaactacgcgaaaaaaccgaaaaacacgcgccgaacgaaccctaaacctctccgccaaactcgcaactaaaacgtcaaaacccgaaaaaaaaaaactcctccgaactatacgcgccgcaccctcccgacgcgaaaaacccgaaaaataacgtaaataccacgaaactcacctaacaacgctataaactcgacgtccgaaaaatcctcgtacaccgacaccgaactcccgcctatacatccgaaaaaaaacttccgcgaaaaaacgaactaaccgaacacacaaacgttaaacgcgaatcaaccctcgaaacaccgaacgcgcaaaccccgcccgacccgaatcaaccgccccaccttcctctccgacttccccgacttacaaaacaacgcccgacccgacaataccaacattctattaaaacaaatactatcgaaaacccgacgaccgaccgcgccgcccccgcacgcctacattatacctcctacctccgaataccgactactcgaaaacgacgacccgaactaaaacaacgatccacaccctacactcccttcaatacc

SEQ ID NO: 35525 - DNA, 883 bp, Artificial Sequence
  chemically treated genomic DNA (Homo sapiens) CpG-island No: 35525
gtttttcgcgggtggaagtggtttttttgcgttttgcggaaggcgtagtagttttggtcgtagtcgcggaaggtttgtagatttagttgcgttacgggttgggtcgggtcgggtagggggttattatttcgcgtcgtagaggggttttttgcgtcgtttgagtcggagttgggggattcgaataggtcgtaaatgtcggagtttttcgggagcgggtacgggtttaggggatgtagcggttgtttttttcggaggcgcggacgtttgtttttttttatcggggcgcgaaggttttggtcgttgtttcgttttttcgttcgggcggcggggttcgaggggttggtgggatagggggttattatgatgcggtcgggtggtcgttttattatttttaacgttcgggttgcggcgggtagtaaacgcgtattcgaaagtgcgaaggaggtcgggtttagaggttggcgcggttttaagtattcggtcggttttttttttttattatattttcggttttttattggttgagtttagagcggtatcggagtcgcgatttttcggttggagaattattcgttttagggcgtaggtagcgcgtcgttttcgcggttcgtcggggggagggggagttgtagcgcgcgttcggtattcgtttttcgcgtttgcgttttgcgttatttgggtaatcggagttcgggtcgttgcgggagttcgggttattgcggagttcggtgtacggagtgggagtagggttgcggcgggcgtagttaagcggtttcgttgcgtcggttaaaatatttttttagggggtatttttttgtttttggttagatggtttcgatacgtgcgggtatttttaatttaggtcggtaattttgtaaaggtt

SEQ ID NO: 35526 - DNA, 883 bp, Artificial Sequence
  chemically treated genomic DNA (Homo sapiens) CpG-island No: 35526
aacctttacaaaattaccgacctaaattaaaaatacccgcacgtatcgaaaccatctaaccaaaaacaaaaaaataccccctaaaaaaatattttaaccgacgcaacgaaaccgcttaactacgcccgccgcaaccctactcccactccgtacaccgaactccgcaataacccgaactcccgcaacgacccgaactccgattacccaaataacgcaaaacgcaaacgcgaaaaacgaataccgaacgcgcgctacaactccccctccccccgacgaaccgcgaaaacgacgcgctacctacgccctaaaacgaataattctccaaccgaaaaatcgcgactccgataccgctctaaactcaaccaataaaaaaccgaaaatataataaaaaaaaaaaaccgaccgaatacttaaaaccgcgccaacctctaaacccgacctccttcgcactttcgaatacgcgtttactacccgccgcaacccgaacgttaaaaataataaaacgaccacccgaccgcatcataataaccccctatcccaccaacccctcgaaccccgccgcccgaacgaaaaaacgaaacaacgaccaaaaccttcgcgccccgataaaaaaaaacaaacgtccgcgcctccgaaaaaaacaaccgctacatcccctaaacccgtacccgctcccgaaaaactccgacatttacgacctattcgaatcccccaactccgactcaaacgacgcaaaaaacccctctacgacgcgaaataataaccccctacccgacccgacccaacccgtaacgcaactaaatctacaaaccttccgcgactacgaccaaaactactacgccttccgcaaaacgcaaaaaaaccacttccacccgcgaaaaac

SEQ ID NO: 35527 - DNA, 883 bp, Artificial Sequence
  chemically treated genomic DNA (Homo sapiens) CpG-island No: 35527
gatttttataaaattatcgatttgggttagaggtgttcgtacgtgtcgagattatttggttaaggatagaaagatgttttttgggagaatgttttaatcggcgtagcggagtcgtttggttgcgttcgtcgtagttttatttttatttcgtgtatcgggtttcgtagtgattcgggttttcgtagcgattcgggtttcggttgtttaggtaacgtaggacgtaggcgcgaaaggcgggtgtcgggcgcgcgttgtagtttttttttttttcggcgggtcgcggaggcgacgcgttgtttgcgttttgaggcgagtggttttttagtcggaaaatcgcggtttcggtgtcgttttgggtttagttagtgagaggtcgggggtgtggtagagagaaggagtcggtcgggtatttaggatcgcgttagtttttgagttcggtttttttcgtattttcgagtgcgcgtttgttgttcgtcgtagttcgggcgttgaaggtagtaaagcggttattcggtcgtattatggtgattttttgttttattagtttttcgagtttcgtcgttcgagcggggaggcgggataacgattagaattttcgcgtttcggtgaagaagagtaggcgttcgcgttttcggaggaagtagtcgttgtattttttgaattcgtgttcgttttcgggagatttcggtatttgcgatttgttcgagttttttagtttcggtttagacggcgtagagagtttttttgcggcgcggggtggtagttttttgttcggttcggtttagttcgtggcgtagttagatttatagatttttcgcgattacggttagagttgttacgtttttcgtaaggcgtaggagagttatttttattcgcgggaggt

SEQ ID NO: 35528 - DNA, 883 bp, Artificial Sequence
  chemically treated genomic DNA (Homo sapiens) CpG-island No: 35528
acctcccgcgaataaaaataactctcctacgccttacgaaaaacgtaacaactctaaccgtaatcgcgaaaaatctataaatctaactacgccacgaactaaaccgaaccgaacaaaaaactaccaccccgcgccgcaaaaaaactctctacgccgtctaaaccgaaactaaaaaactcgaacaaatcgcaaataccgaaatctcccgaaaacgaacacgaattcaaaaaatacaacgactacttcctccgaaaacgcgaacgcctactcttcttcaccgaaacgcgaaaattctaatcgttatcccgcctccccgctcgaacgacgaaactcgaaaaactaataaaacaaaaaatcaccataatacgaccgaataaccgctttactaccttcaacgcccgaactacgacgaacaacaaacgcgcactcgaaaatacgaaaaaaaccgaactcaaaaactaacgcgatcctaaatacccgaccgactccttctctctaccacacccccgacctctcactaactaaacccaaaacgacaccgaaaccgcgattttccgactaaaaaaccactcgcctcaaaacgcaaacaacgcgtcgcctccgcgacccgccgaaaaaaaaaaaaactacaacgcgcgcccgacacccgcctttcgcgcctacgtcctacgttacctaaacaaccgaaacccgaatcgctacgaaaacccgaatcactacgaaacccgatacacgaaataaaaataaaactacgacgaacgcaaccaaacgactccgctacgccgattaaaacattctcccaaaaaacatctttctatccttaaccaaataatctcgacacgtacgaacacctctaacccaaatcgataattttataaaaatc

SEQ ID NO: 35529 - DNA, 686 bp, Artificial Sequence
  chemically treated genomic DNA (Homo sapiens) CpG-island No: 35529
tttttgttttttttttggtttgttttcggtttttttttcgttattttcgtttcgcgtttggtacggcgtcggcgcgttttagtcgtttaatttcggttcgtagttttgattttttgttcgtcgggttttttcggtacgtgtttcgcgttttatgggatcgcgcgttttttcggggcgttttttcgcggtttttcgtttgggggagtcgggtttgggggagcgggtcgtttcggttcggaggtggggtcggcgggggcgggcgggtcggcgcggcggcgggaagggacgttgtttttttaaggtgttatcgtcgcgtggtagggaaatagtttgtgttagttttatttcgttcggtttcgttcgttataagaaatataatgtataataattaggcgcgcgtttggagttatgttacgcggcgggggcggggcggggtcgcgcgtcgggcggggcgggggattcggggtttcggttttcgatttgcgttttgggttcgtaggggagttttgttttatgttattcgcggggtcgttttgtgttttagcgaggtgtttcggtgtttttcgtttcgttcgcgtttgttttttttttttcgttatttcgttttttataaagtttatttttattaatttttttttaggttattttttttttatatttgataatcggggttttttattttttta

SEQ ID NO: 35530 - DNA, 686 bp, Artificial Sequence
  chemically treated genomic DNA (Homo sapiens) CpG-island No: 35530
taaaaaaataaaaaaccccgattatcaaatataaaaaaaaaataacctaaaaaaaaattaataaaaataaactttataaaaaacgaaataacgaaaaaaaaaaaacaaacgcgaacgaaacgaaaaacaccgaaacacctcgctaaaacacaaaacgaccccgcgaataacataaaacaaaactcccctacgaacccaaaacgcaaatcgaaaaccgaaaccccgaatcccccgccccgcccgacgcgcgaccccgccccgcccccgccgcgtaacataactccaaacgcgcgcctaattattatacattatatttcttataacgaacgaaaccgaacgaaataaaactaacacaaactatttccctaccacgcgacgataacaccttaaaaaaacaacgtcccttcccgccgccgcgccgacccgcccgcccccgccgaccccacctccgaaccgaaacgacccgctcccccaaacccgactcccccaaacgaaaaaccgcgaaaaaacgccccgaaaaaacgcgcgatcccataaaacgcgaaacacgtaccgaaaaaacccgacgaacaaaaaatcaaaactacgaaccgaaattaaacgactaaaacgcgccgacgccgtaccaaacgcgaaacgaaaataacgaaaaaaaaaccgaaaacaaaccaaaaaaaaaacaaaaa

SEQ ID NO: 35531 - DNA, 686 bp, Artificial Sequence
  chemically treated genomic DNA (Homo sapiens) CpG-island No: 35531
tgggagaatgaggggtttcgattgttagatgtgagggggaagtggtttggaaaagagttagtgggaatgaattttgtagggagcgagatggcggggagggaggggtaagcgcgggcgaggcggggggtatcggggtatttcgttggggtatagggcggtttcgcgggtagtatggggtaggatttttttgcgggtttaggacgtaggtcgggggtcgagatttcggatttttcgtttcgttcggcgcgcggtttcgtttcgttttcgtcgcgtggtatggttttaagcgcgcgtttgattgttatgtattgtgttttttgtagcgaacggagtcgggcggaatggggttggtataagttgtttttttgttacgcggcggtggtattttaaaggggtagcgttttttttcgtcgtcgcgtcggttcgttcgttttcgtcgattttattttcgagtcggggcgattcgtttttttaagttcggtttttttaagcgggaggtcgcggggaggcgtttcgggagggcgcgcggttttatggggcgcggggtacgtgtcgagggagttcggcgggtaggaagttagggttgcgagtcgggattgggcggttggggcgcgtcggcgtcgtgttaggcgcggggcgggggtggcgaggagagaatcgggagtaagttaggagaaggataagga

SEQ ID NO: 35532 - DNA, 686 bp, Artificial Sequence
  chemically treated genomic DNA (Homo sapiens) CpG-island No: 35532
tccttatccttctcctaacttactcccgattctctcctcgccacccccgccccgcgcctaacacgacgccgacgcgccccaaccgcccaatcccgactcgcaaccctaacttcctacccgccgaactccctcgacacgtaccccgcgccccataaaaccgcgcgccctcccgaaacgcctccccgcgacctcccgcttaaaaaaaccgaacttaaaaaaacgaatcgccccgactcgaaaataaaatcgacgaaaacgaacgaaccgacgcgacgacgaaaaaaaacgctacccctttaaaataccaccgccgcgtaacaaaaaaacaacttataccaaccccattccgcccgactccgttcgctacaaaaaacacaatacataacaatcaaacgcgcgcttaaaaccataccacgcgacgaaaacgaaacgaaaccgcgcgccgaacgaaacgaaaaatccgaaatctcgacccccgacctacgtcctaaacccgcaaaaaaatcctaccccatactacccgcgaaaccgccctataccccaacgaaataccccgataccccccgcctcgcccgcgcttacccctccctccccgccatctcgctccctacaaaattcattcccactaactcttttccaaaccacttccccctcacatctaacaatcgaaacccctcattctccca

SEQ ID NO: 35533 - DNA, 604 bp, Artificial Sequence
  chemically treated genomic DNA (Homo sapiens) CpG-island No: 35533
gtcggggagcgcgagggagcgaggtatagatttggtttagcgagcgcgggggcgagtttcgagtttcgagagtttggggggtcgtagttcgggcgtcgattttttttcgtttttcgcgtttttttttcggcgggtacggtatttttattcgtgcgcgaatagtttttttttttttttcgtcgtatagttcgcgtttgcgcgggggagtttagtatagatcgtcgtcgggatttcgagtcgcgtattttagttttatcgtttatttcgcgcgttatggattttaaggatcgtaagaagatttagttttcggtgttcgcgttttttagttagttcgattttcgttaggtggagatggtaaggggttcgtgttttatttcggtagcgtattcgatatatttcgcggggttttttcgtttttttaaggcgttgtttcggtcggattggtttgggggtgggggcgtaaggagagtcgggttttgtttcggttaggacggggcgcggggtcgcgtgtgaagttagttggagattcgtgtaattttttttcgcggttttggttttgatttcggggtaagagagtttttggtagtgaggttgggggtgcggg

SEQ ID NO: 35534 - DNA, 604 bp, Artificial Sequence
  chemically treated genomic DNA (Homo sapiens) CpG-island No: 35534
cccgcacccccaacctcactaccaaaaactctcttaccccgaaatcaaaaccaaaaccgcgaaaaaaaattacacgaatctccaactaacttcacacgcgaccccgcgccccgtcctaaccgaaacaaaacccgactctccttacgcccccacccccaaaccaatccgaccgaaacaacgccttaaaaaaacgaaaaaaccccgcgaaatatatcgaatacgctaccgaaataaaacacgaaccccttaccatctccacctaacgaaaatcgaactaactaaaaaacgcgaacaccgaaaactaaatcttcttacgatccttaaaatccataacgcgcgaaataaacgataaaactaaaatacgcgactcgaaatcccgacgacgatctatactaaactcccccgcgcaaacgcgaactatacgacgaaaaaaaaaaaaaaactattcgcgcacgaataaaaataccgtacccgccgaaaaaaaaacgcgaaaaacgaaaaaaaatcgacgcccgaactacgaccccccaaactctcgaaactcgaaactcgcccccgcgctcgctaaaccaaatctatacctcgctccctcgcgctccccgac

SEQ ID NO: 35535 - DNA, 604 bp, Artificial Sequence
  chemically treated genomic DNA (Homo sapiens) CpG-island No: 35535
ttcgtatttttagttttattgttaggaatttttttgtttcgggattaggattaaagtcgcggggaaaagttgtacgagtttttagttaattttatacgcggtttcgcgtttcgttttgatcgaggtagagttcggttttttttgcgtttttatttttaggttagttcggtcggggtagcgttttgggagggcgaagaagtttcgcggggtgtgtcgggtacgttgtcggggtggggtacgggttttttattatttttatttggcgggggtcgagttggttagggggcgcgggtatcgagaattggatttttttgcggtttttggggtttatggcgcgcggggtgggcggtggggttggggtgcgcgattcggggtttcggcggcggtttgtgttgggttttttcgcgtaggcgcgggttgtgcggcgagaggaggaggagggttgttcgcgtacggataaaaatatcgtgttcgtcgaggggagggcgcgggaagcggaggagggtcggcgttcgggttgcggttttttaggttttcgggattcggggttcgttttcgcgttcgttgagttaggtttgtgtttcgttttttcgcgtttttcggt

SEQ ID NO: 35536 - DNA, 604 bp, Artificial Sequence
  chemically treated genomic DNA (Homo sapiens) CpG-island No: 35536
accgaaaaacgcgaaaaaacgaaacacaaacctaactcaacgaacgcgaaaacgaaccccgaatcccgaaaacctaaaaaaccgcaacccgaacgccgaccctcctccgcttcccgcgccctcccctcgacgaacacgatatttttatccgtacgcgaacaaccctcctcctcctctcgccgcacaacccgcgcctacgcgaaaaaacccaacacaaaccgccgccgaaaccccgaatcgcgcaccccaaccccaccgcccaccccgcgcgccataaaccccaaaaaccgcaaaaaaatccaattctcgatacccgcgccccctaaccaactcgacccccgccaaataaaaataataaaaaacccgtaccccaccccgacaacgtacccgacacaccccgcgaaacttcttcgccctcccaaaacgctaccccgaccgaactaacctaaaaataaaaacgcaaaaaaaaccgaactctacctcgatcaaaacgaaacgcgaaaccgcgtataaaattaactaaaaactcgtacaacttttccccgcgactttaatcctaatcccgaaacaaaaaaattcctaacaataaaactaaaaatacgaa

SEQ ID NO: 35537 - DNA, 686 bp, Artificial Sequence
  chemically treated genomic DNA (Homo sapiens) CpG-island No: 35537
  unsure (209)
gagtaaggcgtcgacggtgcggtcgtttttacggttcgggcggttcgttcgttatgtatttttattcgtattcgtgttcgcgtttgggggtaagttaggtgttaggcggtcggcggttgggcggcgggcggcgtacgttttgcgagatttacggttattgcgtcgtttacgagacgttgtatgcggcggtaggcggtggcggtcgattnggattataatagtttcgagtacgagggttcgtttagtttttcgttttgttttaatggtaattttttatttaagtaggatttttcgttcgattacgagaaaagttattattattttatgtattattcggcgttgtcggttcgcggtttacgtcgacgggttagttttcggttcgtcggttgtgcgcgggggcgtttattcggagaattttttgttttacgatatgtatttttattacgatcggggttttatgtacgaggagtttaatgcgtttttttataattgagatttcgcgtcggttttttttttttttttttgtttttgttcgtttttttgtttttagtttttagagcgtagggatatttttattttatttcggcgtcggcggatgttcgggtttacggttttcgtcgtttttttggggtagcgtagttttgttatttgtgggtggtttgttttaggggtttcgttttttttag

SEQ ID NO: 35538 - DNA, 686 bp, Artificial Sequence
  chemically treated genomic DNA (Homo sapiens) CpG-island No: 35538
  unsure (478)
ctaaaaaaaacgaaacccctaaaacaaaccacccacaaataacaaaactacgctaccccaaaaaaacgacgaaaaccgtaaacccgaacatccgccgacgccgaaataaaataaaaatatccctacgctctaaaaactaaaaacaaaaaaacgaacaaaaacaaaaaaaaaaaaaaaaaaccgacgcgaaatctcaattataaaaaaacgcattaaactcctcgtacataaaaccccgatcgtaataaaaatacatatcgtaaaacaaaaaattctccgaataaacgcccccgcgcacaaccgacgaaccgaaaactaacccgtcgacgtaaaccgcgaaccgacaacgccgaataatacataaaataataataacttttctcgtaatcgaacgaaaaatcctacttaaataaaaaattaccattaaaacaaaacgaaaaactaaacgaaccctcgtactcgaaactattataatccnaatcgaccgccaccgcctaccgccgcatacaacgtctcgtaaacgacgcaataaccgtaaatctcgcaaaacgtacgccgcccgccgcccaaccgccgaccgcctaacacctaacttacccccaaacgcgaacacgaatacgaataaaaatacataacgaacgaaccgcccgaaccgtaaaaacgaccgcaccgtcgacgccttactc

SEQ ID NO: 35539 - DNA, 686 bp, Artificial Sequence
  chemically treated genomic DNA (Homo sapiens) CpG-island No: 35539
  unsure (478)
ttgggggaagcgaggtttttgggataggttatttataggtaataggattgcgttgttttaggagagcggcgaggatcgtggattcgaatattcgtcggcgtcggggtaggatgggggtgtttttgcgttttgggggttggggataggggggcgggtaaaggtaaaagaaaaagaagggagtcggcgcgaagttttagttatgaaaaaacgtattgagtttttcgtatatggggtttcggtcgtggtgaaggtgtatatcgtaagataagagatttttcgagtggacgttttcgcgtatagtcgacgagtcgaagattagttcgtcggcgtgggtcgcgaatcggtagcgtcgagtagtgtatagagtagtggtagtttttttcgtggtcgggcgaggagttttgtttgagtgagaagttgttattgagatagagcggggggttgagcgggttttcgtattcggagttgttgtagtttnggtcggtcgttatcgtttgtcgtcgtatatagcgtttcgtaggcggcgtagtagtcgtgggtttcgtaggacgtgcgtcgttcgtcgtttagtcgtcggtcgtttggtatttggtttgtttttaggcgcgagtacgggtacgggtaggggtgtatggcgaacgggtcgttcgagtcgtggaagcggtcgtatcgtcggcgttttgttt

SEQ ID NO: 35540 - DNA, 686 bp, Artificial Sequence
  chemically treated genomic DNA (Homo sapiens) CpG-island No: 35540
  unsure (209)
aaacaaaacgccgacgatacgaccgcttccacgactcgaacgacccgttcgccatacacccctacccgtacccgtactcgcgcctaaaaacaaaccaaataccaaacgaccgacgactaaacgacgaacgacgcacgtcctacgaaacccacgactactacgccgcctacgaaacgctatatacgacgacaaacgataacgaccgaccnaaactacaacaactccgaatacgaaaacccgctcaaccccccgctctatctcaataacaacttctcactcaaacaaaactcctcgcccgaccacgaaaaaaactaccactactctatacactactcgacgctaccgattcgcgacccacgccgacgaactaatcttcgactcgtcgactatacgcgaaaacgtccactcgaaaaatctcttatcttacgatatacaccttcaccacgaccgaaaccccatatacgaaaaactcaatacgttttttcataactaaaacttcgcgccgactcccttctttttcttttacctttacccgcccccctatccccaacccccaaaacgcaaaaacacccccatcctaccccgacgccgacgaatattcgaatccacgatcctcgccgctctcctaaaacaacgcaatcctattacctataaataacctatcccaaaaacctcgcttcccccaa

SEQ ID NO: 35541 - DNA, 798 bp, Artificial Sequence
  chemically treated genomic DNA (Homo sapiens) CpG-island No: 35541
cgatttcgggatatttaggttgaaaatcgagtataatataatagtgttggttttcgacgttaatgataacgttttcgtttttatttaaattttttatattttgttcgttcgcgagaataatagtttcgttttgtatatcggtagcgttagcgttatagatagagattcgggtattaacgtttaggttatttattcgttgttgtcgttttaggattcgtatttgtttttcgtttttttggtttttattaacgcggataacggttatttgttcgttttttagtcgttggattacgaggttttgtaggcgttcgagtttcgcgtgggcgtcgtagatcgcggtttttcggcgttgagtagcgaggcgttggtgcgcgtgttggtgttggacgttaacgataattcgtttttcgtgttgtattcgttgtagaacggtttcgcgttttgtatcgagttggtgtttcgggcggtcgagtcgggttatttggtgattaaggtggtggcggtggacggcgattcgggttagaacgtttggttgtcgtattagttgtttaaggttacggagttcgggttgttcggcgtgtgggcgtataatggcgaggtgcgtatcgttaggttgttgagggagcgcgacgttgttaagtagaggttggtggtgttggttaaggataatggcgagttttcgcgttcggttatcgtttacgttgtacgtgtttttggtggacggttttttttagttttatttgttgttttcggaggcggtatcggtttaggtttaggtcgatttgtttatcgtttatt

SEQ ID NO: 35542 - DNA, 798 bp, Artificial Sequence
  chemically treated genomic DNA (Homo sapiens) CpG-island No: 35542
aataaacgataaacaaatcgacctaaacctaaaccgataccgcctccgaaaacaacaaataaaactaaaaaaaaccgtccaccaaaaacacgtacaacgtaaacgataaccgaacgcgaaaactcgccattatccttaaccaacaccaccaacctctacttaacaacgtcgcgctccctcaacaacctaacgatacgcacctcgccattatacgcccacacgccgaacaacccgaactccgtaaccttaaacaactaatacgacaaccaaacgttctaacccgaatcgccgtccaccgccaccaccttaatcaccaaataacccgactcgaccgcccgaaacaccaactcgatacaaaacgcgaaaccgttctacaacgaatacaacacgaaaaacgaattatcgttaacgtccaacaccaacacgcgcaccaacgcctcgctactcaacgccgaaaaaccgcgatctacgacgcccacgcgaaactcgaacgcctacaaaacctcgtaatccaacgactaaaaaacgaacaaataaccgttatccgcgttaataaaaaccaaaaaaacgaaaaacaaatacgaatcctaaaacgacaacaacgaataaataacctaaacgttaatacccgaatctctatctataacgctaacgctaccgatatacaaaacgaaactattattctcgcgaacgaacaaaatataaaaaatttaaataaaaacgaaaacgttatcattaacgtcgaaaaccaacactattatattatactcgattttcaacctaaatatcccgaaatcg

SEQ ID NO: 35543 - DNA, 798 bp, Artificial Sequence
  chemically treated genomic DNA (Homo sapiens) CpG-island No: 35543
ggtagacggtgagtaagtcggtttgggtttgggtcggtgtcgttttcgggagtagtaggtagggttgggagaagtcgtttattaggagtacgtgtagcgtgggcggtggtcgagcgcggaggttcgttattgtttttgattagtattattagtttttgtttggtagcgtcgcgtttttttagtagtttggcggtgcgtatttcgttattgtgcgtttatacgtcgaatagttcgggtttcgtggttttgagtagttggtacgatagttaggcgttttggttcgagtcgtcgtttatcgttattattttggttattaggtagttcggttcggtcgttcggggtattagttcggtgtagggcgcggagtcgttttgtagcgggtatagtacgaagggcgagttgtcgttggcgtttagtattagtacgcgtattagcgtttcgttgtttaacgtcggggagtcgcggtttgcggcgtttacgcggaattcgaacgtttgtagggtttcgtagtttagcgattggagagcgaataggtggtcgttgttcgcgttgatggagattagggaggcgaggggtaggtgcgggttttggggcggtagtagcgagtaggtgatttgggcgttggtgttcgagtttttgtttgtggcgttgacgttgtcgatgtgtagggcggggttgttgttttcgcggacgaatagggtgtaggaggtttgggtgaaggcgggggcgttgttattgacgtcggagattagtattgttatgttgtgttcggtttttagtttgggtgtttcgaagtcg

SEQ ID NO: 35544 - DNA, 798 bp, Artificial Sequence
  chemically treated genomic DNA (Homo sapiens) CpG-island No: 35544
cgacttcgaaacacccaaactaaaaaccgaacacaacataacaatactaatctccgacgtcaataacaacgcccccgccttcacccaaacctcctacaccctattcgtccgcgaaaacaacaaccccgccctacacatcgacaacgtcaacgccacaaacaaaaactcgaacaccaacgcccaaatcacctactcgctactaccgccccaaaacccgcacctacccctcgcctccctaatctccatcaacgcgaacaacgaccacctattcgctctccaatcgctaaactacgaaaccctacaaacgttcgaattccgcgtaaacgccgcaaaccgcgactccccgacgttaaacaacgaaacgctaatacgcgtactaatactaaacgccaacgacaactcgcccttcgtactatacccgctacaaaacgactccgcgccctacaccgaactaataccccgaacgaccgaaccgaactacctaataaccaaaataataacgataaacgacgactcgaaccaaaacgcctaactatcgtaccaactactcaaaaccacgaaacccgaactattcgacgtataaacgcacaataacgaaatacgcaccgccaaactactaaaaaaacgcgacgctaccaaacaaaaactaataatactaatcaaaaacaataacgaacctccgcgctcgaccaccgcccacgctacacgtactcctaataaacgacttctcccaaccctacctactactcccgaaaacgacaccgacccaaacccaaaccgacttactcaccgtctacc

SEQ ID NO: 35545 - DNA, 578 bp, Artificial Sequence
  chemically treated genomic DNA (Homo sapiens) CpG-island No: 35545
tgcgtttcgtttttttggtttttattaacgcggataacggttatttgtttgtttttaggtcgttggattacgaggttttgtaggcgttcgagtttcgcgtgggagttatagatcgcggtttttcggcgttgagtagcgaggcgttggtgcgcgtgttggtgttggacgttaacgataattcgtttttcgtgttgtattcgttgtagaacggttcggcgttttgtatcgagttggtgtttcgggcggtcgagtcgggttatttggtgattaaggtggtggcggtggacggtgattcgggttagaacgtttggttgtcgtattagttgtttaaggttacggagttcgggttgtttagtatgtgggcgtataatggcgaggtgcgtatcgttaggttgttgagcgagcgcgacgcggttaagtataggttggtggtgttggttaaggataatggcgagttttcgcgttcggttatcgttacgttgtacgtgtttttggtggacggttttttttagttttatttgtcgttgtcggaggcggtttcggtttaggtttaggtcgattcgtttattgtttatttg

SEQ ID NO: 35546 - DNA, 578 bp, Artificial Sequence
  chemically treated genomic DNA (Homo sapiens) CpG-island No: 35546
caaataaacaataaacgaatcgacctaaacctaaaccgaaaccgcctccgacaacgacaaataaaactaaaaaaaaccgtccaccaaaaacacgtacaacgtaacgataaccgaacgcgaaaactcgccattatccttaaccaacaccaccaacctatacttaaccgcgtcgcgctcgctcaacaacctaacgatacgcacctcgccattatacgcccacatactaaacaacccgaactccgtaaccttaaacaactaatacgacaaccaaacgttctaacccgaatcaccgtccaccgccaccaccttaatcaccaaataacccgactcgaccgcccgaaacaccaactcgatacaaaacgccgaaccgttctacaacgaatacaacacgaaaaacgaattatcgttaacgtccaacaccaacacgcgcaccaacgcctcgctactcaacgccgaaaaaccgcgatctataactcccacgcgaaactcgaacgcctacaaaacctcgtaatccaacgacctaaaaacaaacaaataaccgttatccgcgttaataaaaaccaaaaaaacgaaacgca

SEQ ID NO: 35547 - DNA, 578 bp, Artificial Sequence
  chemically treated genomic DNA (Homo sapiens) CpG-island No: 35547
taggtagatagtgagcgagtcggtttgggtttgggtcggggtcgttttcggtagcggtaggtagggttgggagaagtcgtttattaggagtacgtgtagcgtggcggtggtcgagcgcggaggttcgttattgtttttgattagtattattagtttgtgtttggtcgcgtcgcgttcgtttagtagtttggcggtgcgtatttcgttattgtgcgtttatatgttgaatagttcgggtttcgtggttttgagtagttggtacgatagttaggcgttttggttcgagttatcgtttatcgttattattttggttattaggtagttcggttcggtcgttcggggtattagttcggtgtaaggcgtcgagtcgttttgtagcggatatagtacgaagggcgagttgtcgttggcgtttagtattagtacgcgtattagcgtttcgttgtttagcgtcggggagtcgcggtttgtggtttttacgcggaattcgaacgtttgtagggtttcgtagtttagcgatttgagggtaaataggtggtcgttgttcgcgttgatggagattagggaggcgaggcgta

SEQ ID NO: 35548 - DNA, 578 bp, Artificial Sequence
  chemically treated genomic DNA (Homo sapiens) CpG-island No: 35548
tacgcctcgcctccctaatctccatcaacgcgaacaacgaccacctatttaccctcaaatcgctaaactacgaaaccctacaaacgttcgaattccgcgtaaaaaccacaaaccgcgactccccgacgctaaacaacgaaacgctaatacgcgtactaatactaaacgccaacgacaactcgcccttcgtactatatccgctacaaaacgactcgacgccttacaccgaactaataccccgaacgaccgaaccgaactacctaataaccaaaataataacgataaacgataactcgaaccaaaacgcctaactatcgtaccaactactcaaaaccacgaaacccgaactattcaacatataaacgcacaataacgaaatacgcaccgccaaactactaaacgaacgcgacgcgaccaaacacaaactaataatactaatcaaaaacaataacgaacctccgcgctcgaccaccgccacgctacacgtactcctaataaacgacttctcccaaccctacctaccgctaccgaaaacgaccccgacccaaacccaaaccgactcgctcactatctaccta

SEQ ID NO: 35549 - DNA, 602 bp, Artificial Sequence
  chemically treated genomic DNA (Homo sapiens) CpG-island No: 35549
atcgcgagttttcgggcgttaaagttaggagaagtcgtttatttcgtagggtcggtttgttagcgagacgagagttggcgagggcggaggagtgtcgggaatttcgttatatcggttatagttaggtttttagcgcgggttttggagagcgcgtgaaggcgggtatttttttgattcggtcgattattttcgtgtttttgcgtttttgcgttttaacgttcgcgcggttattatgatgtaaatttgcgatatttataattagaagtattcgttttttaacgttatgaatcgttttattggcgtcgtgaataatatggattagacggtgatggtgtttagtttgttgcgcgacgtgtttttggttgatttcgggttagataacgatgttggcgtggaggtaggcggtagtggcggttgtttggaggagcgtacgtttttagttttcgattcgggaagcgttaatggtagttttttcgcgttttttcgggatatgtatagttattacgtgttttttaagtttattcgtaacgatatcgagtggggggttttgtattagtcgtttttatcggttgggagcgaggagggtagtgtttggaagttta

SEQ ID NO: 35550 - DNA, 602 bp, Artificial Sequence
  chemically treated genomic DNA (Homo sapiens) CpG-island No: 35550
taaacttccaaacactaccctcctcgctcccaaccgataaaaacgactaatacaaaaccccccactcgatatcgttacgaataaacttaaaaaacacgtaataactatacatatcccgaaaaaacgcgaaaaaactaccattaacgcttcccgaatcgaaaactaaaaacgtacgctcctccaaacaaccgccactaccgcctacctccacgccaacatcgttatctaacccgaaatcaaccaaaaacacgtcgcgcaacaaactaaacaccatcaccgtctaatccatattattcacgacgccaataaaacgattcataacgttaaaaaacgaatacttctaattataaatatcgcaaatttacatcataataaccgcgcgaacgttaaaacgcaaaaacgcaaaaacacgaaaataatcgaccgaatcaaaaaaatacccgccttcacgcgctctccaaaacccgcgctaaaaacctaactataaccgatataacgaaattcccgacactcctccgccctcgccaactctcgtctcgctaacaaaccgaccctacgaaataaacgacttctcctaactttaacgcccgaaaactcgcgat

SEQ ID NO: 35551 - DNA, 602 bp, Artificial Sequence
  chemically treated genomic DNA (Homo sapiens) CpG-island No: 35551
tggatttttaggtattgtttttttcgtttttagtcggtggaggcggttggtgtaggattttttattcgatgtcgttgcggatggatttgagaagtacgtagtggttgtatatgtttcgagagggcgcgaaaaagttgttattggcgtttttcgagtcggggattgggggcgtgcgtttttttaggtagtcgttattgtcgtttatttttacgttaatatcgttgtttaattcggggttagttaggggtacgtcgcgtagtaagttgggtattattatcgtttggtttatgttgtttacggcgttaatgaagcgatttatggcgttaaagagcgagtgtttttggttgtaggtgtcgtagatttgtattatggtggtcgcgcggacgttggagcgtagggacgtaggggtacggggatggtcggtcgggttaaggggatgttcgtttttacgcgttttttaaggttcgcgttgggggtttggttatagtcggtgtggcgggattttcggtattttttcgttttcgttaattttcgtttcgttggtagatcggttttgcgggatgggcggttttttttggttttggcgttcggaaattcgcgat

SEQ ID NO: 35552 - DNA, 602 bp, Artificial Sequence
  chemically treated genomic DNA (Homo sapiens) CpG-island No: 35552
atcgcgaatttccgaacgccaaaaccaaaaaaaaccgcccatcccgcaaaaccgatctaccaacgaaacgaaaattaacgaaaacgaaaaaataccgaaaatcccgccacaccgactataaccaaacccccaacgcgaaccttaaaaaacgcgtaaaaacgaacatccccttaacccgaccgaccatccccgtacccctacgtccctacgctccaacgtccgcgcgaccaccataatacaaatctacgacacctacaaccaaaaacactcgctctttaacgccataaatcgcttcattaacgccgtaaacaacataaaccaaacgataataatacccaacttactacgcgacgtacccctaactaaccccgaattaaacaacgatattaacgtaaaaataaacgacaataacgactacctaaaaaaacgcacgcccccaatccccgactcgaaaaacgccaataacaactttttcgcgccctctcgaaacatatacaaccactacgtacttctcaaatccatccgcaacgacatcgaataaaaaatcctacaccaaccgcctccaccgactaaaaacgaaaaaaacaatacctaaaaatcca

SEQ ID NO: 35553 - DNA, 1106 bp, Artificial Sequence
  chemically treated genomic DNA (Homo sapiens) CpG-island No: 35553
atataaagaggggcggtgcgttttgaggaggtggtacggtttatgcgagcggaagttcgttagtcgtcgattggttgggataaatgttcgtttcgtttttttttcgttttatttttcggtggtttagcggcgcggttcgcgggcgcgttgaggaggttggcggtgttagattggtagggggcgtgattcgaggaggcggggcgggggggcgtgttttgtttggtttcggcgtcgggttcgttacggtttgcggtttcgttttcgaatttttttttttacgcggtttttttttttttcgttcggttcgtcggttcgtttagttttagttttaggttttacgtcgtggtttcgtttttttattagagttagtttagtagtcgtagcgcgtatacgtacgtttcgcgtttttcgcgttcggcgttcggttttttttacgcgcgtatatttcggtacggacgtatttacgtttgttttcgcgcgtcgggggttcggcggcggcggtaggggtagcggtagaagtaggtagatcgcgcggggtagtatcgtagcggtcgttacgggttggtcggtcggttatggaggttgatggggtcggcgagtagatgagatcgttatttattcgggtaacgagtagggtgagggcgtcgcggcggtggggttttttcgtagggggagggcgcggggcgaggtagataaaggcggggggcgcggcgggcgtcgcggttcggttatttcgttttaggttcgtcgtttttttatttttcggcggtcggcgcgtttcgttattttttttgtgtggcggtttggggcgcgggtgggagggggttagcggttgcgttcgggaggttcgagtcggggcggtcggcggcgcgtcgcgggtattttttgcgcggtttaggcgggatttcgatattttcgtagaggtcgtttgtgatttcgattatttatttttttttttagcgttcgttttttttgttttttagcgcgttttttaggcggggtttcggtttcggttgttttggcgtaggagttttagattagttttcgaaaatttattttttttttttttttaaggaggacggcggttttatttgtttttagtttta

SEQ ID NO: 35554 - DNA, 1106 bp, Artificial Sequence
  chemically treated genomic DNA (Homo sapiens) CpG-island No: 35554
taaaactaaaaacaaataaaaccgccgtcctccttaaaaaaaaaaaaaaaataaattttcgaaaactaatctaaaactcctacgccaaaacaaccgaaaccgaaaccccgcctaaaaaacgcgctaaaaaacaaaaaaaacgaacgctaaaaaaaaaaataaataatcgaaatcacaaacgacctctacgaaaatatcgaaatcccgcctaaaccgcgcaaaaaatacccgcgacgcgccgccgaccgccccgactcgaacctcccgaacgcaaccgctaaccccctcccacccgcgccccaaaccgccacacaaaaaaaataacgaaacgcgccgaccgccgaaaaataaaaaaacgacgaacctaaaacgaaataaccgaaccgcgacgcccgccgcgccccccgcctttatctacctcgccccgcgccctccccctacgaaaaaaccccaccgccgcgacgccctcaccctactcgttacccgaataaataacgatctcatctactcgccgaccccatcaacctccataaccgaccgaccaacccgtaacgaccgctacgatactaccccgcgcgatctacctacttctaccgctacccctaccgccgccgccgaacccccgacgcgcgaaaacaaacgtaaatacgtccgtaccgaaatatacgcgcgtaaaaaaaaccgaacgccgaacgcgaaaaacgcgaaacgtacgtatacgcgctacgactactaaactaactctaataaaaaaacgaaaccacgacgtaaaacctaaaactaaaactaaacgaaccgacgaaccgaacgaaaaaaaaaaaaaccgcgtaaaaaaaaaaattcgaaaacgaaaccgcaaaccgtaacgaacccgacgccgaaaccaaacaaaacacgcccccccgccccgcctcctcgaatcacgccccctaccaatctaacaccgccaacctcctcaacgcgcccgcgaaccgcgccgctaaaccaccgaaaaataaaacgaaaaaaaaacgaaacgaacatttatcccaaccaatcgacgactaacgaacttccgctcgcataaaccgtaccacctcctcaaaacgcaccgcccctctttatat

SEQ ID NO: 35555 - DNA, 1106 bp, Artificial Sequence
  chemically treated genomic DNA (Homo sapiens) CpG-island No: 35555
tggggttagagataggtggagtcgtcgttttttttagaaggagaagaaagataggttttcgagggttaatttgaaatttttgcgttaaggtaatcggaatcgggatttcgtttggggagcgcgttaagaaataggggaggcgagcgttgagggaagggatggatggtcggggttataggcggtttttgcggggatgtcggggtttcgtttgagtcgcgtagaggatgttcgcggcgcgtcgtcggtcgtttcgattcgggtttttcgagcgtagtcgttggtttttttttattcgcgttttaggtcgttatataaaggggatggcgaggcgcgtcggtcgtcgggaggtggaggggcgacgggtttgggacgaggtggtcgagtcgcgacgttcgtcgcgtttttcgtttttgtttgtttcgtttcgcgttttttttttgcggaggagttttatcgtcgcggcgtttttattttgttcgttattcgggtgagtagcggttttatttgttcgtcggttttattagtttttatggtcggtcggttagttcgtgacggtcgttacggtattgtttcgcgcggtttgtttgtttttgtcgttgtttttgtcgtcgtcgtcgagttttcggcgcgcgaggataaacgtgggtgcgttcgtgtcgaggtgtgcgcgcgtggggagagtcgggcgtcgggcgcgggagacgcggggcgtgcgtgtgcgcgttgcgattgttgggttggttttagtaggagagcgaggttacggcgtggaatttgaagttagaattgagcgaatcggcggatcgagcgggaaggaggagagtcgcgtaggaggaggggttcgggggcggagtcgtaaatcgtgacgagttcggcgtcggggttaggtaagatacgttttttcgtttcgttttttcgggttacgttttttgttagtttggtatcgttagtttttttagcgcgttcgcgggtcgcgtcgttaggttatcgggagatggggcgggagggaggcgggacggatatttgttttagttaatcggcggttggcggattttcgttcgtataaatcgtgttatttttttaggacgtatcgtttttttttgtat

SEQ ID NO: 35556 - DNA, 1106 bp, Artificial Sequence
  chemically treated genomic DNA (Homo sapiens) CpG-island No: 35556
atacaaaaaaaaacgatacgtcctaaaaaaataacacgatttatacgaacgaaaatccgccaaccgccgattaactaaaacaaatatccgtcccgcctccctcccgccccatctcccgataacctaacgacgcgacccgcgaacgcgctaaaaaaactaacgataccaaactaacaaaaaacgtaacccgaaaaaacgaaacgaaaaaacgtatcttacctaaccccgacgccgaactcgtcacgatttacgactccgcccccgaacccctcctcctacgcgactctcctccttcccgctcgatccgccgattcgctcaattctaacttcaaattccacgccgtaacctcgctctcctactaaaaccaacccaacaatcgcaacgcgcacacgcacgccccgcgtctcccgcgcccgacgcccgactctccccacgcgcgcacacctcgacacgaacgcacccacgtttatcctcgcgcgccgaaaactcgacgacgacgacaaaaacaacgacaaaaacaaacaaaccgcgcgaaacaataccgtaacgaccgtcacgaactaaccgaccgaccataaaaactaataaaaccgacgaacaaataaaaccgctactcacccgaataacgaacaaaataaaaacgccgcgacgataaaactcctccgcaaaaaaaaaacgcgaaacgaaacaaacaaaaacgaaaaacgcgacgaacgtcgcgactcgaccacctcgtcccaaacccgtcgcccctccacctcccgacgaccgacgcgcctcgccatcccctttatataacgacctaaaacgcgaataaaaaaaaaccaacgactacgctcgaaaaacccgaatcgaaacgaccgacgacgcgccgcgaacatcctctacgcgactcaaacgaaaccccgacatccccgcaaaaaccgcctataaccccgaccatccatcccttccctcaacgctcgcctcccctatttcttaacgcgctccccaaacgaaatcccgattccgattaccttaacgcaaaaatttcaaattaaccctcgaaaacctatctttcttctccttctaaaaaaaacgacgactccacctatctctaacccca

SEQ ID NO: 35557 - DNA, 633 bp, Artificial Sequence
  chemically treated genomic DNA (Homo sapiens) CpG-island No: 35557
gttgttttcgtattcgcgggtagtgacgaggtggtagtcgggatacgggcggtagggtcgggagggtttcgttgcggttggatcgaacggttggggaggttcgtttaacgttcgggtttacgtatttattcgaagggtcgcgcggggcgcggggcgattgtatacgggattcgcggtcgagtatagttttcggcgcgtcggcggtttcgttgggaagcgcggcgagacgggtcggcggcgtcgttgtcgttgttgttgttacggagttataaatatcggttcggtttatattcgtcgtcgtttacgtcgggcgtttttcgcgtcggtgttttatcgcgtcgcgttttcgtcgtaaagttcgcggtcgcgggtcgggtaacgcgagcgtaagggtatcggcgtcgcgtaggtgatcgcgattatgttagttgtgtgtaaattttgtagttggaggtatggttttttttcgtttttgttttttcgttcgtattacgggttgattttagttcgcgggtcgcgtgcgttacgggtcgagtttgttcgggtcggttcgtttttgtagagcggtagttgtaggcgagggacggatttaggaatatggtgggggttggggggcggttgatagaaaattta

SEQ ID NO: 35558 - DNA, 633 bp, Artificial Sequence
  chemically treated genomic DNA (Homo sapiens) CpG-island No: 35558
taaattttctatcaaccgccccccaacccccaccatattcctaaatccgtccctcgcctacaactaccgctctacaaaaacgaaccgacccgaacaaactcgacccgtaacgcacgcgacccgcgaactaaaatcaacccgtaatacgaacgaaaaaacaaaaacgaaaaaaaaccatacctccaactacaaaatttacacacaactaacataatcgcgatcacctacgcgacgccgatacccttacgctcgcgttacccgacccgcgaccgcgaactttacgacgaaaacgcgacgcgataaaacaccgacgcgaaaaacgcccgacgtaaacgacgacgaatataaaccgaaccgatatttataactccgtaacaacaacaacgacaacgacgccgccgacccgtctcgccgcgcttcccaacgaaaccgccgacgcgccgaaaactatactcgaccgcgaatcccgtatacaatcgccccgcgccccgcgcgacccttcgaataaatacgtaaacccgaacgttaaacgaacctccccaaccgttcgatccaaccgcaacgaaaccctcccgaccctaccgcccgtatcccgactaccacctcgtcactacccgcgaatacgaaaacaac

SEQ ID NO: 35559 - DNA, 633 bp, Artificial Sequence
  chemically treated genomic DNA (Homo sapiens) CpG-island No: 35559
tggattttttgttagtcgttttttaatttttattatgtttttgagttcgtttttcgtttgtagttgtcgttttgtagaggcgggtcggttcgggtaggttcggttcgtggcgtacgcggttcgcgggttggagttagttcgtggtgcgggcgagagggtaggggcggggagaagttatgtttttagttgtagagtttgtatatagttggtatgatcgcggttatttgcgcggcgtcggtgtttttgcgttcgcgttgttcggttcgcggtcgcggattttgcggcgggagcgcggcgcggtgaagtatcggcgcggagggcgttcggcgtaggcggcggcgggtgtgggtcgagtcggtatttatagtttcgtgatagtagtagcggtagcgacgtcgtcggttcgtttcgtcgcgttttttagcgaggtcgtcggcgcgtcgagggttgtgttcgatcgcgaatttcgtgtgtagtcgtttcgcgtttcgcgcgatttttcgggtgagtacgtgggttcgggcgttgggcgagtttttttagtcgttcggtttagtcgtagcggagttttttcggttttgtcgttcgtgtttcggttgttatttcgttattgttcgcgagtgcggaagtagt

SEQ ID NO: 35560 - DNA, 633 bp, Artificial Sequence
  chemically treated genomic DNA (Homo sapiens) CpG-island No: 35560
actacttccgcactcgcgaacaataacgaaataacaaccgaaacacgaacgacaaaaccgaaaaaactccgctacgactaaaccgaacgactaaaaaaactcgcccaacgcccgaacccacgtactcacccgaaaaatcgcgcgaaacgcgaaacgactacacacgaaattcgcgatcgaacacaaccctcgacgcgccgacgacctcgctaaaaaacgcgacgaaacgaaccgacgacgtcgctaccgctactactatcacgaaactataaataccgactcgacccacacccgccgccgcctacgccgaacgccctccgcgccgatacttcaccgcgccgcgctcccgccgcaaaatccgcgaccgcgaaccgaacaacgcgaacgcaaaaacaccgacgccgcgcaaataaccgcgatcataccaactatatacaaactctacaactaaaaacataacttctccccgcccctaccctctcgcccgcaccacgaactaactccaacccgcgaaccgcgtacgccacgaaccgaacctacccgaaccgacccgcctctacaaaacgacaactacaaacgaaaaacgaactcaaaaacataataaaaattaaaaaacgactaacaaaaaatcca

SEQ ID NO: 35561 - DNA, 736 bp, Artificial Sequence
  chemically treated genomic DNA (Homo sapiens) CpG-island No: 35561
  unsure (103)
aattaggtcgtttcgaaagttaatttttttcgttttttcgaatttcggattaatttgtaacgtgacggtagtagggatcgggttggaggaggacgtaggtcgngtagcgttcgggaagtaggagcgcggagaggcgtcgaggttcggttcgtttcgcgagatcgattttcggagttttcggttcgattttagttttgtcggttttgtagttttttcggttttttcggttttttcggaagttttttttttgcgagtcgcgtcgggcgttgttattttggatgtcggtttggtgggatatggcggcggtcgttagttttcggtttcggcgttgagtgtagttagcggtttcggtcggcggtttaggaagtggttgttttttcgtcggtttcggcgcgttattcgttcgcgattcgcggtcgtttcgtttcgtgaggttgattgagtgttcgagcgttttcgtcgtttcgtcgttttttttggtcgtcgggttgcggtttagttttcggtttcgttattttagttttttgtttggggttttgtttttgtttttgtcgtcgtttttttcgtttttttcgggggggatatgtcgtagaatttagattgtttagtgtttcgacgtttgttttttgataatttcgtcgacgtcgttattcgttagtttagttaaggggtgtttaaaaacggaagtgattattttattaaataggtattttttagttttttttagatgtgtata

SEQ ID NO: 35562 - DNA, 736 bp, Artificial Sequence
  chemically treated genomic DNA (Homo sapiens) CpG-island No: 35562
  unsure (634)
tatacacatctaaaaaaaactaaaaaatacctatttaataaaataatcacttccgtttttaaacaccccttaactaaactaacgaataacgacgtcgacgaaattatcaaaaaacaaacgtcgaaacactaaacaatctaaattctacgacatatcccccccgaaaaaaacgaaaaaaacgacgacaaaaacaaaaacaaaaccccaaacaaaaaactaaaataacgaaaccgaaaactaaaccgcaacccgacgaccaaaaaaaacgacgaaacgacgaaaacgctcgaacactcaatcaacctcacgaaacgaaacgaccgcgaatcgcgaacgaataacgcgccgaaaccgacgaaaaaacaaccacttcctaaaccgccgaccgaaaccgctaactacactcaacgccgaaaccgaaaactaacgaccgccgccatatcccaccaaaccgacatccaaaataacaacgcccgacgcgactcgcaaaaaaaaaacttccgaaaaaaccgaaaaaaccgaaaaaactacaaaaccgacaaaactaaaatcgaaccgaaaactccgaaaatcgatctcgcgaaacgaaccgaacctcgacgcctctccgcgctcctacttcccgaacgctacncgacctacgtcctcctccaacccgatccctactaccgtcacgttacaaattaatccgaaattcgaaaaaacgaaaaaaattaactttcgaaacgacctaatt

SEQ ID NO: 35563 - DNA, 736 bp, Artificial Sequence
  chemically treated genomic DNA (Homo sapiens) CpG-island No: 35563
  unsure (634)
tgtgtatatttggggggagttggaaaatgtttatttggtgaaatgattattttcgtttttgagtattttttgattgagttagcgaatggcggcgtcggcggggttgttagagagtagacgtcggagtattgagtagtttagattttgcggtatgtttttttcggaagaagcgggagaggcggcggtaagagtagaagtaggattttaagtagagaattaggatagcgaggtcgggggttggatcgtagttcggcggttaggaagggcggcggggcggcggggacgttcgggtatttagttaattttacggggcggggcggtcgcgggtcgcgggcggatgacgcgtcggggtcggcggaggagtagttattttttgggtcgtcggtcggggtcgttggttgtatttagcgtcggagtcgggagttagcggtcgtcgttatgttttattagatcggtatttaaggtaatagcgttcggcgcgattcgtagggaaggggttttcgggagagtcgggagagtcgggagggttgtaggatcggtagggttggagtcgggtcgggagtttcggaagtcggtttcgcggggcgagtcgggtttcggcgttttttcgcgtttttgtttttcgggcgttgtncggtttgcgtttttttttagttcggtttttgttgtcgttacgttgtagattgattcgaaattcgggggagcgaaggaaattggttttcgaggcggtttggtt

SEQ ID NO: 35564 - DNA, 736 bp, Artificial Sequence
  chemically treated genomic DNA (Homo sapiens) CpG-island No: 35564
  unsure (103)
aaccaaaccgcctcgaaaaccaatttccttcgctcccccgaatttcgaatcaatctacaacgtaacgacaacaaaaaccgaactaaaaaaaaacgcaaaccgnacaacgcccgaaaaacaaaaacgcgaaaaaacgccgaaacccgactcgccccgcgaaaccgacttccgaaactcccgacccgactccaaccctaccgatcctacaaccctcccgactctcccgactctcccgaaaaccccttccctacgaatcgcgccgaacgctattaccttaaataccgatctaataaaacataacgacgaccgctaactcccgactccgacgctaaatacaaccaacgaccccgaccgacgacccaaaaaataactactcctccgccgaccccgacgcgtcatccgcccgcgacccgcgaccgccccgccccgtaaaattaactaaatacccgaacgtccccgccgccccgccgcccttcctaaccgccgaactacgatccaacccccgacctcgctatcctaattctctacttaaaatcctacttctactcttaccgccgcctctcccgcttcttccgaaaaaaacataccgcaaaatctaaactactcaatactccgacgtctactctctaacaaccccgccgacgccgccattcgctaactcaatcaaaaaatactcaaaaacgaaaataatcatttcaccaaataaacattttccaactccccccaaatatacaca

SEQ ID NO: 35565 - DNA, 675 bp, Artificial Sequence
  chemically treated genomic DNA (Homo sapiens) CpG-island No: 35565
tgatagggttgtaatttgattagatacgtgtgtttcggtattagtgcgggacgatttataagttttagtagaatggagtacgatgttagtagtacgcgttttagtagaggttaattgagtcgcgcgcggggaacgtagtgaggaaattatgtattatagggggggaaaggtattaaaaattggcgaggaaaaagtgattgtcggaattggcgggtacgagaggtaagggttggttggtattggggaagagtcggaatggagtaacgtgaaaaatattatcggtatatcgttcgtatattttggcggtcggaggttagttataacggtcgagtttgtttaaattcgggtatcgcgcgttcgggttcgttatagtgacgaaaattataattttagttcgtttgttgcgtattatttacggtttggtatatttcggtttgatcggcggtcgtattgtcgtttttgttttgacggagtttattcgggttagaggggacgatttgaagggaattatgcgatgttttgcgaattcggcggtttgcgatatgtgggttcgggatatcgaattgaaacggggttggcgcgcggacggtgtttattacgttgcgttgacgagacgataagaaataatgatttaggttgaattaatttcgagaatatttgaggatatgattattg

SEQ ID NO: 35566 - DNA, 675 bp, Artificial Sequence
  chemically treated genomic DNA (Homo sapiens) CpG-island No: 35566
caataatcatatcctcaaatattctcgaaattaattcaacctaaatcattatttcttatcgtctcgtcaacgcaacgtaataaacaccgtccgcgcgccaaccccgtttcaattcgatatcccgaacccacatatcgcaaaccgccgaattcgcaaaacatcgcataattcccttcaaatcgtcccctctaacccgaataaactccgtcaaaacaaaaacgacaatacgaccgccgatcaaaccgaaatataccaaaccgtaaataatacgcaacaaacgaactaaaattataattttcgtcactataacgaacccgaacgcgcgatacccgaatttaaacaaactcgaccgttataactaacctccgaccgccaaaatatacgaacgatataccgataatatttttcacgttactccattccgactcttccccaataccaaccaacccttacctctcgtacccgccaattccgacaatcactttttcctcgccaatttttaatacctttccccccctataatacataatttcctcactacgttccccgcgcgcgactcaattaacctctactaaaacgcgtactactaacatcgtactccattctactaaaacttataaatcgtcccgcactaataccgaaacacacgtatctaatcaaattacaaccctatca

SEQ ID NO: 35567 - DNA, 675 bp, Artificial Sequence
  chemically treated genomic DNA (Homo sapiens) CpG-island No: 35567
tagtaattatgtttttaagtgttttcggggttaatttagtttaaattattattttttgtcgtttcgttagcgtagcgtagtaggtatcgttcgcgcgttagtttcgttttaattcggtgtttcgggtttatatgtcgtaaatcgtcgagttcgtaaggtatcgtatggttttttttaaatcgttttttttggttcgggtaagtttcgttaaaataaaagcggtagtacggtcgtcggttaggtcggggtatgttaggtcgtgggtaatgcgtagtaggcgggttggggttgtagttttcgttattatgacgggttcgggcgcgcggtgttcgggtttgggtaagttcgatcgttatggttagttttcggtcgttaaagtatgcgggcggtgtgtcggtagtgttttttacgttattttatttcggtttttttttagtgttaattaatttttgtttttcgtgttcgttagtttcggtagttatttttttttcgttagtttttaatatttttttttttttatagtatatggtttttttattgcgtttttcgcgcgcggtttaattagtttttgttgaaacgcgtattattaatatcgtattttattttattggggtttgtaggtcgtttcgtattagtgtcggggtatacgtatttggttaggttatagttttgtta

SEQ ID NO: 35568 - DNA, 675 bp, Artificial Sequence
  chemically treated genomic DNA (Homo sapiens) CpG-island No: 35568
taacaaaactataacctaaccaaatacgtataccccgacactaatacgaaacgacctacaaaccccaataaaataaaatacgatattaataatacgcgtttcaacaaaaactaattaaaccgcgcgcgaaaaacgcaataaaaaaaccatatactataaaaaaaaaaaaatattaaaaactaacgaaaaaaaaataactaccgaaactaacgaacacgaaaaacaaaaattaattaacactaaaaaaaaaccgaaataaaataacgtaaaaaacactaccgacacaccgcccgcatactttaacgaccgaaaactaaccataacgatcgaacttacccaaacccgaacaccgcgcgcccgaacccgtcataataacgaaaactacaaccccaacccgcctactacgcattacccacgacctaacataccccgacctaaccgacgaccgtactaccgcttttattttaacgaaacttacccgaaccaaaaaaaacgatttaaaaaaaaccatacgataccttacgaactcgacgatttacgacatataaacccgaaacaccgaattaaaacgaaactaacgcgcgaacgatacctactacgctacgctaacgaaacgacaaaaaataataatttaaactaaattaaccccgaaaacacttaaaaacataattacta

SEQ ID NO: 35569 - DNA, 798 bp, Artificial Sequence
  chemically treated genomic DNA (Homo sapiens) CpG-island No: 35569
  unsure (38)
acgtcgtcgaggggggggcggggtcgcggtcgcgcggntttcggcgagcgcgcgtagttcgtttttcgtatatattttatttttttttttcgcgtttcgttcgtgcgtgtttttatttcgttttcgtttgtagtttgcgagagcgattacgagtcgtcggttgtagtcgtcgtttgtaagtcgtcgttttattttagcgatgatgagagcgcggttggtatataaaattttcgaagttgagtgttcggggtttcgcgaaacgttcgtgtttatttcgtttttatttcgttgttacgtcgtgagaagagttcgtcgtcgtaacgggtcggtgtgcgcggggacggcgttacgtcgacggattgtttgttatcggcgatagcgttgtagcgtcgtagatgtttatagtatattgacggcggcgttgcgcgcgtttattattatttcgatatattttttcgtgttcgttcgtcgttatttatatattttgttcgttgtatataaatagattgcggtatgcgtttcgatgttttattagttagtatatgtagcgtcgtcgtcggggtttatcgtcgatcgcgcgttacggattattatcgacgttttcgtttacgcgtcgtttgtttatttcgatttcgtcgtcggatcgtcggtatattcgagtttgttcgtcgcgtttcgttacgatttcgcggcgcgacggttatcgatcgtaacgtttcggcgtcgttatcgtcgttcgatattttttttcgcgttatttttatttttttttttttttacgcgcgtacgttatttttt

SEQ ID NO: 35570 - DNA, 798 bp, Artificial Sequence
  chemically treated genomic DNA (Homo sapiens) CpG-island No: 35570
  unsure (761)
aaaaaataacgtacgcgcgtaaaaaaaaaaaaaaataaaaataacgcgaaaaaaaatatcgaacgacgataacgacgccgaaacgttacgatcgataaccgtcgcgccgcgaaatcgtaacgaaacgcgacgaacaaactcgaatataccgacgatccgacgacgaaatcgaaataaacaaacgacgcgtaaacgaaaacgtcgataataatccgtaacgcgcgatcgacgataaaccccgacgacgacgctacatatactaactaataaaacatcgaaacgcataccgcaatctatttatatacaacgaacaaaatatataaataacgacgaacgaacacgaaaaaatatatcgaaataataataaacgcgcgcaacgccgccgtcaatatactataaacatctacgacgctacaacgctatcgccgataacaaacaatccgtcgacgtaacgccgtccccgcgcacaccgacccgttacgacgacgaactcttctcacgacgtaacaacgaaataaaaacgaaataaacacgaacgtttcgcgaaaccccgaacactcaacttcgaaaattttatataccaaccgcgctctcatcatcgctaaaataaaacgacgacttacaaacgacgactacaaccgacgactcgtaatcgctctcgcaaactacaaacgaaaacgaaataaaaacacgcacgaacgaaacgcgaaaaaaaaaaataaaatatatacgaaaaacgaactacgcgcgctcgccgaaanccgcgcgaccgcgaccccgcccccccctcgacgacgt

SEQ ID NO: 35571 - DNA, 798 bp, Artificial Sequence
  chemically treated genomic DNA (Homo sapiens) CpG-island No: 35571
  unsure (761)
aaaggatagcgtacgcgcgtgggaagggggagaggtgaaggtgacgcgaggaggggtgtcggacgacggtgacggcgtcggagcgttgcggtcgatagtcgtcgcgtcgcggggtcgtgacgagacgcggcgggtaggttcggatgtatcggcggttcgacgacggagtcgaggtaggtaggcggcgcgtgggcgagggcgtcggtggtggttcgtagcgcgcgatcggcgatgggtttcggcggcggcgttgtatatgttagttggtgaggtatcgaggcgtatgtcgtaatttatttgtatgtaacgggtaggatatgtgagtgacggcggacggatacgaagaggtgtatcggagtagtgatggacgcgcgtagcgtcgtcgttagtatgttgtgagtatttacggcgttgtagcgttgtcgtcgatagtaagtagttcgtcggcgtggcgtcgttttcgcgtatatcgattcgttacggcgacggattttttttacgacgtggtagcggagtgagaacggggtgggtacgaacgtttcgcggagtttcgaatatttagtttcgaaggttttgtatgttaatcgcgtttttattatcgttaaggtggggcggcgatttgtaggcgacgattatagtcggcggttcgtgatcgttttcgtagattatagacgggggcggaataggaatacgtacgagcgagacgcggggaggagagatgaggtgtgtgcggggggcggattgcgcgcgttcgtcggggntcgcgcggtcgcgatttcgtttttttttcggcggcgt

SEQ ID NO: 35572 - DNA, 798 bp, Artificial Sequence
  chemically treated genomic DNA (Homo sapiens) CpG-island No: 35572
  unsure (38)
acgccgccgaaaaaaaaacgaaatcgcgaccgcgcganccccgacgaacgcgcgcaatccgccccccgcacacacctcatctctcctccccgcgtctcgctcgtacgtattcctattccgcccccgtctataatctacgaaaacgatcacgaaccgccgactataatcgtcgcctacaaatcgccgccccaccttaacgataataaaaacgcgattaacatacaaaaccttcgaaactaaatattcgaaactccgcgaaacgttcgtacccaccccgttctcactccgctaccacgtcgtaaaaaaaatccgtcgccgtaacgaatcgatatacgcgaaaacgacgccacgccgacgaactacttactatcgacgacaacgctacaacgccgtaaatactcacaacatactaacgacgacgctacgcgcgtccatcactactccgatacacctcttcgtatccgtccgccgtcactcacatatcctacccgttacatacaaataaattacgacatacgcctcgatacctcaccaactaacatatacaacgccgccgccgaaacccatcgccgatcgcgcgctacgaaccaccaccgacgccctcgcccacgcgccgcctacctacctcgactccgtcgtcgaaccgccgatacatccgaacctacccgccgcgtctcgtcacgaccccgcgacgcgacgactatcgaccgcaacgctccgacgccgtcaccgtcgtccgacacccctcctcgcgtcaccttcacctctcccccttcccacgcgcgtacgctatccttt

SEQ ID NO: 35573 - DNA, 685 bp, Artificial Sequence
  chemically treated genomic DNA (Homo sapiens) CpG-island No: 35573
  unsure (541, 567..568, 570)
tacgcgttttggattgcgggtcgagggcgggcggcgtgtattttatttttaggagttagaagggaagcgcggtatatggttttgtagttttacgtagggttggcggttagttaagcgtagggttttttaaggcgcgtagggtgcgtacgggtgtgggagggagatttcggcgtcggagggtttgcggtcgttttagttttattttgggacggcgtgtttttttttttcgttgtttattttggtttttaagagtcgggcggtcgtagtaagtaaagttatggcgggcgattttcgggatttggtggggaggtaagaaagggagagagttgcggtaggaataggagtcgtcgtcgttgtattagaggtcgcgtcgacgggttgataaggttgaaaggaggcggttgaaggaaagagtagacgaatcggcggcggcgtttagttcggggtttttaaggaggtttcgtttattggtcggaattcgagttcgttttttttaagggatttttttcgggttcggttattggttcggtttggaagcggngcgggattttagtatttgatagtagnngngacggggaggattggatcgttcggattagggttaattaagggtggatgggtggcgggcggggaagtgcgggtggttaataggtgtttgataatttagttattttttttttgggtt

SEQ ID NO: 35574 - DNA, 685 bp, Artificial Sequence
  chemically treated genomic DNA (Homo sapiens) CpG-island No: 35574
  unsure (116, 118..119, 145)
aacccaaaaaaaaaataactaaattatcaaacacctattaaccacccgcacttccccgcccgccacccatccacccttaattaaccctaatccgaacgatccaatcctccccgtcncnnctactatcaaatactaaaatcccgcnccgcttccaaaccgaaccaataaccgaacccgaaaaaaatcccttaaaaaaaacgaactcgaattccgaccaataaacgaaacctccttaaaaaccccgaactaaacgccgccgccgattcgtctactctttccttcaaccgcctcctttcaaccttatcaacccgtcgacgcgacctctaatacaacgacgacgactcctattcctaccgcaactctctccctttcttacctccccaccaaatcccgaaaatcgcccgccataactttacttactacgaccgcccgactcttaaaaaccaaaataaacaacgaaaaaaaaaaacacgccgtcccaaaataaaactaaaacgaccgcaaaccctccgacgccgaaatctccctcccacacccgtacgcaccctacgcgccttaaaaaaccctacgcttaactaaccgccaaccctacgtaaaactacaaaaccatataccgcgcttcccttctaactcctaaaaataaaatacacgccgcccgccctcgacccgcaatccaaaacgcgta

SEQ ID NO: 35575 - DNA, 685 bp, Artificial Sequence
  chemically treated genomic DNA (Homo sapiens) CpG-island No: 35575
  unsure (116, 118..119, 145)
agtttaagaggaaagtaattgagttattaggtatttattagttattcgtattttttcgttcgttatttatttatttttaattagttttaattcgggcggtttaatttttttcgttntnnttgttgttaagtgttaaggtttcgtntcgtttttaaatcggattaatggtcgggttcggggagagttttttgagaggggcgggttcgggtttcggttagtgggcggggtttttttgaggatttcgggttgggcgtcgtcgtcggttcgtttatttttttttttagtcgtttttttttaattttgttaattcgtcggcgcggtttttggtgtagcggcggcggtttttgtttttgtcgtagtttttttttttttttatttttttattagatttcggagatcgttcgttatggttttatttattgcggtcgttcggtttttgggaattaaggtgagtagcgaggggagggagtacgtcgttttagggtggggttgaggcgatcgtaggtttttcggcgtcggggttttttttttatattcgtgcgtattttgcgcgttttaaagggttttgcgtttggttggtcgttagttttgcgtgaagttataggattatgtgtcgcgttttttttttggtttttgggggtgaagtgtacgtcgttcgttttcggttcgtagtttagaacgcgtg

SEQ ID NO: 35576 - DNA, 685 bp, Artificial Sequence
  chemically treated genomic DNA (Homo sapiens) CpG-island No: 35576
  unsure (541, 567..568, 570)
cacgcgttctaaactacgaaccgaaaacgaacgacgtacacttcacccccaaaaaccaaaaaaaaaacgcgacacataatcctataacttcacgcaaaactaacgaccaaccaaacgcaaaaccctttaaaacgcgcaaaatacgcacgaatataaaaaaaaaaccccgacgccgaaaaacctacgatcgcctcaaccccaccctaaaacgacgtactccctcccctcgctactcaccttaattcccaaaaaccgaacgaccgcaataaataaaaccataacgaacgatctccgaaatctaataaaaaaataaaaaaaaaaaaaaactacgacaaaaacaaaaaccgccgccgctacaccaaaaaccgcgccgacgaattaacaaaattaaaaaaaaacgactaaaaaaaaaaataaacgaaccgacgacgacgcccaacccgaaatcctcaaaaaaaccccgcccactaaccgaaacccgaacccgcccctctcaaaaaactctccccgaacccgaccattaatccgatttaaaaacganacgaaaccttaacacttaacaacaannanaacgaaaaaaattaaaccgcccgaattaaaactaattaaaaataaataaataacgaacgaaaaaatacgaataactaataaatacctaataactcaattactttcctcttaaact

SEQ ID NO: 35577 - DNA, 730 bp, Artificial Sequence
  chemically treated genomic DNA (Homo sapiens) CpG-island No: 35577
tttgattcgtcgggcgggagaagttgatggtaaaagtattaatttgattatttaggtagttaacgttgaatattagtttttgcggtagcgttttttcgttacgttagataatttagtcgtagtttagcggagttagatcgaatttatggtttgaagtattgatcgattttatacgcggtaggcggaagttttagacgatattcggggcgacgaacggtgttaggaagttatcgttggtagcgtcgatgtgtatgtcgatgtcgatatcggtatcggtttggaatttatttagcgtatcgtgtagcggttgtgggaatttatagttattagtgtaggttacgtcgaaagtcggtattacgtcgatggtgttttcgttataggttttaattatgcgtttcgggtttataaataattgatcggggcgtatagggattttacgtagttttatattttagtagcgggcgaatttatgttagtagatttgtatcggatcgtatattaggtttggtttattcgttggtttgtttgtagtttttatacgtttgcgttaacgttattttatcgttatttcgtcgagtatataggtttcggaagaattaatggtgttggtgttaacggtttgattatttttcggcgtaggcgtatgttatagatcggtaattatatttacgtaacgtaggtcgatggttgcggattgcggatatttttttttgtcgatttagtttttgtt

SEQ ID NO: 35578 - DNA, 730 bp, Artificial Sequence
  chemically treated genomic DNA (Homo sapiens) CpG-island No: 35578
aacaaaaactaaatcgacaaaaaaaaatatccgcaatccgcaaccatcgacctacgttacgtaaatataattaccgatctataacatacgcctacgccgaaaaataatcaaaccgttaacaccaacaccattaattcttccgaaacctatatactcgacgaaataacgataaaataacgttaacgcaaacgtataaaaactacaaacaaaccaacgaataaaccaaacctaatatacgatccgatacaaatctactaacataaattcgcccgctactaaaatataaaactacgtaaaatccctatacgccccgatcaattatttataaacccgaaacgcataattaaaacctataacgaaaacaccatcgacgtaataccgactttcgacgtaacctacactaataactataaattcccacaaccgctacacgatacgctaaataaattccaaaccgataccgatatcgacatcgacatacacatcgacgctaccaacgataacttcctaacaccgttcgtcgccccgaatatcgtctaaaacttccgcctaccgcgtataaaatcgatcaatacttcaaaccataaattcgatctaactccgctaaactacgactaaattatctaacgtaacgaaaaaacgctaccgcaaaaactaatattcaacgttaactacctaaataatcaaattaatacttttaccatcaacttctcccgcccgacgaatcaaa

SEQ ID NO: 35579 - DNA, 730 bp, Artificial Sequence
  chemically treated genomic DNA (Homo sapiens) CpG-island No: 35579
aataaaaattggatcgataaagaagaatattcgtaattcgtagttatcgatttgcgttgcgtaaatatggttgtcgatttgtggtatgcgtttgcgtcgaaaaatggttaggtcgttggtattaatattattggttttttcgaggtttgtatgttcggcgggatggcgatgaaatggcgttggcgtaagcgtatggaagttgtaggtaaattaacggataaattaaatttggtgtgcggttcggtataaatttgttggtataaattcgttcgttattgggatgtggagttgcgtgagatttttatgcgtttcggttagttgtttatggattcgaaacgtatgattgaagtttgtgacgaaaatattatcggcgtggtgtcgattttcggcgtgatttatattggtaattatgagtttttataatcgttgtacgatgcgttggataaattttaggtcgatatcggtatcgatatcgatatgtatatcgacgttgttagcggtggttttttggtatcgttcgtcgtttcggatatcgtttgggattttcgtttgtcgcgtgtgaaatcgattagtgttttaggttataaattcggtttggtttcgttgggttgcggttgggttatttggcgtgacgaagaagcgttgtcgtaggaattggtgtttaacgttgattatttgggtggttaaattggtatttttgttattaatttttttcgttcggcgggttagg

SEQ ID NO: 35580 - DNA, 730 bp, Artificial Sequence
  chemically treated genomic DNA (Homo sapiens) CpG-island No: 35580
cctaacccgccgaacgaaaaaaattaataacaaaaataccaatttaaccacccaaataatcaacgttaaacaccaattcctacgacaacgcttcttcgtcacgccaaataacccaaccgcaacccaacgaaaccaaaccgaatttataacctaaaacactaatcgatttcacacgcgacaaacgaaaatcccaaacgatatccgaaacgacgaacgataccaaaaaaccaccgctaacaacgtcgatatacatatcgatatcgataccgatatcgacctaaaatttatccaacgcatcgtacaacgattataaaaactcataattaccaatataaatcacgccgaaaatcgacaccacgccgataatattttcgtcacaaacttcaatcatacgtttcgaatccataaacaactaaccgaaacgcataaaaatctcacgcaactccacatcccaataacgaacgaatttataccaacaaatttataccgaaccgcacaccaaatttaatttatccgttaatttacctacaacttccatacgcttacgccaacgccatttcatcgccatcccgccgaacatacaaacctcgaaaaaaccaataatattaataccaacgacctaaccatttttcgacgcaaacgcataccacaaatcgacaaccatatttacgcaacgcaaatcgataactacgaattacgaatattcttctttatcgatccaatttttatt

SEQ ID NO: 35581 - DNA, 663 bp, Artificial Sequence
  chemically treated genomic DNA (Homo sapiens) CpG-island No: 35581
  unsure (221, 424, 507, 511, 538)
ttcggcggcgtagtttacgtggaagtcgtgttcgtataggtagttttgttattatcgggcggaggtcggtattattttttttgttaagtttttaaatttttcgtgcgttcgttatcggtgtcgcgattattagtaggttacgtgtgcgattttttgtaattaaggttttcgcgattttatttttagattcgggttttatttattttgttttagttttcggngaggtgggacgtttgggagcgcgttttaggtttcgtaattatagcgtcggttatcgaggtttttcgtcgatcgataggttttttagattcgtattcgagttcgggtgtttaaagtagtagcgcgcgtttcgcgggatcgggtattattcgggttgtttcggcgttgggatgtttacgagagcgttttatttattcggtacggnttgttgttcgcggtcgcgagtttattgcgttgcggcgtatcggttggaggcggggtagcgtgggtacgtttcgggtcgtgttntagntttcggtttcgttttcgttagtcgggntcgtaagtggtggtaagttcggaagttttggttatttcggcggtggtttcgcggtttacgttcggggcggtttttttaggtttatatgggaaggaaaataaatggtttttttttttttttatttt

SEQ ID NO: 35582 - DNA, 663 bp, Artificial Sequence
  chemically treated genomic DNA (Homo sapiens) CpG-island No: 35582
  unsure (126, 153, 157, 240, 443)
aaaataaaaaaaaaaaaaaaccatttattttccttcccatataaacctaaaaaaaccgccccgaacgtaaaccgcgaaaccaccgccgaaataaccaaaacttccgaacttaccaccacttacgancccgactaacgaaaacgaaaccgaaanctanaacacgacccgaaacgtacccacgctaccccgcctccaaccgatacgccgcaacgcaataaactcgcgaccgcgaacaacaanccgtaccgaataaataaaacgctctcgtaaacatcccaacgccgaaacaacccgaataatacccgatcccgcgaaacgcgcgctactactttaaacacccgaactcgaatacgaatctaaaaaacctatcgatcgacgaaaaacctcgataaccgacgctataattacgaaacctaaaacgcgctcccaaacgtcccacctcnccgaaaactaaaacaaaataaataaaacccgaatctaaaaataaaatcgcgaaaaccttaattacaaaaaatcgcacacgtaacctactaataatcgcgacaccgataacgaacgcacgaaaaatttaaaaacttaacaaaaaaaataataccgacctccgcccgataataacaaaactacctatacgaacacgacttccacgtaaactacgccgccgaa

SEQ ID NO: 35583 - DNA, 663 bp, Artificial Sequence
  chemically treated genomic DNA (Homo sapiens) CpG-island No: 35583
  unsure (126, 153, 157, 240, 443)
aaaatggagaaaaaaaagggttatttatttttttttttatatggatttaaagaaatcgtttcgggcgtgaatcgcgaaattatcgtcggggtagttagggttttcgggtttgttattatttgcggnttcggttggcgggggcggggtcggggnttgnagtacggttcggagcgtgtttacgttgtttcgtttttagtcggtgcgtcgtaacgtagtgggttcgcggtcgcgagtaatagntcgtgtcgggtgagtggggcgttttcgtgggtattttagcgtcggggtagttcgggtagtgttcgatttcgcggggcgcgcgttgttgttttaggtattcgggttcgggtgcgggtttgggagatttgtcggtcggcgagaagtttcggtggtcggcgttgtggttgcgggatttgggacgcgtttttaggcgttttattttntcggagattggggtagggtgggtggggttcggatttaggggtagggtcgcggaagttttggttatagagagtcgtatacgtggtttgttaatggtcgcgatatcggtgacgagcgtacggaaagtttggaggtttagtaaggagggtggtgtcggttttcgttcggtggtggtagaattgtttgtgcgagtacggtttttacgtgggttgcgtcgtcggg

SEQ ID NO: 35584 - DNA, 663 bp, Artificial Sequence
  chemically treated genomic DNA (Homo sapiens) CpG-island No: 35584
  unsure (221, 424, 507, 511, 538)
cccgacgacgcaacccacgtaaaaaccgtactcgcacaaacaattctaccaccaccgaacgaaaaccgacaccaccctccttactaaacctccaaactttccgtacgctcgtcaccgatatcgcgaccattaacaaaccacgtatacgactctctataaccaaaacttccgcgaccctacccctaaatccgaaccccacccaccctaccccaatctccganaaaataaaacgcctaaaaacgcgtcccaaatcccgcaaccacaacgccgaccaccgaaacttctcgccgaccgacaaatctcccaaacccgcacccgaacccgaatacctaaaacaacaacgcgcgccccgcgaaatcgaacactacccgaactaccccgacgctaaaatacccacgaaaacgccccactcacccgacacganctattactcgcgaccgcgaacccactacgttacgacgcaccgactaaaaacgaaacaacgtaaacacgctccgaaccgtactncaanccccgaccccgcccccgccaaccgaanccgcaaataataacaaacccgaaaaccctaactaccccgacgataatttcgcgattcacgcccgaaacgatttctttaaatccatataaaaaaaaaaataaataacccttttttttctccatttt

SEQ ID NO: 35585 - DNA, 857 bp, Artificial Sequence
  chemically treated genomic DNA (Homo sapiens) CpG-island No: 35585
tattcggatagtatttttagtatgtggtcggataatcgtatcgttcgtgacgcgtattatttttatcggtatgatcgttacggtaggttgacggagaaaatcgattttatttcggaaggggttattcgtacggatgatgagcgtatttatcggtattattacgatagttagtatcggttggtgtattatacgcggatataatatgaagagtcgttggtcgaaagtcgttatttttacgattcgttgggtcgtaggtggtaaaacgggtgtggcggcgtgaacgggatttgacgggttggatgtcgttgttacggaaatcgtaagtgatttggtacggttgggacggcgatcggttgattataatatagaacgatagaattcgtatttagacgatttattagtcggggagttttacgttatttattagagttgaaatcgttatcggtgagttggcgaaaacgtagcgtcgtagtttggcggatgcgttttagtagttcggcggcgaagacggtggtagtgtggtgttttcgtcggtgttggtgtagatgttcgatcggttggaaagtgaaattttggttgatcgggtgagtgaggaaagtcgtcgttggttggtatcgtgcggtttgatcgtggagtagatgtaaaattagatggattcggtgtatacgtcggcgcgaaaaatttatttgtattattgcgattatcgcggtttgtcgttggtttttattagtacggaagggataatagcgtggtacgtagaatacgatgaatggggtaatttgttgaatgaagagaattcgtattagttgtagtagtttattcgtttgtcggggtagtagtatgatgaggagttcggt

SEQ ID NO: 35586 - DNA, 857 bp, Artificial Sequence
  chemically treated genomic DNA (Homo sapiens) CpG-island No: 35586
accgaactcctcatcatactactaccccgacaaacgaataaactactacaactaatacgaattctcttcattcaacaaattaccccattcatcgtattctacgtaccacgctattatcccttccgtactaataaaaaccaacgacaaaccgcgataatcgcaataatacaaataaatttttcgcgccgacgtatacaccgaatccatctaattttacatctactccacgatcaaaccgcacgataccaaccaacgacgactttcctcactcacccgatcaaccaaaatttcactttccaaccgatcgaacatctacaccaacaccgacgaaaacaccacactaccaccgtcttcgccgccgaactactaaaacgcatccgccaaactacgacgctacgttttcgccaactcaccgataacgatttcaactctaataaataacgtaaaactccccgactaataaatcgtctaaatacgaattctatcgttctatattataatcaaccgatcgccgtcccaaccgtaccaaatcacttacgatttccgtaacaacgacatccaacccgtcaaatcccgttcacgccgccacacccgttttaccacctacgacccaacgaatcgtaaaaataacgactttcgaccaacgactcttcatattatatccgcgtataatacaccaaccgatactaactatcgtaataataccgataaatacgctcatcatccgtacgaataaccccttccgaaataaaatcgattttctccgtcaacctaccgtaacgatcataccgataaaaataatacgcgtcacgaacgatacgattatccgaccacatactaaaaatactatccgaata

SEQ ID NO: 35587 - DNA, 857 bp, Artificial Sequence
  chemically treated genomic DNA (Homo sapiens) CpG-island No: 35587
gtcggattttttattatattgttgtttcggtaggcggataagttgttgtagttgatgcgggttttttttatttagtaggttattttatttatcgtattttgcgtattacgttgttgtttttttcgtgttgataagggttagcggtaggtcgcgatggtcgtagtggtataggtggatttttcgcgtcggcgtgtatatcgggtttatttggttttgtatttgttttacggttaggtcgtacgatgttagttagcggcggttttttttatttattcggttagttaggattttattttttagtcggtcgagtatttgtattagtatcggcgggaatattatattgttatcgttttcgtcgtcggattgttgaagcgtattcgttaggttgcggcgttgcgttttcgttagtttatcggtggcggttttaattttgatgagtggcgtgaagtttttcggttgataaatcgtttggatgcgggttttgtcgttttgtattgtggttagtcggtcgtcgttttagtcgtattaggttatttgcggttttcgtgatagcgatatttagttcgttaggtttcgtttacgtcgttatattcgttttgttatttgcggtttagcgggtcgtaaagatagcgattttcgattagcggttttttatattgtgttcgcgtgtagtgtattagtcggtgttgattgtcgtaatggtatcggtgggtgcgtttattattcgtgcggataatttttttcgggatgaggtcggtttttttcgttagtttgtcgtgacggttatatcggtaaagatagtgcgcgttacgggcgatacggttattcggttatatgttgagggtgttgttcgggtg

SEQ ID NO: 35588 - DNA, 857 bp, Artificial Sequence
  chemically treated genomic DNA (Homo sapiens) CpG-island No: 35588
cacccgaacaacaccctcaacatataaccgaataaccgtatcgcccgtaacgcgcactatctttaccgatataaccgtcacgacaaactaacgaaaaaaaccgacctcatcccgaaaaaaattatccgcacgaataataaacgcacccaccgataccattacgacaatcaacaccgactaatacactacacgcgaacacaatataaaaaaccgctaatcgaaaatcgctatctttacgacccgctaaaccgcaaataacaaaacgaatataacgacgtaaacgaaacctaacgaactaaatatcgctatcacgaaaaccgcaaataacctaatacgactaaaacgacgaccgactaaccacaatacaaaacgacaaaacccgcatccaaacgatttatcaaccgaaaaacttcacgccactcatcaaaattaaaaccgccaccgataaactaacgaaaacgcaacgccgcaacctaacgaatacgcttcaacaatccgacgacgaaaacgataacaatataatattcccgccgatactaatacaaatactcgaccgactaaaaaataaaatcctaactaaccgaataaataaaaaaaaccgccgctaactaacatcgtacgacctaaccgtaaaacaaatacaaaaccaaataaacccgatatacacgccgacgcgaaaaatccacctataccactacgaccatcgcgacctaccgctaacccttatcaacacgaaaaaaacaacaacgtaatacgcaaaatacgataaataaaataacctactaaataaaaaaaacccgcatcaactacaacaacttatccgcctaccgaaacaacaatataataaaaaatccgac

SEQ ID NO: 35589 - DNA, 666 bp, Artificial Sequence
  chemically treated genomic DNA (Homo sapiens) CpG-island No: 35589
tgtcggagcgaatattgcgcgaaggattgcgttaggtagtgtcgcgttcggcggtttttcgtgcgttgacgtaggtagggttggtgttgcgatcgtttttatcggaataggttagagtaaaattgtttgttgaaacggtgaaagttaaatcgcgttcgtcgttgtttataagcgtcgggttttaatgttggaaggttgcgttagtttacgttttcgtttaatattaacgcggtaattgcgcgagtgttggatcgtttggggattagcgttatgttagttaacgaagtaggttgttgtggcgcggtggattattattttaatgcgtaggagaaagggttggtacgggcgcgtaataatattgatgtttggtggttcgcgattgaagtaggtgtcgaggttattttgttaatcgttagcgttgtcgcgcgtttgtttaagagtattggtagatgtcgaaaacgatgttttatatgtcgattaagtacgtttagttagtgaatcggtcgtcgatttagtcggatttttgcgtaagaatcgttggaaaatttggtatttcgcgcgataaaagtttgtcgttaattgtcgtgtattttatatatgcgtaaagttgaacgttaatgggaaaaaggttgtttttttgggattattttatcggcgttttcgaag

SEQ ID NO: 35590 - DNA, 666 bp, Artificial Sequence
  chemically treated genomic DNA (Homo sapiens) CpG-island No: 35590
cttcgaaaacgccgataaaataatcccaaaaaaacaacctttttcccattaacgttcaactttacgcatatataaaatacacgacaattaacgacaaacttttatcgcgcgaaataccaaattttccaacgattcttacgcaaaaatccgactaaatcgacgaccgattcactaactaaacgtacttaatcgacatataaaacatcgttttcgacatctaccaatactcttaaacaaacgcgcgacaacgctaacgattaacaaaataacctcgacacctacttcaatcgcgaaccaccaaacatcaatattattacgcgcccgtaccaaccctttctcctacgcattaaaataataatccaccgcgccacaacaacctacttcgttaactaacataacgctaatccccaaacgatccaacactcgcgcaattaccgcgttaatattaaacgaaaacgtaaactaacgcaaccttccaacattaaaacccgacgcttataaacaacgacgaacgcgatttaactttcaccgtttcaacaaacaattttactctaacctattccgataaaaacgatcgcaacaccaaccctacctacgtcaacgcacgaaaaaccgccgaacgcgacactacctaacgcaatccttcgcgcaatattcgctccgaca

SEQ ID NO: 35591 - DNA, 666 bp, Artificial Sequence
  chemically treated genomic DNA (Homo sapiens) CpG-island No: 35591
tttcgggaacgtcggtaggataattttaggggagtaattttttttttattggcgtttagttttgcgtatgtgtagggtatacgatagttgacggtaggtttttatcgcgcgaaatgttaggttttttagcgatttttgcgtagaggttcgattaaatcgacggtcggtttattgattggacgtgtttaatcggtatataaggtatcgttttcggtatttgttaatatttttggataaacgcgcggtagcgttggcggttggtaaaatggtttcggtatttgttttaatcgcgggttattaggtattaatattattgcgcgttcgtgttagtttttttttttgcgtattaagatgatagtttatcgcgttataatagtttgtttcgttagttggtatgacgttgatttttagacgatttagtattcgcgtagttgtcgcgttggtgttgggcgaaagcgtaggttggcgtagttttttaatattaaaattcgacgtttatgggtagcggcggacgcggtttagtttttatcgttttagtaggtagttttgttttgatttgtttcggtaaaaacggtcgtagtattagttttatttgcgttagcgtacggaagatcgtcggacgcggtattatttggcgtaatttttcgcgtagtattcgtttcggta

SEQ ID NO: 35592 - DNA, 666 bp, Artificial Sequence
  chemically treated genomic DNA (Homo sapiens) CpG-island No: 35592
taccgaaacgaatactacgcgaaaaattacgccaaataataccgcgtccgacgatcttccgtacgctaacgcaaataaaactaatactacgaccgtttttaccgaaacaaatcaaaacaaaactacctactaaaacgataaaaactaaaccgcgtccgccgctacccataaacgtcgaattttaatattaaaaaactacgccaacctacgctttcgcccaacaccaacgcgacaactacgcgaatactaaatcgtctaaaaatcaacgtcataccaactaacgaaacaaactattataacgcgataaactatcatcttaatacgcaaaaaaaaaaactaacacgaacgcgcaataatattaatacctaataacccgcgattaaaacaaataccgaaaccattttaccaaccgccaacgctaccgcgcgtttatccaaaaatattaacaaataccgaaaacgataccttatataccgattaaacacgtccaatcaataaaccgaccgtcgatttaatcgaacctctacgcaaaaatcgctaaaaaacctaacatttcgcgcgataaaaacctaccgtcaactatcgtataccctacacatacgcaaaactaaacgccaataaaaaaaaaattactcccctaaaattatcctaccgacgttcccgaaa

SEQ ID NO: 35593 - DNA, 651 bp, Artificial Sequence
  chemically treated genomic DNA (Homo sapiens) CpG-island No: 35593
atcgcgatggcgatatcgtataatgtttggaagttttggcgtaggtcgggtttgtcggattcgaagatatttttgtaaattagttttcggtcgggtaataacgtcgcgtcgttttagcgcgtttgtggttgattcgtgttacgttatggattttcgacgagttttttatcgcgattgacgttaacggtgtcgatcgtttgatttagcgtatggcgtagtatacggagtagggggggattgtgattttgattatttattagtcgtttaacgttgttgaaagtaaaattcgtcgtattttattgacgtaaacgagggtcgtatgatgttttggcgtatttttcgttttgagttgcgtgtagcgtttcgttatagcgtcgaaatcgttaattcgttgtggttttttttgattgtaattatttttttttcgtttagtatcggttcggagtcgtaattgttggcgcgtattgtatcgggtattatttgggttgtgcgttgtttttatttttgttggcgttggaacgattgtttcgtgacgatttgtaggacggtagttttgaataattgatgttgttgtcgttatttttgttcgtcgttgtgttggcgaaggtgatggcgtattggatggtaatcggtttgtcgttatttattttt

SEQ ID NO: 35594 - DNA, 651 bp, Artificial Sequence
  chemically treated genomic DNA (Homo sapiens) CpG-island No: 35594
aaaaataaataacgacaaaccgattaccatccaatacgccatcaccttcgccaacacaacgacgaacaaaaataacgacaacaacatcaattattcaaaactaccgtcctacaaatcgtcacgaaacaatcgttccaacgccaacaaaaataaaaacaacgcacaacccaaataatacccgatacaatacgcgccaacaattacgactccgaaccgatactaaacgaaaaaaaaataattacaatcaaaaaaaaccacaacgaattaacgatttcgacgctataacgaaacgctacacgcaactcaaaacgaaaaatacgccaaaacatcatacgaccctcgtttacgtcaataaaatacgacgaattttactttcaacaacgttaaacgactaataaataatcaaaatcacaatccccccctactccgtatactacgccatacgctaaatcaaacgatcgacaccgttaacgtcaatcgcgataaaaaactcgtcgaaaatccataacgtaacacgaatcaaccacaaacgcgctaaaacgacgcgacgttattacccgaccgaaaactaatttacaaaaatatcttcgaatccgacaaacccgacctacgccaaaacttccaaacattatacgatatcgccatcgcgat

SEQ ID NO: 35595 - DNA, 651 bp, Artificial Sequence
  chemically treated genomic DNA (Homo sapiens) CpG-island No: 35595
aaggatgagtaacggtagatcggttattatttagtgcgttattattttcgttagtataacggcgggtaagggtaacggtaataatattaattgtttaagattgtcgttttgtaaatcgttacggaatagtcgttttagcgttagtaaggatgaaagtagcgtatagtttagataatgttcggtgtaatacgcgttagtagttgcggtttcggatcgatattgagcggaaaaagggtaattataattaggaagaattatagcgggttggcgatttcggcgttatggcgaaacgttatacgtagtttaagacggaaaatgcgttagaatattatgcggttttcgtttgcgttagtgaaatgcggcgaattttatttttagtaacgttgagcggttggtgggtagttagaattataatttttttttgtttcgtatgttgcgttatacgttgggttagacgatcgatatcgttaacgttaatcgcggtaaaaggttcgtcgaggatttataacgtggtacgggttagttatagacgcgttaaagcgacgcggcgttgttgttcggtcgagagttgatttataggaatattttcgaattcggtaagttcggtttgcgttagggtttttagatattgtgcggtatcgttatcgcgat

SEQ ID NO: 35596 - DNA, 651 bp, Artificial Sequence
  chemically treated genomic DNA (Homo sapiens) CpG-island No: 35596
atcgcgataacgataccgcacaatatctaaaaaccctaacgcaaaccgaacttaccgaattcgaaaatattcctataaatcaactctcgaccgaacaacaacgccgcgtcgctttaacgcgtctataactaacccgtaccacgttataaatcctcgacgaaccttttaccgcgattaacgttaacgatatcgatcgtctaacccaacgtataacgcaacatacgaaacaaaaaaaaattataattctaactacccaccaaccgctcaacgttactaaaaataaaattcgccgcatttcactaacgcaaacgaaaaccgcataatattctaacgcattttccgtcttaaactacgtataacgtttcgccataacgccgaaatcgccaacccgctataattcttcctaattataattaccctttttccgctcaatatcgatccgaaaccgcaactactaacgcgtattacaccgaacattatctaaactatacgctactttcatccttactaacgctaaaacgactattccgtaacgatttacaaaacgacaatcttaaacaattaatattattaccgttacccttacccgccgttatactaacgaaaataataacgcactaaataataaccgatctaccgttactcatcctt

SEQ ID NO: 35597 - DNA, 744 bp, Artificial Sequence
  chemically treated genomic DNA (Homo sapiens) CpG-island No: 35597
  unsure (333, 446..)
ttaatttgttacgttagatcgcgattatcggtattttcgcggtaggaatggtgttcgttataatttttgttgaaatcgattttttcgtcggtttaatgatggggttgttaggtggcgtcgcggcgatttgtgacgtttggttaggttggtttttgttatttattattattgtgacgttggttttgggattgtttttcggtgtttggaacggatggtgggtcgcgtatcgtaaagtttttttatttattgttattttcgcgggtatgttggtatttcgcggtatatttattggtattattaacggtacgattgtattttttattagcgtcgcgntgttataaattgggtaaagttattttttcgttagtatcggttttattattggcgcgtttggtttaatggtttttgttggttggtaatggcgcggaagaatgcgtcgttaggtnntgggtttatagttttcggtttttatcgtagtagtcggtcgttaggttttaatcgttattatcgtattaggcgtaatttggttgttgaattattatcgggggcgttttatttttgttttgttgttgacgttgttgttattcggcggaatgtttatggtaacgcggacggtatttggacgacgtatttatgttatcggcggtaatttggaagtagtacgttttttcgggattaacgttgaacgtattaaatttgtcgtgttcgcgattaacggattaatggtagttatcgtcggattaa

SEQ ID NO: 35598 - DNA, 744 bp, Artificial Sequence
  chemically treated genomic DNA (Homo sapiens) CpG-island No: 35598
  unsure (298..299, 412)
ttaatccgacgataactaccattaatccgttaatcgcgaacacgacaaatttaatacgttcaacgttaatcccgaaaaaacgtactacttccaaattaccgccgataacataaatacgtcgtccaaataccgtccgcgttaccataaacattccgccgaataacaacaacgtcaacaacaaaacaaaaataaaacgcccccgataataattcaacaaccaaattacgcctaatacgataataacgattaaaacctaacgaccgactactacgataaaaaccgaaaactataaacccannacctaacgacgcattcttccgcgccattaccaaccaacaaaaaccattaaaccaaacgcgccaataataaaaccgatactaacgaaaaaataactttacccaatttataacancgcgacgctaataaaaaatacaatcgtaccgttaataataccaataaatataccgcgaaataccaacatacccgcgaaaataacaataaataaaaaaactttacgatacgcgacccaccatccgttccaaacaccgaaaaacaatcccaaaaccaacgtcacaataataataaataacaaaaaccaacctaaccaaacgtcacaaatcgccgcgacgccacctaacaaccccatcattaaaccgacgaaaaaatcgatttcaacaaaaattataacgaacaccattcctaccgcgaaaataccgataatcgcgatctaacgtaacaaattaa

SEQ ID NO: 35599 - DNA, 744 bp, Artificial Sequence
  chemically treated genomic DNA (Homo sapiens) CpG-island No: 35599
  unsure (298..299, 412)
ttaattcggcgatggttattattaattcgttaatcgcgaatacggtaagtttggtgcgtttaacgttaatttcggagagacgtgttgtttttagattgtcgtcgatggtataaatgcgtcgtttaaatgtcgttcgcgttgttataaatatttcgtcgagtaatagtaacgttagtagtagaataggagtggaacgttttcggtaataatttaatagttagattgcgtttaatacgatgatagcggttaaagtttggcgatcgattattgcggtagaggtcggagattgtaaatttannatttgacggcgtattttttcgcgttattgttaattaataaaagttattaagttaagcgcgttaatgatgaagtcggtattggcggggagatagttttgtttaatttgtgatancgcggcgttggtgggggatatagtcgtgtcgttggtgatgttaatgagtatgtcgcgaaatgttaatatgttcgcgagggtgataataaatgaagggattttacggtacgcgatttattattcgttttaggtatcgagaagtagttttagaattagcgttataatgatggtaagtggtaaaggttagtttaattagacgttataaatcgtcgcgacgttatttaatagttttattattgagtcgacggaaaggtcgattttagtagaaattatgacgaatattatttttatcgcgaggatgtcggtaatcgcggtttggcgtaataggttgg

SEQ ID NO: 35600 - DNA, 744 bp, Artificial Sequence
  chemically treated genomic DNA (Homo sapiens) CpG-island No: 35600
  unsure (333, 446..)
ccaacctattacgccaaaccgcgattaccgacatcctcgcgataaaaataatattcgtcataatttctactaaaatcgacctttccgtcgactcaataataaaactattaaataacgtcgcgacgatttataacgtctaattaaactaacctttaccacttaccatcattataacgctaattctaaaactacttctcgatacctaaaacgaataataaatcgcgtaccgtaaaatcccttcatttattatcaccctcgcgaacatattaacatttcgcgacatactcattaacatcaccaacgacacgactatatcccccaccaacgccgcgntatcacaaattaaacaaaactatctccccgccaataccgacttcatcattaacgcgcttaacttaataacttttattaattaacaataacgcgaaaaaatacgccgtcaaatnntaaatttacaatctccgacctctaccgcaataatcgatcgccaaactttaaccgctatcatcgtattaaacgcaatctaactattaaattattaccgaaaacgttccactcctattctactactaacgttactattactcgacgaaatatttataacaacgcgaacgacatttaaacgacgcatttataccatcgacgacaatctaaaaacaacacgtctctccgaaattaacgttaaacgcaccaaacttaccgtattcgcgattaacgaattaataataaccatcgccgaattaa

SEQ ID NO: 35601 - DNA, 582 bp, Artificial Sequence
  chemically treated genomic DNA (Homo sapiens) CpG-island No: 35601
atgcggttggaaacgcgatcgaggaaatcgtacggtagatgcgtttagtgtgcggttataaagtcgatggtttcgatagtacgtagagagataatttagttatatttacgattatcgtttattacgttaacggaacgtatcggtaggaatatagtgaacgtttggttgattttgtcgtataggttcgttttacgtagttttttaatgaagatggcgttagtacggcgtagtaggttatagtattttttttttattttatttagaatacgaacgttaaggtttggtttcgggaacgggtgacggtatagtatgtcgtacggtaggtttagttttagattaattttacgtatttcgtttttgaatagtttttttagcggtttaattaggtttatttttatttttttcggtaggtcgtttacgttgtggtgagatttgatgacgtgtgttttatcggttgtagacgtcgtagattcgataacgttagggtagatggtgttttgcgttagttattttacgttttttagttttagcgtttttttatcgaatattttaacgaaaacgcgatcgatgattttacggttt

SEQ ID NO: 35602 - DNA, 582 bp, Artificial Sequence
  chemically treated genomic DNA (Homo sapiens) CpG-island No: 35602
aaaccgtaaaatcatcgatcgcgttttcgttaaaatattcgataaaaaaacgctaaaactaaaaaacgtaaaataactaacgcaaaacaccatctaccctaacgttatcgaatctacgacgtctacaaccgataaaacacacgtcatcaaatctcaccacaacgtaaacgacctaccgaaaaaaataaaaataaacctaattaaaccgctaaaaaaactattcaaaaacgaaatacgtaaaattaatctaaaactaaacctaccgtacgacatactataccgtcacccgttcccgaaaccaaaccttaacgttcgtattctaaataaaataaaaaaaaaatactataacctactacgccgtactaacgccatcttcattaaaaaactacgtaaaacgaacctatacgacaaaatcaaccaaacgttcactatattcctaccgatacgttccgttaacgtaataaacgataatcgtaaatataactaaattatctctctacgtactatcgaaaccatcgactttataaccgcacactaaacgcatctaccgtacgatttcctcgatcgcgtttccaaccgcat

SEQ ID NO: 35603 - DNA, 582 bp, Artificial Sequence
  chemically treated genomic DNA (Homo sapiens) CpG-island No: 35603
aaatcgtaaaattatcggtcgcgttttcgttgaagtattcgatgaagaagcgttgaaattggaagacgtgaagtggttggcgtagggtattatttattttgacgttatcgaatttgcggcgtttgtaatcggtaaagtatacgttattaaattttattataacgtgggcggtttgtcgaaagagatgaagatgggtttggttgaatcgttgaaagagttgtttaaagacgaagtgcgtaagattggtttggagttgggtttgtcgtacgatatgttgtatcgttattcgttttcgggattaggttttggcgttcgtgttttgggtgaagtgaagaaagagtattgtgatttgttgcgtcgtgttgacgttatttttattgaagaattgcgtaaagcggatttgtacgataaagttagttaggcgtttattgtgtttttgtcggtacgtttcgttggcgtaatgggcgatggtcgtaagtatgattgggttgtttttttgcgtgttgtcgaaattatcgattttatgatcgtatattgggcgtatttgtcgtacgattttttcggtcgcgtttttaatcgtat

SEQ ID NO: 35604 - DNA, 582 bp, Artificial Sequence
  chemically treated genomic DNA (Homo sapiens) CpG-island No: 35604
atacgattaaaaacgcgaccgaaaaaatcgtacgacaaatacgcccaatatacgatcataaaatcgataatttcgacaacacgcaaaaaaacaacccaatcatacttacgaccatcgcccattacgccaacgaaacgtaccgacaaaaacacaataaacgcctaactaactttatcgtacaaatccgctttacgcaattcttcaataaaaataacgtcaacacgacgcaacaaatcacaatactctttcttcacttcacccaaaacacgaacgccaaaacctaatcccgaaaacgaataacgatacaacatatcgtacgacaaacccaactccaaaccaatcttacgcacttcgtctttaaacaactctttcaacgattcaaccaaacccatcttcatctctttcgacaaaccgcccacgttataataaaatttaataacgtatactttaccgattacaaacgccgcaaattcgataacgtcaaaataaataataccctacgccaaccacttcacgtcttccaatttcaacgcttcttcatcgaatacttcaacgaaaacgcgaccgataattttacgattt

SEQ ID NO: 35605 - DNA, 947 bp, Artificial Sequence
  chemically treated genomic DNA (Homo sapiens) CpG-island No: 35605
ttcgtagtaattttaggatacgcgtggtatagtttttgttgtcgtttcgtcgatgggtttagggatgaagggtgagagcgggtcggcgattgggagtggaggcgataatgggtagagttggattaaattgtttttagtagtttcgaaggtaaagtatggggtaggggcggatatatcgcggtttggagggcgttgggcgcggaggaacggagttcgggggtcgggtcggcgttcggttagtagcgtcgttttttcggaggaaggcgggggtcgggaggagggagcgggagaaggcggagggcggaggagggcggtgcgttgagaggttatttgtggttcgttttgatttcgagggggaatttgaaatttttatatttttggtatagtagtcgttttcggcgcgggtcgattttggggttgcgcgttggggcgcgaatagttagagcgtcggcgttacggtcgagaatatattttcgtcgtcgagttgagttgggtcgagtcggaggttgtggtgtttgattgcgttgggtattttcgggtcgtagcggtaaggaaggtcgttcggcgttcgggagagcgcgcgaggttatagaaacgtgttttagttaaagttggagtttcggcgtaattcggtttttttcgggagtcggagtttcgaggatcgagcgttttcggggcgtagtgcgttttttcgaggtagtcgtagtgtttggtaagggtcgttttgtttagggagcgtagcgcgttgggttttgcggggttttagaaacgcgcgggttttttggggttgggggagaggggagagggtcgatttcggagataatagttatagtgtttcgggttgtaggtcggcgggggtgggggtggcgggggatagggatggaggcgtcgtttggagtttaagttgtagggttttgcgggttgatttggttaggtgggggttatag

SEQ ID NO: 35606 - DNA, 947 bp, Artificial Sequence
  chemically treated genomic DNA (Homo sapiens) CpG-island No: 35606
ctataacccccacctaaccaaatcaacccgcaaaaccctacaacttaaactccaaacgacgcctccatccctatcccccgccacccccacccccgccgacctacaacccgaaacactataactattatctccgaaatcgaccctctcccctctcccccaaccccaaaaaacccgcgcgtttctaaaaccccgcaaaacccaacgcgctacgctccctaaacaaaacgacccttaccaaacactacgactacctcgaaaaaacgcactacgccccgaaaacgctcgatcctcgaaactccgactcccgaaaaaaaccgaattacgccgaaactccaactttaactaaaacacgtttctataacctcgcgcgctctcccgaacgccgaacgaccttccttaccgctacgacccgaaaatacccaacgcaatcaaacaccacaacctccgactcgacccaactcaactcgacgacgaaaatatattctcgaccgtaacgccgacgctctaactattcgcgccccaacgcgcaaccccaaaatcgacccgcgccgaaaacgactactataccaaaaatataaaaatttcaaattccccctcgaaatcaaaacgaaccacaaataacctctcaacgcaccgccctcctccgccctccgccttctcccgctccctcctcccgacccccgccttcctccgaaaaaacgacgctactaaccgaacgccgacccgacccccgaactccgttcctccgcgcccaacgccctccaaaccgcgatatatccgcccctaccccatactttaccttcgaaactactaaaaacaatttaatccaactctacccattatcgcctccactcccaatcgccgacccgctctcacccttcatccctaaacccatcgacgaaacgacaacaaaaactataccacgcgtatcctaaaattactacgaa

SEQ ID NO: 35607 - DNA, 947 bp, Artificial Sequence
  chemically treated genomic DNA (Homo sapiens) CpG-island No: 35607
ttgtaatttttatttaattaaattagttcgtaggattttgtaatttgagttttaagcggcgtttttatttttgtttttcgttatttttattttcgtcgatttgtaattcgaaatattgtggttgttgttttcggagtcggttttttttttttttttttagttttaagagattcgcgcgtttttagagtttcgtaaagtttagcgcgttgcgttttttgggtagagcggtttttgttaggtattgcggttgtttcgaaagggcgtattgcgtttcgaggacgttcgattttcgaggtttcgattttcggaaaaggtcgggttgcgtcgagattttagttttggttggggtacgtttttgtggtttcgcgcgttttttcgagcgtcgagcggttttttttatcgttgcggttcgagggtgtttagcgtagttagatattataattttcggttcggtttagtttagttcggcggcgaagatgtgttttcggtcgtggcgtcgacgttttggttgttcgcgttttagcgcgtagttttagggtcggttcgcgtcggaggcggttgttatgttaggaatgtgagagttttaggttttttttcgggattaaagcgaattataaataattttttagcgtatcgttttttttcgtttttcgttttttttcgtttttttttttcggttttcgttttttttcggggaggcggcgttgttggtcgagcgtcggttcggttttcgagtttcgttttttcgcgtttagcgttttttaggtcgcggtgtgttcgtttttgttttatgttttgttttcggagttgttggagataatttaatttaattttgtttattatcgtttttatttttagtcgtcgattcgtttttattttttatttttaaatttatcgacgggacgatagtaagggttgtattacgcgtgttttggggttgttgcggg

SEQ ID NO: 35608 - DNA, 947 bp, Artificial Sequence
  chemically treated genomic DNA (Homo sapiens) CpG-island No: 35608
cccgcaacaaccccaaaacacgcgtaatacaacccttactatcgtcccgtcgataaatttaaaaataaaaaataaaaacgaatcgacgactaaaaataaaaacgataataaacaaaattaaattaaattatctccaacaactccgaaaacaaaacataaaacaaaaacgaacacaccgcgacctaaaaaacgctaaacgcgaaaaaacgaaactcgaaaaccgaaccgacgctcgaccaacaacgccgcctccccgaaaaaaaacgaaaaccgaaaaaaaaaaacgaaaaaaaacgaaaaacgaaaaaaaacgatacgctaaaaaattatttataattcgctttaatcccgaaaaaaaacctaaaactctcacattcctaacataacaaccgcctccgacgcgaaccgaccctaaaactacgcgctaaaacgcgaacaaccaaaacgtcgacgccacgaccgaaaacacatcttcgccgccgaactaaactaaaccgaaccgaaaattataatatctaactacgctaaacaccctcgaaccgcaacgataaaaaaaaccgctcgacgctcgaaaaaacgcgcgaaaccacaaaaacgtaccccaaccaaaactaaaatctcgacgcaacccgaccttttccgaaaatcgaaacctcgaaaatcgaacgtcctcgaaacgcaatacgccctttcgaaacaaccgcaatacctaacaaaaaccgctctacccaaaaaacgcaacgcgctaaactttacgaaactctaaaaacgcgcgaatctcttaaaactaaaaaaaaaaaaaaaaaaccgactccgaaaacaacaaccacaatatttcgaattacaaatcgacgaaaataaaaataacgaaaaacaaaaataaaaacgccgcttaaaactcaaattacaaaatcctacgaactaatttaattaaataaaaattacaa

SEQ ID NO: 35609 - DNA, 629 bp, Artificial Sequence
  chemically treated genomic DNA (Homo sapiens) CpG-island No: 35609
ttggacgatatagaaattcgcggttcggtgttgattttgaatgatgtttttggtgcgttaagttgcgtattggcggaatataagtcgtatagtatgggcgatttatatattagtgaacgggcgacgcgcgagaatttacgttttaacgggattgatgagtcgagcgtgaagtttttcgatagtatcgtcgattattcgtaatagtcgggtgtggtgttgattaaagtgtcgaaaatattggtattgttggaatagtaattgcgtgcgttgcgtaaagtggttacgtcggatatacgtattattgtcggtgttaaggttcgtgatatttatatttttacgttggaattgttcgaaaaagtgttcggtttaattattattacgttggtatggaaaaaagcgcgtttgattaattgtatttttaatgaatcgtagttggtcgatgcgtcgtagatcgttagttggaagttggaaggtattgattggattatttataattatgcgaatgttttttttcgtatcgggtttgatatcggcgcgcgtttttttatgtaatatttgttagagaatttcgaaggggagattgtcgatttcggttgcggtaatggcgttattggtttgacgttgtttga

SEQ ID NO: 35610 - DNA, 629 bp, Artificial Sequence
  chemically treated genomic DNA (Homo sapiens) CpG-island No: 35610
tcaaacaacgtcaaaccaataacgccattaccgcaaccgaaatcgacaatctccccttcgaaattctctaacaaatattacataaaaaaacgcgcgccgatatcaaacccgatacgaaaaaaaacattcgcataattataaataatccaatcaataccttccaacttccaactaacgatctacgacgcatcgaccaactacgattcattaaaaatacaattaatcaaacgcgcttttttccataccaacgtaataataattaaaccgaacactttttcgaacaattccaacgtaaaaatataaatatcacgaaccttaacaccgacaataatacgtatatccgacgtaaccactttacgcaacgcacgcaattactattccaacaataccaatattttcgacactttaatcaacaccacacccgactattacgaataatcgacgatactatcgaaaaacttcacgctcgactcatcaatcccgttaaaacgtaaattctcgcgcgtcgcccgttcactaatatataaatcgcccatactatacgacttatattccgccaatacgcaacttaacgcaccaaaaacatcattcaaaatcaacaccgaaccgcgaatttctatatcgtccaa

SEQ ID NO: 35611 - DNA, 629 bp, Artificial Sequence
  chemically treated genomic DNA (Homo sapiens) CpG-island No: 35611
ttaagtagcgttagattaataacgttattatcgtaatcgagatcgataatttttttttcgagattttttggtagatgttgtataaagaagcgcgcgtcgatattaagttcggtgcgggagaagatattcgtatggttgtggatagtttagttagtattttttagtttttagttaacggtttgcggcgtatcggttagttgcggtttattgaaagtgtaattaattaggcgcgtttttttttatgttagcgtggtggtggttgggtcgagtattttttcgaatagttttagcgtggaagtgtgaatgttacgggttttggtatcggtaataatacgtgtattcgacgtgattattttgcgtagcgtacgtagttgttgttttagtaatgttagtgttttcggtattttgattagtattatattcggttgttgcgggtagtcggcggtgttgtcgagaaattttacgttcgatttattaatttcgttgaggcgtaaattttcgcgcgtcgttcgtttattgatgtatgagtcgtttatgttgtacggtttatgtttcgttagtgcgtagtttaacgtattaaaggtattatttaggattaatatcgggtcgcggatttttgtgtcgtttaa

SEQ ID NO: 35612 - DNA, 629 bp, Artificial Sequence
  chemically treated genomic DNA (Homo sapiens) CpG-island No: 35612
ttaaacgacacaaaaatccgcgacccgatattaatcctaaataatacctttaatacgttaaactacgcactaacgaaacataaaccgtacaacataaacgactcatacatcaataaacgaacgacgcgcgaaaatttacgcctcaacgaaattaataaatcgaacgtaaaatttctcgacaacaccgccgactacccgcaacaaccgaatataatactaatcaaaataccgaaaacactaacattactaaaacaacaactacgtacgctacgcaaaataatcacgtcgaatacacgtattattaccgataccaaaacccgtaacattcacacttccacgctaaaactattcgaaaaaatactcgacccaaccaccaccacgctaacataaaaaaaaacgcgcctaattaattacactttcaataaaccgcaactaaccgatacgccgcaaaccgttaactaaaaactaaaaaatactaactaaactatccacaaccatacgaatatcttctcccgcaccgaacttaatatcgacgcgcgcttctttatacaacatctaccaaaaaatctcgaaaaaaaaattatcgatctcgattacgataataacgttattaatctaacgctacttaa

SEQ ID NO: 35613 - DNA, 1100 bp, Artificial Sequence
  chemically treated genomic DNA (Homo sapiens) CpG-island No: 35613
ttgtttacggcgttaattgattttgcgtgacgttgtcgttcgcgtgttttttttttattattcgttttagttcggtttcgttttgcgtgtgtagtattttacggcggtttaggttgtcggtgatggtgatgcggttttttttatattgatacgtgtagtttaagtttgtcgggtttagttgttttgttattcgttcgtcgttgtcgtaacggtaacggattttcggtcggttcgtgtgacggtgcgttattattcggtttcggtatttattatcgtaagtaaagttgcgtatttgtttgttattacggttatatattatcgttagttcgtcgcggggcgtttagttatagcgtattagcggcgcggtaggtaaatttttcgggtatttcgggtcgtgcgttagttatacggtagatagacggatgtcgttgtttcggttatattcggtgtaattcggtagggtattaggaaaagcggacggttttcgtttcgtcggaaatggtttgttgtcgggttttttttgttcgttgcgtttgcgtggttagtattagtcggaagtgacgttaggtattattcgttacgtcggtgatttcgtcgttgaatttatcggcggtttcgcggtggaacgtttgtgtgcgttcgaagcggtttattagttcggttagtattcggtacggcggtagcggcgtaggtagtattttattcgttttcggtattcgtttatattaatcgagtagttattacggtttttgcggattgtttgtcgttagataacgatgcggatttaagcggagttttttcggtagcgtttgttagagtgcggttagtcggtgatttttatttagtttcgttacgtcgtcgcgtattagttatagtgattcgttgcggttgtaatcgtttttatcgggaaatacggtgttttaaatataggtttttgtcgtcgttattattgagtatttagtgtgttatcgcgtagttgtaagcggagtatttcgtaggcgtttttttacgttcggggcgtagggtttttttcgggcgcgcgtgtttgtgcgcggatacgttcgtgtgtgtcgggagagatgtattcggcgatagggttt

SEQ ID NO: 35614 - DNA, 1100 bp, Artificial Sequence
  chemically treated genomic DNA (Homo sapiens) CpG-island No: 35614
aaaccctatcgccgaatacatctctcccgacacacacgaacgtatccgcgcacaaacacgcgcgcccgaaaaaaaccctacgccccgaacgtaaaaaaacgcctacgaaatactccgcttacaactacgcgataacacactaaatactcaataataacgacgacaaaaacctatatttaaaacaccgtatttcccgataaaaacgattacaaccgcaacgaatcactataactaatacgcgacgacgtaacgaaactaaataaaaatcaccgactaaccgcactctaacaaacgctaccgaaaaaactccgcttaaatccgcatcgttatctaacgacaaacaatccgcaaaaaccgtaataactactcgattaatataaacgaataccgaaaacgaataaaatactacctacgccgctaccgccgtaccgaatactaaccgaactaataaaccgcttcgaacgcacacaaacgttccaccgcgaaaccgccgataaattcaacgacgaaatcaccgacgtaacgaataatacctaacgtcacttccgactaatactaaccacgcaaacgcaacgaacaaaaaaaacccgacaacaaaccatttccgacgaaacgaaaaccgtccgcttttcctaataccctaccgaattacaccgaatataaccgaaacaacgacatccgtctatctaccgtataactaacgcacgacccgaaatacccgaaaaatttacctaccgcgccgctaatacgctataactaaacgccccgcgacgaactaacgataatatataaccgtaataacaaacaaatacgcaactttacttacgataataaataccgaaaccgaataataacgcaccgtcacacgaaccgaccgaaaatccgttaccgttacgacaacgacgaacgaataacaaaacaactaaacccgacaaacttaaactacacgtatcaatataaaaaaaaccgcatcaccatcaccgacaacctaaaccgccgtaaaatactacacacgcaaaacgaaaccgaactaaaacgaataataaaaaaaaaacacgcgaacgacaacgtcacgcaaaatcaattaacgccgtaaacaa

SEQ ID NO: 35615 - DNA, 1100 bp, Artificial Sequence
  chemically treated genomic DNA (Homo sapiens) CpG-island No: 35615
gggttttgtcgtcggatatatttttttcggtatatacgggcgtgttcgcgtataaatacgcgcgttcgggggggattttgcgtttcgggcgtgaaaaaacgtttgcggaatatttcgtttatagttgcgcgataatatattagatatttagtgataacggcggtagaagtttgtatttggagtatcgtgtttttcggtgaggacggttatagtcgtagcgagttattgtggttggtgcgcggcggcgtggcgaaattggatgaaggttatcggttggtcgtattttggtaggcgttgtcggaagaatttcgtttaagttcgtatcgttatttggcgataaatagttcgtaggggtcgtggtggttgttcggttggtgtgagcgggtgtcggaagcggatgaggtgttgtttgcgtcgttgtcgtcgtatcgggtattgatcgggttggtggatcgtttcgggcgtatatagacgttttatcgcgaagtcgtcggtgaatttagcggcgaaattatcggcgtgacggatggtgtttggcgttattttcggttggtattgattacgtaggcgtagcgggtagaagaagttcggtagtaggttattttcggcgggacgggaatcgttcgttttttttgatattttgtcgggttatatcgaatatggtcgggataacggtattcgtttgtttgtcgtgtggttgacgtacgattcggaatattcggagaatttatttgtcgcgtcgttggtgcgttatggttggacgtttcgcggcgaattggcggtggtgtatgatcgtagtggtaaataggtgcgtagttttatttacgatgataaatatcggggtcggatggtggcgtatcgttatacgggtcggtcggaaattcgttatcgttacgatagcgacgggcgggtgatagaatagttaaattcggtaggtttaagttatacgtattagtatgagaaagatcgtattattattatcgatagtttggatcgtcgtgaagtgttgtatacgtagggcgaagtcgggttgaagcgggtggtgaaaaaggaatacgcggacggtagcgttacgtagagttagttgacgtcgtgggtag

SEQ ID NO: 35616 - DNA, 1100 bp, Artificial Sequence
  chemically treated genomic DNA (Homo sapiens) CpG-island No: 35616
ctacccacgacgtcaactaactctacgtaacgctaccgtccgcgtattcctttttcaccacccgcttcaacccgacttcgccctacgtatacaacacttcacgacgatccaaactatcgataataataatacgatctttctcatactaatacgtataacttaaacctaccgaatttaactattctatcacccgcccgtcgctatcgtaacgataacgaatttccgaccgacccgtataacgatacgccaccatccgaccccgatatttatcatcgtaaataaaactacgcacctatttaccactacgatcatacaccaccgccaattcgccgcgaaacgtccaaccataacgcaccaacgacgcgacaaataaattctccgaatattccgaatcgtacgtcaaccacacgacaaacaaacgaataccgttatcccgaccatattcgatataacccgacaaaatatcaaaaaaaacgaacgattcccgtcccgccgaaaataacctactaccgaacttcttctacccgctacgcctacgtaatcaataccaaccgaaaataacgccaaacaccatccgtcacgccgataatttcgccgctaaattcaccgacgacttcgcgataaaacgtctatatacgcccgaaacgatccaccaacccgatcaatacccgatacgacgacaacgacgcaaacaacacctcatccgcttccgacacccgctcacaccaaccgaacaaccaccacgacccctacgaactatttatcgccaaataacgatacgaacttaaacgaaattcttccgacaacgcctaccaaaatacgaccaaccgataaccttcatccaatttcgccacgccgccgcgcaccaaccacaataactcgctacgactataaccgtcctcaccgaaaaacacgatactccaaatacaaacttctaccgccgttatcactaaatatctaatatattatcgcgcaactataaacgaaatattccgcaaacgttttttcacgcccgaaacgcaaaatcccccccgaacgcgcgtatttatacgcgaacacgcccgtatataccgaaaaaaatatatccgacgacaaaaccc

SEQ ID NO: 35617 - DNA, 1058 bp, Artificial Sequence
  chemically treated genomic DNA (Homo sapiens) CpG-island No: 35617
aagttgttcgtttcgggttgcggcggggtttgttgtttcgtttcggcgttggcgggcgcgttttatattggtcgtcgaggggcgagcgcgggattcggaggcgggcggcgggcggggaaggcgcggggcgtggtttgtcgtttttcgagcgttaaggagcggagcgcgtttagttgcgtttagagttttcggtcggatttgaaaaagcgagagggagagcgagtaaaaggcgcgatttagagagttaggtaagcggggcgtcgatttcgggcggtttcggttcgcgtttttgtttttcggtcgggcggacggtgggtgagcgcggtcgcggggttttagtatttcggtgcgtttcggagagagtgggagggaggggaaggggcgggggcgagagagggaaaggtttttgagtcgggggcgggggcggcgggagacgggaatcgattcgatgtcggggttcgagtcgggttataggaaattttgttcgggtggggagagcggggtgcgcggagggcgtcgtaaatttgttagcgggcggggcgtttcggggattggagcgagcgttagcgggtggcgtttgtttttttgggttttttgtgttattttcgggttttagttcgtcggttcgttcggttcgggtaggcgttgcgcgggaggttgtgttcgggtgtttcggtcgttttttttcgggtttaggtttcggttttcgggggtcgttgattgtttttatttttcgcgttacgtttgggcgggaaagattttgaacgtcgcgtgagttggaaggcggatagtcgcggcgtagagattgtaggatcgtgagcggtgcggtgttcgtttcggggattcgggaattcgcgggtcggggcgtatcggggttggagagggcgcggggacgggcggttcgggtattggaggggcggcggcgggtgcggtagtttagcgttttcgcgggggcgggggggcgtttcgacggtcgggattataattttattttgattgtttggggtttttgttgtttgaaattgtttttagggtttgacggtggtattttttttttt

SEQ ID NO: 35618 - DNA, 1058 bp, Artificial Sequence
  chemically treated genomic DNA (Homo sapiens) CpG-island No: 35618
aaaaaaaaaaataccaccgtcaaaccctaaaaacaatttcaaacaacaaaaaccccaaacaatcaaaataaaattataatcccgaccgtcgaaacgcccccccgcccccgcgaaaacgctaaactaccgcacccgccgccgcccctccaatacccgaaccgcccgtccccgcgccctctccaaccccgatacgccccgacccgcgaattcccgaatccccgaaacgaacaccgcaccgctcacgatcctacaatctctacgccgcgactatccgccttccaactcacgcgacgttcaaaatctttcccgcccaaacgtaacgcgaaaaataaaaacaatcaacgacccccgaaaaccgaaacctaaacccgaaaaaaaacgaccgaaacacccgaacacaacctcccgcgcaacgcctacccgaaccgaacgaaccgacgaactaaaacccgaaaataacacaaaaaacccaaaaaaacaaacgccacccgctaacgctcgctccaatccccgaaacgccccgcccgctaacaaatttacgacgccctccgcgcaccccgctctccccacccgaacaaaatttcctataacccgactcgaaccccgacatcgaatcgattcccgtctcccgccgcccccgcccccgactcaaaaacctttccctctctcgcccccgccccttcccctccctcccactctctccgaaacgcaccgaaatactaaaaccccgcgaccgcgctcacccaccgtccgcccgaccgaaaaacaaaaacgcgaaccgaaaccgcccgaaatcgacgccccgcttacctaactctctaaatcgcgccttttactcgctctccctctcgctttttcaaatccgaccgaaaactctaaacgcaactaaacgcgctccgctccttaacgctcgaaaaacgacaaaccacgccccgcgccttccccgcccgccgcccgcctccgaatcccgcgctcgcccctcgacgaccaatataaaacgcgcccgccaacgccgaaacgaaacaacaaaccccgccgcaacccgaaacgaacaactt

SEQ ID NO: 35619 - DNA, 1058 bp, Artificial Sequence
  chemically treated genomic DNA (Homo sapiens) CpG-island No: 35619
ggaggagaaggtgttatcgttagattttaaaggtaattttagataataaagattttaagtaattaaaatggaattataatttcggtcgtcggagcgttttttcgttttcgcggaggcgttaggttgtcgtattcgtcgtcgtttttttagtgttcgggtcgttcgttttcgcgttttttttagtttcggtgcgtttcgattcgcgggttttcgggttttcggggcgagtatcgtatcgtttacgattttgtaatttttgcgtcgcggttgttcgttttttagtttacgcggcgtttaaaatttttttcgtttaggcgtgacgcgaggaatgaaaataattagcggttttcgagggtcggggtttgggttcgggagggggcggtcggggtattcgggtatagtttttcgcgtagcgtttgttcgagtcgggcggatcggcgggttggggttcggaggtgatataaagaatttagagagataaacgttattcgttggcgttcgttttaattttcggagcgtttcgttcgttgataagtttacggcgtttttcgcgtatttcgttttttttattcgagtaaagttttttgtggttcggttcggatttcggtatcgggtcggttttcgtttttcgtcgttttcgttttcggtttagagatttttttttttttcgttttcgttttttttttttttttttatttttttcggggcgtatcggggtgttggggtttcgcggtcgcgtttatttatcgttcgttcggtcgaggggtaagggcgcgggtcggggtcgttcgaggtcggcgtttcgtttgtttggttttttggatcgcgttttttgttcgttttttttttcgtttttttaggttcggtcgaaggttttgggcgtagttgagcgcgtttcgttttttggcgttcggaaagcggtaaattacgtttcgcgtttttttcgttcgtcgttcgttttcgggtttcgcgttcgtttttcggcggttagtgtagagcgcgttcgttagcgtcggggcggagtagtaggtttcgtcgtagttcggggcgggtaattt

SEQ ID NO: 35620 - DNA, 1058 bp, Artificial Sequence
  chemically treated genomic DNA (Homo sapiens) CpG-island No: 35620
aaattacccgccccgaactacgacgaaacctactactccgccccgacgctaacgaacgcgctctacactaaccgccgaaaaacgaacgcgaaacccgaaaacgaacgacgaacgaaaaaaacgcgaaacgtaatttaccgctttccgaacgccaaaaaacgaaacgcgctcaactacgcccaaaaccttcgaccgaacctaaaaaaacgaaaaaaaaaacgaacaaaaaacgcgatccaaaaaaccaaacaaacgaaacgccgacctcgaacgaccccgacccgcgcccttacccctcgaccgaacgaacgataaataaacgcgaccgcgaaaccccaacaccccgatacgccccgaaaaaaataaaaaaaaaaaaaaaaaacgaaaacgaaaaaaaaaaaaatctctaaaccgaaaacgaaaacgacgaaaaacgaaaaccgacccgataccgaaatccgaaccgaaccacaaaaaactttactcgaataaaaaaaacgaaatacgcgaaaaacgccgtaaacttatcaacgaacgaaacgctccgaaaattaaaacgaacgccaacgaataacgtttatctctctaaattctttatatcacctccgaaccccaacccgccgatccgcccgactcgaacaaacgctacgcgaaaaactatacccgaataccccgaccgccccctcccgaacccaaaccccgaccctcgaaaaccgctaattattttcattcctcgcgtcacgcctaaacgaaaaaaattttaaacgccgcgtaaactaaaaaacgaacaaccgcgacgcaaaaattacaaaatcgtaaacgatacgatactcgccccgaaaacccgaaaacccgcgaatcgaaacgcaccgaaactaaaaaaaacgcgaaaacgaacgacccgaacactaaaaaaacgacgacgaatacgacaacctaacgcctccgcgaaaacgaaaaaacgctccgacgaccgaaattataattccattttaattacttaaaatctttattatctaaaattacctttaaaatctaacgataacaccttctcctcc

SEQ ID NO: 35621 - DNA, 585 bp, Artificial Sequence
  chemically treated genomic DNA (Homo sapiens) CpG-island No: 35621
tcggtttcggtttagttcgttcggttttcggggtaagagttttcgtttacgttattttcgtcgtcgttttttcggttttttagcgaaagagataaagagtcggcgttttaattcgcgaagtcgcggttgtcgggagcggtagatcgggggattttgttttaaaacgaggggcgggcgtagggagggcgaggtggtggtattcgggttaagttgtcgcgcgttcggttgcgcgggtagcgggatacgcggatgtggggcgggtagtttcggcgtatggaagtagtggttttaggcgagagtttgcgggtttcgacggacggacgggcgggtattagcgcgcggtggtcggagttcggtagtttcgcggcgggtcggtcgagcgtttggggtagcgtcgttgggcgggtcggtcgtagttgtatttatcggatcggaagaaggtcgcgatgtcggttaggtttttggtcgttttttttgttttttcgtcggtatcgttttcgtagttcgagttagtcgcgttggtcgtcgcggcggggtcggaggacgcggcgggggcggcggtttcgtcgttgttgtcgtttatgg

SEQ ID NO: 35622 - DNA, 585 bp, Artificial Sequence
  chemically treated genomic DNA (Homo sapiens) CpG-island No: 35622
ccataaacgacaacaacgacgaaaccgccgcccccgccgcgtcctccgaccccgccgcgacgaccaacgcgactaactcgaactacgaaaacgataccgacgaaaaaacaaaaaaaacgaccaaaaacctaaccgacatcgcgaccttcttccgatccgataaatacaactacgaccgacccgcccaacgacgctaccccaaacgctcgaccgacccgccgcgaaactaccgaactccgaccaccgcgcgctaatacccgcccgtccgtccgtcgaaacccgcaaactctcgcctaaaaccactacttccatacgccgaaactacccgccccacatccgcgtatcccgctacccgcgcaaccgaacgcgcgacaacttaacccgaataccaccacctcgccctccctacgcccgcccctcgttttaaaacaaaatcccccgatctaccgctcccgacaaccgcgacttcgcgaattaaaacgccgactctttatctctttcgctaaaaaaccgaaaaaacgacgacgaaaataacgtaaacgaaaactcttaccccgaaaaccgaacgaactaaaccgaaaccga

SEQ ID NO: 35623 - DNA, 585 bp, Artificial Sequence
  chemically treated genomic DNA (Homo sapiens) CpG-island No: 35623
ttatgagcggtagtagcggcggagtcgtcgttttcgtcgcgtttttcggtttcgtcgcggcggttagcgcggttggttcgggttgcgggggcggtgtcggcgagggggtagaggaggcggttaaggatttggtcgatatcgcggttttttttcgattcggtgagtgtaattgcggtcggttcgtttagcggcgttgttttaagcgttcggtcgattcgtcgcggagttgtcgagtttcggttatcgcgcgttggtgttcgttcgttcgttcgtcggggttcgtaggttttcgtttgggattattgtttttatgcgtcggggttgttcgttttatattcgcgtgtttcgttgttcgcgtagtcgggcgcgcggtagtttggttcgaatgttattatttcgttttttttgcgttcgtttttcgttttagggtagaatttttcggtttgtcgttttcggtagtcgcggtttcgcgggttggggcgtcggttttttgtttttttcgttggaggatcgaggaggcggcggcggagatggcgtgggcggaggtttttatttcggaggtcgagcggattgagtcggggtcgg

SEQ ID NO: 35624 - DNA, 585 bp, Artificial Sequence
  chemically treated genomic DNA (Homo sapiens) CpG-island No: 35624
ccgaccccgactcaatccgctcgacctccgaaataaaaacctccgcccacgccatctccgccgccgcctcctcgatcctccaacgaaaaaaacaaaaaaccgacgccccaacccgcgaaaccgcgactaccgaaaacgacaaaccgaaaaattctaccctaaaacgaaaaacgaacgcaaaaaaaacgaaataataacattcgaaccaaactaccgcgcgcccgactacgcgaacaacgaaacacgcgaatataaaacgaacaaccccgacgcataaaaacaataatcccaaacgaaaacctacgaaccccgacgaacgaacgaacgaacaccaacgcgcgataaccgaaactcgacaactccgcgacgaatcgaccgaacgcttaaaacaacgccgctaaacgaaccgaccgcaattacactcaccgaatcgaaaaaaaaccgcgatatcgaccaaatccttaaccgcctcctctaccccctcgccgacaccgcccccgcaacccgaaccaaccgcgctaaccgccgcgacgaaaccgaaaaacgcgacgaaaacgacgactccgccgctactaccgctcataa

SEQ ID NO: 35625 - DNA, 683 bp, Artificial Sequence
  chemically treated genomic DNA (Homo sapiens) CpG-island No: 35625
aattaaatcgaacgtttttgtagttttttcgttagttttgcgggagttatcgtttaacgcggtttcgttttttttttaggtttcgtttatcgtcgagtttaggttcggttttgacgaagttcgtcggaaattatcgaagttttttttttttttttttttttttcgttttttgtttttttttttttttttattcgggttttttcggtcgtgattttttttttttttttttttttttttttattgaaattaagatggaggttcgcggtagtcgtcggcgttcgtgatttcggaggtttcgtcggttacgggttttcgttttcgcgattgcgcgtcgggaggcgcgtgttgttgttcgcgtttcggtcggcgttcgggaggtcgtggtttcgcgttttcgttttcggtagttcgcggattatcgggcggagttttcgtttatgtgggtagcgttttttggagttaaagtcgacgatagaatagattattcgtacgatttcggggttttgcgtatcgtagcgtacgagagagcgggtaagatgggtagttagagaatacggacgaaaatttaggaaaggcgagaatagaggtcggatatcggcgagtagtataaaggagacgcggagagatcgacggacgggacgcgagacggaaggacgtacgataataataaattaattaggaaa

SEQ ID NO: 35626 - DNA, 683 bp, Artificial Sequence
  chemically treated genomic DNA (Homo sapiens) CpG-island No: 35626
tttcctaattaatttattattatcgtacgtccttccgtctcgcgtcccgtccgtcgatctctccgcgtctcctttatactactcgccgatatccgacctctattctcgcctttcctaaattttcgtccgtattctctaactacccatcttacccgctctctcgtacgctacgatacgcaaaaccccgaaatcgtacgaataatctattctatcgtcgactttaactccaaaaaacgctacccacataaacgaaaactccgcccgataatccgcgaactaccgaaaacgaaaacgcgaaaccacgacctcccgaacgccgaccgaaacgcgaacaacaacacgcgcctcccgacgcgcaatcgcgaaaacgaaaacccgtaaccgacgaaacctccgaaatcacgaacgccgacgactaccgcgaacctccatcttaatttcaataaaaaaaaaaaaaaaaaaaaaaaaaaaatcacgaccgaaaaaacccgaataaaaaaaaaaaaaaaaacaaaaaacgaaaaaaaaaaaaaaaaaaaaaaaacttcgataatttccgacgaacttcgtcaaaaccgaacctaaactcgacgataaacgaaacctaaaaaaaaaacgaaaccgcgttaaacgataactcccgcaaaactaacgaaaaaactacaaaaacgttcgatttaatt

SEQ ID NO: 35627 - DNA, 683 bp, Artificial Sequence
  chemically treated genomic DNA (Homo sapiens) CpG-island No: 35627
ttttttgattagtttgttgttgtcgtgcgttttttcgtttcgcgtttcgttcgtcggttttttcgcgttttttttatgttgttcgtcgatgttcggtttttgttttcgttttttttgggttttcgttcgtgttttttagttatttattttgttcgttttttcgtgcgttgcggtacgtagagtttcggggtcgtgcgggtggtttgttttgtcgtcggttttggttttaaggagcgttgtttatatagacgaggatttcgttcggtagttcgcgagttgtcgagggcggaggcgcggagttacggtttttcgggcgtcggtcggagcgcgggtagtagtacgcgtttttcgacgcgtagtcgcgagggcgggggttcgtggtcggcgagattttcgggattacgggcgtcggcggttgtcgcgagtttttattttgattttaatggggaaggaaggaggggggagggggaaattacggtcgagggaattcgggtgaaaggaaaagggagaatagggaacggagaggaaggaaaaaaaagaggggtttcggtaattttcggcgaatttcgttagggtcgagtttgggttcggcggtgggcggagtttgggggaggggcggggtcgcgttgggcgatggttttcgtagggttggcggggaggttgtaggaacgttcggtttggtt

SEQ ID NO: 35628 - DNA, 683 bp, Artificial Sequence
  chemically treated genomic DNA (Homo sapiens) CpG-island No: 35628
aaccaaaccgaacgttcctacaacctccccgccaaccctacgaaaaccatcgcccaacgcgaccccgcccctcccccaaactccgcccaccgccgaacccaaactcgaccctaacgaaattcgccgaaaattaccgaaacccctcttttttttccttcctctccgttccctattctcccttttcctttcacccgaattccctcgaccgtaatttccccctcccccctccttccttccccattaaaatcaaaataaaaactcgcgacaaccgccgacgcccgtaatcccgaaaatctcgccgaccacgaacccccgccctcgcgactacgcgtcgaaaaacgcgtactactacccgcgctccgaccgacgcccgaaaaaccgtaactccgcgcctccgccctcgacaactcgcgaactaccgaacgaaatcctcgtctatataaacaacgctccttaaaaccaaaaccgacgacaaaacaaaccacccgcacgaccccgaaactctacgtaccgcaacgcacgaaaaaacgaacaaaataaataactaaaaaacacgaacgaaaacccaaaaaaaacgaaaacaaaaaccgaacatcgacgaacaacataaaaaaaacgcgaaaaaaccgacgaacgaaacgcgaaacgaaaaaacgcacgacaacaacaaactaatcaaaaaa

SEQ ID NO: 35629 - DNA, 632 bp, Artificial Sequence
  chemically treated genomic DNA (Homo sapiens) CpG-island No: 35629
taggcgtcgggatagtttttggcgttttttcgggtttttatatcgcgtgatttcggggtattcgggtttttttaggtttcggtttcgcgtatattttttgggtcgtagttttttcgcggttcggtcgcgtttttgttcgcgtttcgcgttcggtcgcgtttcgggggttcgttttcgcggaggtcgcggcgtttttcgtagtttaggtcggcgcgttcggagcgtatcgttggcgatgagtttggtcgatagttgtttgacgagtttagggattcgtttttattggtattcggagcggtattttcgattttcgtttttagtcgcgagtttgtttttttggtcgttatcgcggtttggtcgggttcgtcgttcgtttcgtaggttttatcgtcgtcgtcgcggattttttcgtcgtttttcgtcgtcgtcgggggttcgggtttcggttttcggtttcgcggcgtaacgggagcgtcggttggggaaggggcggggaggcgggcggcggcggcgggcgcggcggggtttcgggcgtcgcgaggagcggtttttgtcggttagggtcggagtcgtagtattgatcggggtcggagttagggttggggtaggggcgggggttagggcgggagata

SEQ ID NO: 35630 - DNA, 632 bp, Artificial Sequence
  chemically treated genomic DNA (Homo sapiens) CpG-island No: 35630
tatctcccgccctaacccccgcccctaccccaaccctaactccgaccccgatcaatactacgactccgaccctaaccgacaaaaaccgctcctcgcgacgcccgaaaccccgccgcgcccgccgccgccgcccgcctccccgccccttccccaaccgacgctcccgttacgccgcgaaaccgaaaaccgaaacccgaacccccgacgacgacgaaaaacgacgaaaaaatccgcgacgacgacgataaaacctacgaaacgaacgacgaacccgaccaaaccgcgataacgaccaaaaaaacaaactcgcgactaaaaacgaaaatcgaaaataccgctccgaataccaataaaaacgaatccctaaactcgtcaaacaactatcgaccaaactcatcgccaacgatacgctccgaacgcgccgacctaaactacgaaaaacgccgcgacctccgcgaaaacgaacccccgaaacgcgaccgaacgcgaaacgcgaacaaaaacgcgaccgaaccgcgaaaaaactacgacccaaaaaatatacgcgaaaccgaaacctaaaaaaacccgaataccccgaaatcacgcgatataaaaacccgaaaaaacgccaaaaactatcccgacgccta

SEQ ID NO: 35631 - DNA, 632 bp, Artificial Sequence
  chemically treated genomic DNA (Homo sapiens) CpG-island No: 35631
tgtttttcgttttagttttcgtttttgttttagttttggtttcggtttcggttagtgttgcggtttcggttttggtcggtaggggtcgtttttcgcggcgttcggggtttcgtcgcgttcgtcgtcgtcgttcgttttttcgttttttttttagtcggcgttttcgttacgtcgcggagtcgggagtcggagttcgagttttcggcggcggcgggaggcggcgagggggttcgcggcggcggcggtggggtttgcggggcgggcgacgggttcggttaggtcgcgatggcgattaagaaggtaggttcgcggttggagacggagatcgagggtgtcgtttcgagtgttagtgggagcggatttttgagttcgttaagtagttgtcggttaagtttatcgttaacggtacgtttcgggcgcgtcggtttgggttgcggggggcgtcgcggttttcgcgggaacgggttttcgaggcgcggtcgggcgcggggcgcgggtaggggcgcggtcgggtcgcgagggagttgcggtttaggggatgtgcgcgggatcggggtttgggggagttcgggtgtttcggagttacgcggtgtgggggttcgggggggcgttaggggttgtttcggcgtttg

SEQ ID NO: 35632 - DNA, 632 bp, Artificial Sequence
  chemically treated genomic DNA (Homo sapiens) CpG-island No: 35632
caaacgccgaaacaacccctaacgcccccccgaacccccacaccgcgtaactccgaaacacccgaactcccccaaaccccgatcccgcgcacatcccctaaaccgcaactccctcgcgacccgaccgcgcccctacccgcgccccgcgcccgaccgcgcctcgaaaacccgttcccgcgaaaaccgcgacgccccccgcaacccaaaccgacgcgcccgaaacgtaccgttaacgataaacttaaccgacaactacttaacgaactcaaaaatccgctcccactaacactcgaaacgacaccctcgatctccgtctccaaccgcgaacctaccttcttaatcgccatcgcgacctaaccgaacccgtcgcccgccccgcaaaccccaccgccgccgccgcgaaccccctcgccgcctcccgccgccgccgaaaactcgaactccgactcccgactccgcgacgtaacgaaaacgccgactaaaaaaaaaacgaaaaaacgaacgacgacgacgaacgcgacgaaaccccgaacgccgcgaaaaacgacccctaccgaccaaaaccgaaaccgcaacactaaccgaaaccgaaaccaaaactaaaacaaaaacgaaaactaaaacgaaaaaca

SEQ ID NO: 35633 - DNA, 899 bp, Artificial Sequence
  chemically treated genomic DNA (Homo sapiens) CpG-island No: 35633
tttaatcggcgtagcggagtcgtttggttgcgttcgtcgtagttttatttttatttcgtgtatcgggtttcgtagtgattcgggtttcgtagtgattcgggttttcgtagcgattcgggtttcggttgtttaggtaacgtaggacgtaggcgcgaaaggcgggtgtttggcgcgcgttgtagtttttttttttttcggcgggtcgcggaggcgacgcgttgtttgcgttttgaggcgagtggttttttagtcggaaaatcgcggtttcggtgtcgttttgggtttagttagtgagaggtcgggggtgtggtagagagaaggagtcggtcgggtatttaggatcgcgttagtttttgagttcggtttttttcgtattttcgagtgcgcgtttgttgttcgtcgtagttcgggcgttgaaggtagtaaagcggttattcggtcgtattatggtgattttttgttttattagtttttcgagtttcgtcgttcgagcggggaggcgggataacgattagaattttcgcgtttcggtgaagaagagtaggcgttcgcgttttcggaggaagtagtcgttgtattttttgaattcgtgttcgttttcgggagatttcggtatttgcgatttgttcgagttttttagtttcggtttagacggcgtagagagtttttttgcggcgcggggtggtagttttttgttcggttcggtttagttcgtggcgtagttagatttatagatttttcgcgattacggttagagttgttacgtttttcgtaaggcgtaggagagttatttttattcgcgggaggcgttggtacggtagttataagtgaggtgttggtagagttagttttacgtcgtcgttttttttttttttttaggttttttttttttttgtcgg

SEQ ID NO: 35634 - DNA, 899 bp, Artificial Sequence
  chemically treated genomic DNA (Homo sapiens) CpG-island No: 35634
ccgacaaaaaaaaaaaaaacctaaaaaaaaaaaaaaaacgacgacgtaaaactaactctaccaacacctcacttataactaccgtaccaacgcctcccgcgaataaaaataactctcctacgccttacgaaaaacgtaacaactctaaccgtaatcgcgaaaaatctataaatctaactacgccacgaactaaaccgaaccgaacaaaaaactaccaccccgcgccgcaaaaaaactctctacgccgtctaaaccgaaactaaaaaactcgaacaaatcgcaaataccgaaatctcccgaaaacgaacacgaattcaaaaaatacaacgactacttcctccgaaaacgcgaacgcctactcttcttcaccgaaacgcgaaaattctaatcgttatcccgcctccccgctcgaacgacgaaactcgaaaaactaataaaacaaaaaatcaccataatacgaccgaataaccgctttactaccttcaacgcccgaactacgacgaacaacaaacgcgcactcgaaaatacgaaaaaaaccgaactcaaaaactaacgcgatcctaaatacccgaccgactccttctctctaccacacccccgacctctcactaactaaacccaaaacgacaccgaaaccgcgattttccgactaaaaaaccactcgcctcaaaacgcaaacaacgcgtcgcctccgcgacccgccgaaaaaaaaaaaaactacaacgcgcgccaaacacccgcctttcgcgcctacgtcctacgttacctaaacaaccgaaacccgaatcgctacgaaaacccgaatcactacgaaacccgaatcactacgaaacccgatacacgaaataaaaataaaactacgacgaacgcaaccaaacgactccgctacgccgattaaa

SEQ ID NO: 35635 - DNA, 899 bp, Artificial Sequence
  chemically treated genomic DNA (Homo sapiens) CpG-island No: 35635
tcggtaggagaggagagagtttgggaggagaggaagagcggcggcgtggagttggttttattagtattttatttgtggttgtcgtgttagcgtttttcgcgggtggaagtggtttttttgcgttttgcggaaggcgtagtagttttggtcgtagtcgcggaaggtttgtagatttagttgcgttacgggttgggtcgggtcgggtagggggttattatttcgcgtcgtagaggggttttttgcgtcgtttgagtcggagttgggggattcgaataggtcgtaaatgtcggagtttttcgggagcgggtacgggtttaggggatgtagcggttgtttttttcggaggcgcggacgtttgtttttttttatcggggcgcgaaggttttggtcgttgtttcgttttttcgttcgggcggcggggttcgaggggttggtgggatagggggttattatgatgcggtcgggtggtcgttttattatttttaacgttcgggttgcggcgggtagtaaacgcgtattcgaaagtgcgaaggaggtcgggtttagaggttggcgcggttttaagtattcggtcggttttttttttttattatattttcggttttttattggttgagtttagagcggtatcggagtcgcgatttttcggttggagaattattcgttttagggcgtaggtagcgcgtcgttttcgcggttcgtcggggggagggggagttgtagcgcgcgttaggtattcgtttttcgcgtttgcgttttgcgttatttgggtaatcggagttcgggtcgttgcgggagttcgggttattgcggagttcgggttattgcggagttcggtgtacggagtgggagtagggttgcggcgggcgtagttaagcggtttcgttgcgtcggttaaa

SEQ ID NO: 35636 - DNA, 899 bp, Artificial Sequence
  chemically treated genomic DNA (Homo sapiens) CpG-island No: 35636
tttaaccgacgcaacgaaaccgcttaactacgcccgccgcaaccctactcccactccgtacaccgaactccgcaataacccgaactccgcaataacccgaactcccgcaacgacccgaactccgattacccaaataacgcaaaacgcaaacgcgaaaaacgaatacctaacgcgcgctacaactccccctccccccgacgaaccgcgaaaacgacgcgctacctacgccctaaaacgaataattctccaaccgaaaaatcgcgactccgataccgctctaaactcaaccaataaaaaaccgaaaatataataaaaaaaaaaaaccgaccgaatacttaaaaccgcgccaacctctaaacccgacctccttcgcactttcgaatacgcgtttactacccgccgcaacccgaacgttaaaaataataaaacgaccacccgaccgcatcataataaccccctatcccaccaacccctcgaaccccgccgcccgaacgaaaaaacgaaacaacgaccaaaaccttcgcgccccgataaaaaaaaacaaacgtccgcgcctccgaaaaaaacaaccgctacatcccctaaacccgtacccgctcccgaaaaactccgacatttacgacctattcgaatcccccaactccgactcaaacgacgcaaaaaacccctctacgacgcgaaataataaccccctacccgacccgacccaacccgtaacgcaactaaatctacaaaccttccgcgactacgaccaaaactactacgccttccgcaaaacgcaaaaaaaccacttccacccgcgaaaaacgctaacacgacaaccacaaataaaatactaataaaaccaactccacgccgccgctcttcctctcctcccaaactctctcctctcctaccga

SEQ ID NO: 35637 - DNA, 680 bp, Artificial Sequence
  chemically treated genomic DNA (Homo sapiens) CpG-island No: 35637
aggcgtgcgggggcggcgcggtcggtcgtcgggttttcgatagtatttgttttaatagaatgttggtattgtcgggtcgggcgttgttttgtaagtcggggaagtcggagaggaaggtggggcggttgattcgggtcgggcggggtttgcgcgttcggtgtttcgagggttgattcgcgtttaacgtttgtgtgttcggttagttcgttttttcgcggaagttttttttcggatgtataggcgggagttcggtgtcggtgtacgaggatttttcggacgtcgagtttatagcgttgttaggtgagtttcgtggtatttacgttatttttcgggtttttcgcgtcgggagggtgcggcgcgtatagttcggaggagtttttttttttcgggttttgacgttttagttgcgagtttggcggagaggtttagggttcgttcggcgcgtgtttttcggttttttcgcgtagtttttattattatagatttgtaggatttcgttgattgtttttcgttattcgggttcgacgcgtcgtttggtggtgatttggtcgtttcgtaggtatttttttttttcgtggagtttcgtggttttacgtaatttaaattttttttcggggtggtggttttaattttttaaaagtttttttcgggtcgggagcgtaggtatatttagttggtga

SEQ ID NO: 35638 - DNA, 680 bp, Artificial Sequence
  chemically treated genomic DNA (Homo sapiens) CpG-island No: 35638
tcaccaactaaatatacctacgctcccgacccgaaaaaaacttttaaaaaattaaaaccaccaccccgaaaaaaaatttaaattacgtaaaaccacgaaactccacgaaaaaaaaaaatacctacgaaacgaccaaatcaccaccaaacgacgcgtcgaacccgaataacgaaaaacaatcaacgaaatcctacaaatctataataataaaaactacgcgaaaaaaccgaaaaacacgcgccgaacgaaccctaaacctctccgccaaactcgcaactaaaacgtcaaaacccgaaaaaaaaaaactcctccgaactatacgcgccgcaccctcccgacgcgaaaaacccgaaaaataacgtaaataccacgaaactcacctaacaacgctataaactcgacgtccgaaaaatcctcgtacaccgacaccgaactcccgcctatacatccgaaaaaaaacttccgcgaaaaaacgaactaaccgaacacacaaacgttaaacgcgaatcaaccctcgaaacaccgaacgcgcaaaccccgcccgacccgaatcaaccgccccaccttcctctccgacttccccgacttacaaaacaacgcccgacccgacaataccaacattctattaaaacaaatactatcgaaaacccgacgaccgaccgcgccgcccccgcacgcct

SEQ ID NO: 35639 - DNA, 680 bp, Artificial Sequence
  chemically treated genomic DNA (Homo sapiens) CpG-island No: 35639
ttattagttgagtgtgtttgcgttttcgattcgagaggagtttttggggaattaaaattattatttcggaggagggtttgggttgcgtgaaattacgaggttttacgagaaggggaggtatttgcgaggcggttaggttattattaggcggcgcgtcggattcgagtagcgaagagtagttagcgaggttttgtaggtttatggtggtgagggttgcgcggggagatcgggagatacgcgtcgggcgggttttgagttttttcgttaggttcgtagttaggacgttagagttcgggggagagaagttttttcgagttgtgcgcgtcgtattttttcggcgcggggaattcgaggggtagcgtgggtgttacggggtttatttggtagcgttgtgggttcggcgttcgggggattttcgtatatcgatatcgggttttcgtttgtgtattcggggaagaattttcgcggaggagcgaattggtcgggtatataaacgttgaacgcgggttagttttcggggtatcgagcgcgtagatttcgttcggttcgaattaatcgttttattttttttttcggttttttcggtttgtagagtagcgttcggttcggtagtgttagtattttgttggggtagatgttgtcgaaggttcgacggtcggtcgcgtcgttttcgtacgttt

SEQ ID NO: 35640 - DNA, 680 bp, Artificial Sequence
  chemically treated genomic DNA (Homo sapiens) CpG-island No: 35640
aaacgtacgaaaacgacgcgaccgaccgtcgaaccttcgacaacatctaccccaacaaaatactaacactaccgaaccgaacgctactctacaaaccgaaaaaaccgaaaaaaaaaataaaacgattaattcgaaccgaacgaaatctacgcgctcgataccccgaaaactaacccgcgttcaacgtttatatacccgaccaattcgctcctccgcgaaaattcttccccgaatacacaaacgaaaacccgatatcgatatacgaaaatcccccgaacgccgaacccacaacgctaccaaataaaccccgtaacacccacgctacccctcgaattccccgcgccgaaaaaatacgacgcgcacaactcgaaaaaacttctctcccccgaactctaacgtcctaactacgaacctaacgaaaaaactcaaaacccgcccgacgcgtatctcccgatctccccgcgcaaccctcaccaccataaacctacaaaacctcgctaactactcttcgctactcgaatccgacgcgccgcctaataataacctaaccgcctcgcaaatacctccccttctcgtaaaacctcgtaatttcacgcaacccaaaccctcctccgaaataataattttaattccccaaaaactcctctcgaatcgaaaacgcaaacacactcaactaataa

SEQ ID NO: 35641 - DNA, 640 bp, Artificial Sequence
  chemically treated genomic DNA (Homo sapiens) CpG-island No: 35641
cgtgtagttgaaggaattcgttagtcgaattcggtatttggtttcggtgttggatgtaagtggggcgcgggcgtgtgggaattgtagtacgtcggaattgaatagtttagtgtattttcgtttagtatcgggattcgtgggggtttcggagaggagagtatcgttgagtgcgtggtgcgtagcgcgtttaggttattttttgtacgtttcgaattcggagggttcggtaggttttagggcggcgtttttttttgtttttcgtagaagttgatgattatatagtttcgggattgtggggcggcggtcgagttttttttgtttaaggcgaaggttaaaaggagtttggaggagttggttagcgttgcggggtaggattgcgcggaagtggacgttattttgagggagattttcgagcgttgcgatgaagttttttagagtcgcgattttaagcggtttcgattgttgttagagttcgcgaatattgatattaggttcgggaatttgtatggcgtttttcgggggttgcgtatagattgtagtcggagcgcgttgaatttgagttatagtgagttggaggagggcggtttttttagtattcgtattcgtagttatagtattattcgtattttcgttttttttt

SEQ ID NO: 35642 - DNA, 640 bp, Artificial Sequence
  chemically treated genomic DNA (Homo sapiens) CpG-island No: 35642
aaaaaaaaacgaaaatacgaataatactataactacgaatacgaatactaaaaaaaccgccctcctccaactcactataactcaaattcaacgcgctccgactacaatctatacgcaacccccgaaaaacgccatacaaattcccgaacctaatatcaatattcgcgaactctaacaacaatcgaaaccgcttaaaatcgcgactctaaaaaacttcatcgcaacgctcgaaaatctccctcaaaataacgtccacttccgcgcaatcctaccccgcaacgctaaccaactcctccaaactccttttaaccttcgccttaaacaaaaaaaactcgaccgccgccccacaatcccgaaactatataatcatcaacttctacgaaaaacaaaaaaaaacgccgccctaaaacctaccgaaccctccgaattcgaaacgtacaaaaaataacctaaacgcgctacgcaccacgcactcaacgatactctcctctccgaaacccccacgaatcccgatactaaacgaaaatacactaaactattcaattccgacgtactacaattcccacacgcccgcgccccacttacatccaacaccgaaaccaaataccgaattcgactaacgaattccttcaactacacg

SEQ ID NO: 35643 - DNA, 640 bp, Artificial Sequence
  chemically treated genomic DNA (Homo sapiens) CpG-island No: 35643
gggggaaggcgagggtgcggatggtgttgtggttgcggatgcgggtgttgaaggagtcgtttttttttagtttattgtggtttaggtttaacgcgtttcggttgtagtttgtgcgtagttttcggaaggcgttatgtaggttttcgggtttggtgttagtattcgcgggttttggtagtagtcggggtcgtttgggatcgcggttttgaagggttttatcgtagcgttcggaaattttttttaggatggcgtttattttcgcgtaattttgtttcgtagcgttgattaatttttttaggttttttttggttttcgttttgagtaggaagggttcggtcgtcgttttataatttcgggattgtgtgattattagtttttacgaaagatagggaagagcgtcgttttggggtttgtcggatttttcgggttcggagcgtgtaaaaggtgatttaggcgcgttacgtattacgtatttagcggtattttttttttcggggtttttacgggtttcgatgttgggcggggatgtattgaattgtttagtttcgacgtgttgtagtttttatacgttcgcgttttatttatatttagtatcgaggttaggtgtcgggttcggttggcgagtttttttagttgtacg

SEQ ID NO: 35644 - DNA, 640 bp, Artificial Sequence
  chemically treated genomic DNA (Homo sapiens) CpG-island No: 35644
cgtacaactaaaaaaactcgccaaccgaacccgacacctaacctcgatactaaatataaataaaacgcgaacgtataaaaactacaacacgtcgaaactaaacaattcaatacatccccgcccaacatcgaaacccgtaaaaaccccgaaaaaaaaaataccgctaaatacgtaatacgtaacgcgcctaaatcaccttttacacgctccgaacccgaaaaatccgacaaaccccaaaacgacgctcttccctatctttcgtaaaaactaataatcacacaatcccgaaattataaaacgacgaccgaacccttcctactcaaaacgaaaaccaaaaaaaacctaaaaaaattaatcaacgctacgaaacaaaattacgcgaaaataaacgccatcctaaaaaaaatttccgaacgctacgataaaacccttcaaaaccgcgatcccaaacgaccccgactactaccaaaacccgcgaatactaacaccaaacccgaaaacctacataacgccttccgaaaactacgcacaaactacaaccgaaacgcgttaaacctaaaccacaataaactaaaaaaaaacgactccttcaacacccgcatccgcaaccacaacaccatccgcaccctcgccttccccc

SEQ ID NO: 35645 - DNA, 783 bp, Artificial Sequence
  chemically treated genomic DNA (Homo sapiens) CpG-island No: 35645
tcgaggtgtggttcgagtttgggtattatttacgtcggtcgggtgatttcggttttttggggttttcgcgtttcgttagtaggcgacgttgggaggttggggtaggtttagagcgaggacgggttcggattgggtagtggggatgtattagggtcgggtgcggcgggagacggttcgggaggcggaaggtcgcggatttgttcgatagaagagtagatgaggggagatcgaggacgttcgggttcggggagtttacgaggaggttaggatcgcggggtaaggaattcgcgggtagttattttcgttaggggtagggttcggttagttaggcgcgagaaggttaggcgaggtcgattgcgcggggtgaagacgttaggtcgatagttgcgggttttatcgttagttttgacgcgagtttgcgttttggcgacggcggagggcgggtagggggcgcgggcgttgttacggcgtttgtttagaatcggtcgggaacgtcgcgggcgggttttttcggtttttcgtttttttagttttgtttttaggttttcgttcgggttttttaagttgttagtcgcgttcgttttcgggtttttcgttttttttttcgcgcgtttttttttttagcggtcgtcggatttttttagtttattttttttagttaacgcgtttttcggacgttgttagtttgagcgtataggtattgggcggggtttacgggggagtcgtttaataatcgattaatatgaaatttaagggttgtttttttttagcggggatttttgt

SEQ ID NO: 35646 - DNA, 783 bp, Artificial Sequence
  chemically treated genomic DNA (Homo sapiens) CpG-island No: 35646
acaaaaatccccgctaaaaaaaaacaacccttaaatttcatattaatcgattattaaacgactcccccgtaaaccccgcccaatacctatacgctcaaactaacaacgtccgaaaaacgcgttaactaaaaaaaataaactaaaaaaatccgacgaccgctaaaaaaaaaaacgcgcgaaaaaaaaaacgaaaaacccgaaaacgaacgcgactaacaacttaaaaaacccgaacgaaaacctaaaaacaaaactaaaaaaacgaaaaaccgaaaaaacccgcccgcgacgttcccgaccgattctaaacaaacgccgtaacaacgcccgcgccccctacccgccctccgccgtcgccaaaacgcaaactcgcgtcaaaactaacgataaaacccgcaactatcgacctaacgtcttcaccccgcgcaatcgacctcgcctaaccttctcgcgcctaactaaccgaaccctacccctaacgaaaataactacccgcgaattccttaccccgcgatcctaacctcctcgtaaactccccgaacccgaacgtcctcgatctcccctcatctactcttctatcgaacaaatccgcgaccttccgcctcccgaaccgtctcccgccgcacccgaccctaatacatccccactacccaatccgaacccgtcctcgctctaaacctaccccaacctcccaacgtcgcctactaacgaaacgcgaaaaccccaaaaaaccgaaatcacccgaccgacgtaaataatacccaaactcgaaccacacctcga

SEQ ID NO: 35647 - DNA, 783 bp, Artificial Sequence
  chemically treated genomic DNA (Homo sapiens) CpG-island No: 35647
gtaggggttttcgttaggaaggggtagtttttgagttttatgttggtcggttattaagcggttttttcgtgagtttcgtttaatgtttgtgcgtttaaattagtagcgttcgaggaacgcgttaattgggagaagtgaattgagggggttcggcggtcgttgaggaggggagcgcgcgggaggaggggcgaggagttcggaggcgggcgcggttggtagtttagagggttcgggcggaggtttgagagtagggttggaggggcggaggatcggggagattcgttcgcggcgttttcggtcggttttgagtaggcgtcgtggtagcgttcgcgttttttgttcgtttttcgtcgtcgttaggacgtaggttcgcgttagggttggcggtagggttcgtagttgtcggtttggcgtttttatttcgcgtagtcggtttcgtttagttttttcgcgtttgattggtcggattttgtttttggcggaggtaattgttcgcggattttttatttcgcgattttggttttttcgtaagtttttcggattcgggcgttttcggtttttttttatttatttttttgtcgggtaggttcgcgatttttcgtttttcgggtcgtttttcgtcgtattcggttttggtatatttttattatttagttcgggttcgttttcgttttgggtttattttagttttttagcgtcgtttgttgacggagcgcgggagttttaaggggtcggggttattcggtcggcgtgggtggtgtttaggttcgggttatatttcgg

SEQ ID NO: 35648 - DNA, 783 bp, Artificial Sequence
  chemically treated genomic DNA (Homo sapiens) CpG-island No: 35648
ccgaaatataacccgaacctaaacaccacccacgccgaccgaataaccccgaccccttaaaactcccgcgctccgtcaacaaacgacgctaaaaaactaaaataaacccaaaacgaaaacgaacccgaactaaataataaaaatataccaaaaccgaatacgacgaaaaacgacccgaaaaacgaaaaatcgcgaacctacccgacaaaaaaataaataaaaaaaaaccgaaaacgcccgaatccgaaaaacttacgaaaaaaccaaaatcgcgaaataaaaaatccgcgaacaattacctccgccaaaaacaaaatccgaccaatcaaacgcgaaaaaactaaacgaaaccgactacgcgaaataaaaacgccaaaccgacaactacgaaccctaccgccaaccctaacgcgaacctacgtcctaacgacgacgaaaaacgaacaaaaaacgcgaacgctaccacgacgcctactcaaaaccgaccgaaaacgccgcgaacgaatctccccgatcctccgcccctccaaccctactctcaaacctccgcccgaaccctctaaactaccaaccgcgcccgcctccgaactcctcgcccctcctcccgcgcgctcccctcctcaacgaccgccgaaccccctcaattcacttctcccaattaacgcgttcctcgaacgctactaatttaaacgcacaaacattaaacgaaactcacgaaaaaaccgcttaataaccgaccaacataaaactcaaaaactaccccttcctaacgaaaacccctac

SEQ ID NO: 35649 - DNA, 612 bp, Artificial Sequence
  chemically treated genomic DNA (Homo sapiens) CpG-island No: 35649
tagtgtcgtttgcgttagtgtcggaatgttttttttgcgtatattaatattacgtaaatgtggcggaatatcgatattacggttgagagtaaatatcgttttaatagcggtattacgcgttttttttaggtttatattttttatttttacgtttataacgcgcgcgatatcgcggtattttttatcggtaaagttagcgttataacgtatgatatgcggtaataggatggcgttcgtaatatcgtgtggagtgttataaaacgcgtttagtggatgcgttatattatgtattaattttaatttaatattcgagaagtttatattcgtaatatattgttcgagcgttatttttttttcggtatttttattattagtaatcgattttttagcgttttagtaatgattttaatcgttttaatgtgtagtgtatcggttagcgtttacgcgttacgggtaatatattttttaatagtatggagtagcgtatcgatattcgtcgtagtttttagcgttggaggtatattatttattatgttagcgttaataaacgttatttgcgggatattatgcggattaacgtaaataaatttgcgtcgttttttttcgttagtg

SEQ ID NO: 35650 - DNA, 612 bp, Artificial Sequence
  chemically treated genomic DNA (Homo sapiens) CpG-island No: 35650
cactaacgaaaaaaaacgacgcaaatttatttacgttaatccgcataatatcccgcaaataacgtttattaacgctaacataataaataatatacctccaacgctaaaaactacgacgaatatcgatacgctactccatactattaaaaaatatattacccgtaacgcgtaaacgctaaccgatacactacacattaaaacgattaaaatcattactaaaacgctaaaaaatcgattactaataataaaaataccgaaaaaaaaataacgctcgaacaatatattacgaatataaacttctcgaatattaaattaaaattaatacataatataacgcatccactaaacgcgttttataacactccacacgatattacgaacgccatcctattaccgcatatcatacgttataacgctaactttaccgataaaaaataccgcgatatcgcgcgcgttataaacgtaaaaataaaaaatataaacctaaaaaaaacgcgtaataccgctattaaaacgatatttactctcaaccgtaatatcgatattccgccacatttacgtaatattaatatacgcaaaaaaaacattccgacactaacgcaaacgacacta

SEQ ID NO: 35651 - DNA, 612 bp, Artificial Sequence
  chemically treated genomic DNA (Homo sapiens) CpG-island No: 35651
tattgacgaagagaaacggcgtaagtttgtttgcgttgattcgtatgatatttcgtaggtggcgtttattgacgttgatatgatggatggtatgtttttagcgttgaaagttgcgacgggtgtcgatgcgttattttatgttattgaggggtatattattcgtggcgcgtgggcgttaatcgatgtattgtatattaaagcgattgaaattattgttggggcgttggaggatcggttgttggtgataaggatgtcggagaagaaatggcgttcgggtagtatgttgcgggtatgggtttttcgaatgttgggttagggttggtgtatggtatggcgtatttattgggcgcgttttataatattttatacggtgttgcgaacgttattttgttatcgtatgttatgcgttataacgttgattttatcggtgagaagtatcgcgatatcgcgcgcgttatgggcgtgaaagtggaaggtatgagtttggaagaggcgcgtaatgtcgttgttgaagcggtgtttgtttttaatcgtgatgtcggtatttcgttatatttgcgtgatgttggtgtacgtaaggaagatatttcggtattggcgtaggcggtattg

SEQ ID NO: 35652 - DNA, 612 bp, Artificial Sequence
  chemically treated genomic DNA (Homo sapiens) CpG-island No: 35652
caataccgcctacgccaataccgaaatatcttccttacgtacaccaacatcacgcaaatataacgaaataccgacatcacgattaaaaacaaacaccgcttcaacaacgacattacgcgcctcttccaaactcataccttccactttcacgcccataacgcgcgcgatatcgcgatacttctcaccgataaaatcaacgttataacgcataacatacgataacaaaataacgttcgcaacaccgtataaaatattataaaacgcgcccaataaatacgccataccatacaccaaccctaacccaacattcgaaaaacccatacccgcaacatactacccgaacgccatttcttctccgacatccttatcaccaacaaccgatcctccaacgccccaacaataatttcaatcgctttaatatacaatacatcgattaacgcccacgcgccacgaataatatacccctcaataacataaaataacgcatcgacacccgtcgcaactttcaacgctaaaaacataccatccatcatatcaacgtcaataaacgccacctacgaaatatcatacgaatcaacgcaaacaaacttacgccgtttctcttcgtcaata

SEQ ID NO: 35653 - DNA, 885 bp, Artificial Sequence
  chemically treated genomic DNA (Homo sapiens) CpG-island No: 35653
ggcgtagcgatttcgagtttttttatattgggagtttcggggtagtattttcggggtttatgttatcgcggggacggtgcggaaaaaaaggttttatttttaattttttcggaggaaatcgtttcgttttgcggtttgtttaatattgttcgtataacgggttttagggttggagagaattagggatacgagtttttttttgcgcgtataaagtagttgcgtcggggcgcgcggttttttttttcgttattcgttaatttggaagaatttttttgggagtttgtttatttttttggttttatagttattcgtttcggacggagcgttaggcgttttaatagtcgtggcggttgtaatcgtatttttcgggtttggttttcgttttgatcgtttggtttttttcgtttcggttttatcgtgtagtttggttcgcgtttttgtcgtgttagtgcgcggtacgcgttttagagtacgaggttttttttcggggggttgtttcgcgcggggtttcgggtttcggataaggtttagtcggttcgggtgttggttcgtcgtcgttcgcggttttcgcgtcggtttttgttgtcgcgcgcgaaaagggaggggttggggggaaattttcggtaattttaatttcgggcgttggagttttagttgtagtcgcgcgttcgttcgtcgtcgagtgcgagcgtttgcgaagtaaatttgttcgcgcggtcgtttttgagtatgtttagtgtcgtcgtgggcgagttcgagcgttttggttcggggtaaagagtagcggttaggggttgggggttgggggtcgggattcgcgattcgttttaggtttcggagcgcggaggtggtagaggaagggaaaggttaatgtaggggcggggg

SEQ ID NO: 35654 - DNA, 885 bp, Artificial Sequence
  chemically treated genomic DNA (Homo sapiens) CpG-island No: 35654
cccccgcccctacattaacctttcccttcctctaccacctccgcgctccgaaacctaaaacgaatcgcgaatcccgacccccaacccccaacccctaaccgctactctttaccccgaaccaaaacgctcgaactcgcccacgacgacactaaacatactcaaaaacgaccgcgcgaacaaatttacttcgcaaacgctcgcactcgacgacgaacgaacgcgcgactacaactaaaactccaacgcccgaaattaaaattaccgaaaatttccccccaacccctcccttttcgcgcgcgacaacaaaaaccgacgcgaaaaccgcgaacgacgacgaaccaacacccgaaccgactaaaccttatccgaaacccgaaaccccgcgcgaaacaaccccccgaaaaaaaacctcgtactctaaaacgcgtaccgcgcactaacacgacaaaaacgcgaaccaaactacacgataaaaccgaaacgaaaaaaaccaaacgatcaaaacgaaaaccaaacccgaaaaatacgattacaaccgccacgactattaaaacgcctaacgctccgtccgaaacgaataactataaaaccaaaaaaataaacaaactcccaaaaaaattcttccaaattaacgaataacgaaaaaaaaaaccgcgcgccccgacgcaactactttatacgcgcaaaaaaaaactcgtatccctaattctctccaaccctaaaacccgttatacgaacaatattaaacaaaccgcaaaacgaaacgatttcctccgaaaaaattaaaaataaaacctttttttccgcaccgtccccgcgataacataaaccccgaaaatactaccccgaaactcccaatataaaaaaactcgaaatcgctacgcc

SEQ ID NO: 35655 - DNA, 885 bp, Artificial Sequence
  chemically treated genomic DNA (Homo sapiens) CpG-island No: 35655
ttttcgtttttatattggtttttttttttttttgttattttcgcgtttcgaggtttggggcgggtcgcgggtttcggtttttagtttttagtttttagtcgttgttttttgtttcgggttagggcgttcgggttcgtttacggcggtattgagtatgtttagaggcggtcgcgcgggtaggtttgtttcgtaggcgttcgtattcggcggcgggcgggcgcgcggttgtagttggagttttagcgttcggagttggagttgtcgggagtttttttttaattttttttttttcgcgcgcggtagtaggagtcggcgcgggagtcgcgagcggcggcgagttagtattcgggtcggttaagttttgttcggagttcggagtttcgcgcggggtagtttttcggggaggagtttcgtgttttgggacgcgtgtcgcgtattggtacggtaggggcgcgagttaggttgtacggtaggatcggggcgaggggagttaggcggttagggcggaggttaagttcgggagatgcggttgtagtcgttacggttgttggggcgtttggcgtttcgttcgaggcgggtggttgtgaggttaggggagtaggtaggtttttagagagatttttttaagttggcgggtggcgggagagggggtcgcgcgtttcggcgtagttgttttgtgcgcgtagagagggattcgtgtttttggttttttttaattttgggattcgttgtgcgggtagtattgggtaagtcgtagaacggagcgatttttttcgagaaagttgaggatggagttttttttttcgtatcgttttcgcgatggtatgggtttcgagaatgttgtttcgaggtttttagtgtgggggagttcggggtcgttgcgtt

SEQ ID NO: 35656 - DNA, 885 bp, Artificial Sequence
  chemically treated genomic DNA (Homo sapiens) CpG-island No: 35656
aacgcaacgaccccgaactcccccacactaaaaacctcgaaacaacattctcgaaacccataccatcgcgaaaacgatacgaaaaaaaaaactccatcctcaactttctcgaaaaaaatcgctccgttctacgacttacccaatactacccgcacaacgaatcccaaaattaaaaaaaaccaaaaacacgaatccctctctacgcgcacaaaacaactacgccgaaacgcgcgaccccctctcccgccacccgccaacttaaaaaaatctctctaaaaacctacctactcccctaacctcacaaccacccgcctcgaacgaaacgccaaacgccccaacaaccgtaacgactacaaccgcatctcccgaacttaacctccgccctaaccgcctaactcccctcgccccgatcctaccgtacaacctaactcgcgcccctaccgtaccaatacgcgacacgcgtcccaaaacacgaaactcctccccgaaaaactaccccgcgcgaaactccgaactccgaacaaaacttaaccgacccgaatactaactcgccgccgctcgcgactcccgcgccgactcctactaccgcgcgcgaaaaaaaaaaaattaaaaaaaaactcccgacaactccaactccgaacgctaaaactccaactacaaccgcgcgcccgcccgccgccgaatacgaacgcctacgaaacaaacctacccgcgcgaccgcctctaaacatactcaataccgccgtaaacgaacccgaacgccctaacccgaaacaaaaaacaacgactaaaaactaaaaactaaaaaccgaaacccgcgacccgccccaaacctcgaaacgcgaaaataacaaaaaaaaaaaaaaaccaatataaaaacgaaaa

SEQ ID NO: 35657 - DNA, 763 bp, Artificial Sequence
  chemically treated genomic DNA (Homo sapiens) CpG-island No: 35657
cgtcgcggtttttttttttttatttcgttttagttttttgttcgttacggttttttgttttttgttttcgcggttttttgttttttgttttcgcggttttttgttttcgcggttttttgttcgattcggttttttgatttttcgtcgtcgttgttttttgtattttcgtcgtcgttgttttttgtattttcgtcgtcgtggttttttgttcgtcgcggtttttttcgtttatcgtcgcggttttttgtcgtcgcggttttttgttaatcgaggttttttattttacgtcgtcgcggtttttttttcgattcggttttttgttttttcgtcgtcgcgatttttttattttcgtcgtcgtggttttttgtcgtttcggtgtcgcggttatttgttcgtcgcggttttttgtattttcgtcgtcgcggttttttgttttttgttgtcggttttttgttcgaatcggttttttgtttttttttttttttatcgttacggtttttttattttcgtcgtcgcggttttttgttttttcggtgtcgcggttatttgttttttttcggtgtcgcggttatttgttcgtcgcggttttttgtattttcgtcgtcgcggttttttgtttttttgtcgtcgcggttttttgttttcgtagttttttgtattttcgtcgttttcgtggttttttgttgtttcggtttttttttttttttttttcggtttgttgtcggttgcggttttttgttttttttttttcgttattgtggtt

SEQ ID NO: 35658 - DNA, 763 bp, Artificial Sequence
  chemically treated genomic DNA (Homo sapiens) CpG-island No: 35658
aaccacaataacgaaaaaaaaaaaacaaaaaaccgcaaccgacaacaaaccgaaaaaaaaaaaaaaaaaaaccgaaacaacaaaaaaccacgaaaacgacgaaaatacaaaaaactacgaaaacaaaaaaccgcgacgacaaaaaaacaaaaaaccgcgacgacgaaaatacaaaaaaccgcgacgaacaaataaccgcgacaccgaaaaaaaacaaataaccgcgacaccgaaaaaacaaaaaaccgcgacgacgaaaataaaaaaaccgtaacgataaaaaaaaaaaaaaacaaaaaaccgattcgaacaaaaaaccgacaacaaaaaacaaaaaaccgcgacgacgaaaatacaaaaaaccgcgacgaacaaataaccgcgacaccgaaacgacaaaaaaccacgacgacgaaaataaaaaaatcgcgacgacgaaaaaacaaaaaaccgaatcgaaaaaaaaaccgcgacgacgtaaaataaaaaacctcgattaacaaaaaaccgcgacgacaaaaaaccgcgacgataaacgaaaaaaaccgcgacgaacaaaaaaccacgacgacgaaaatacaaaaaacaacgacgacgaaaatacaaaaaacaacgacgacgaaaaatcaaaaaaccgaatcgaacaaaaaaccgcgaaaacaaaaaaccgcgaaaacaaaaaacaaaaaaccgcgaaaacaaaaaacaaaaaaccgtaacgaacaaaaaactaaaacgaaataaaaaaaaaaaaaccgcgacg

SEQ ID NO: 35659 - DNA, 763 bp, Artificial Sequence
  chemically treated genomic DNA (Homo sapiens) CpG-island No: 35659
agttatagtggcgggggggggggggtaaaaagtcgtagtcggtaataagtcggggggggggggggaaaaagtcggggtaataaaaaattacgggggcggcggggatgtaaaaagttgcggaggtaaaaagtcgcggcggtaggggggtaaaaagtcgcggcgacggggatgtaaaaagtcgcgacgggtaaataatcgcggtatcgggggggggtaaataatcgcggtatcgggagggtaaaaagtcgcggcggcgggggtgaaaaagtcgtggcggtgggggggggggggggtaaaaagtcggttcgagtaaaaagtcggtagtagggggtaaaaagtcgcggcgacgggggtgtaaaaagtcgcgacgggtaaataatcgcggtatcggggcggtaaaaagttacggcggcgggggtgaaaaagtcgcggcggcgggggagtaaaaagtcgggtcggggaaaaagtcgcggcggcgtaggataaaaagtttcggttggtaaaaagtcgcggcgataaaaagtcgcggcggtgggcggaaagagtcgcggcgggtaaaaagttacggcggcggggatgtaaaaagtagcggcggcggggatgtaaaaagtagcggcggcggggggttaaaaagtcgggtcgggtaaaaagtcgcggaggtaaaaagtcgcggaggtagggggtaaaaagtcgcggaggtagggggtaaaaagtcgtggcgggtaaaaagttgaggcggggtgggggggaaaaagtcgcggcg

SEQ ID NO: 35660 - DNA, 763 bp, Artificial Sequence
  chemically treated genomic DNA (Homo sapiens) CpG-island No: 35660
cgccgcgactttttcccccccaccccgcctcaactttttacccgccacgactttttaccccctacctccgcgactttttaccccctacctccgcgactttttacctccgcgactttttacccgacccgactttttaaccccccgccgccgctactttttacatccccgccgccgctactttttacatccccgccgccgtaactttttacccgccgcgactctttccgcccaccgccgcgactttttatcgccgcgactttttaccaaccgaaactttttatcctacgccgccgcgactttttccccgacccgactttttactcccccgccgccgcgactttttcacccccgccgccgtaactttttaccgccccgataccgcgattatttacccgtcgcgactttttacacccccgtcgccgcgactttttaccccctactaccgactttttactcgaaccgactttttacccccccccccccccaccgccacgactttttcacccccgccgccgcgactttttaccctcccgataccgcgattatttacccccccccgataccgcgattatttacccgtcgcgactttttacatccccgtcgccgcgactttttacccccctaccgccgcgactttttacctccgcaactttttacatccccgccgcccccgtaattttttattaccccgactttttccccccccccccccgacttattaccgactacgactttttacccccccccccccgccactataact

SEQ ID NO: 35661 - DNA, 582 bp, Artificial Sequence
  chemically treated genomic DNA (Homo sapiens) CpG-island No: 35661
tggtttttgcgtttcgtatttcgtttttttgttggtttttcggttttttcgttggttgtcgtggatttttggtatttgggtattcgttgtatttgtttcgtgtagtatgtggttgttggtttgtgttatgttttatcggtttgttttcgtgtttttgttacgcgtcgtttgtcgtttcgttggtttttgtttttgtcgtaattttggtgttttttcgtgtcgttgtcgttggttttgtgtttttttgttttgggttttttttttttttttattatttgtttttaggtgtttgttgttcgttttttttcgttttgtttgttcgtcgtttgttttttttcgttcgaggtgtttttttttcgttttcgtggtcgtttgcgttttagtggtgttttgttttttatcgttgttgtttgtttttttgttcgttttttttttttttttttgtttcgtttttcgtgttagtgtttttttttcggtttgttttttcgttttagcggttttttttggttttttttttttgtttgtggtcgtggtttttcgtttttttttttttcgtttttcgttcggttttttgttttcgtt

SEQ ID NO: 35662 - DNA, 582 bp, Artificial Sequence
  chemically treated genomic DNA (Homo sapiens) CpG-island No: 35662
aacgaaaacaaaaaaccgaacgaaaaacgaaaaaaaaaaaaacgaaaaaccacgaccacaaacaaaaaaaaaaaaccaaaaaaaaccgctaaaacgaaaaaacaaaccgaaaaaaaaacactaacacgaaaaacgaaacaaaaaaaaaaaaaaaaaacgaacaaaaaaacaaacaacaacgataaaaaacaaaacaccactaaaacgcaaacgaccacgaaaacgaaaaaaaaacacctcgaacgaaaaaaaacaaacgacgaacaaacaaaacgaaaaaaaacgaacaacaaacacctaaaaacaaataataaaaaaaaaaaaaaaacccaaaacaaaaaaacacaaaaccaacgacaacgacacgaaaaaacaccaaaattacgacaaaaacaaaaaccaacgaaacgacaaacgacgcgtaacaaaaacacgaaaacaaaccgataaaacataacacaaaccaacaaccacatactacacgaaacaaatacaacgaatacccaaataccaaaaatccacgacaaccaacgaaaaaaccgaaaaaccaacaaaaaaacgaaatacgaaacgcaaaaacca

SEQ ID NO: 35663 - DNA, 582 bp, Artificial Sequence
  chemically treated genomic DNA (Homo sapiens) CpG-island No: 35663
aacgaagatagaaggtcgaacgaagggcgagaagagaagaaacgagaaattacgattatagataaaaaaaagaaattagagagagtcgttgagacggggaggtagatcgagagaggagtattgatacgaaagacgggatagaaaaggggaaagagaacgaataagagagtaggtagtagcgatgaagaatagagtattattaaaacgtagacgattacggaagcgaaagagagatatttcggacgaaaaagggtaagcggcgaataggtagagcgaggaagaacgagtagtagatatttgagagtaggtagtggaagaaagaggaaaatttaagataaaagaatatagaattagcgataacggtacgaaaggatattaggattacggtagaggtagaggttaacgggacgataggcggcgcgtgataagagtacgagagtaagtcgatggagtatagtatagattagtagttatatattatacgagataagtgtagcgagtgtttaagtattaagagtttacgataattagcgagaagatcgggagattagtaggagaacggagtacggagcgtaagggtta

SEQ ID NO: 35664 - DNA, 582 bp, Artificial Sequence
  chemically treated genomic DNA (Homo sapiens) CpG-island No: 35664
taacccttacgctccgtactccgttctcctactaatctcccgatcttctcgctaattatcgtaaactcttaatacttaaacactcgctacacttatctcgtataatatataactactaatctatactatactccatcgacttactctcgtactcttatcacgcgccgcctatcgtcccgttaacctctacctctaccgtaatcctaatatcctttcgtaccgttatcgctaattctatattcttttatcttaaattttcctctttcttccactacctactctcaaatatctactactcgttcttcctcgctctacctattcgccgcttaccctttttcgtccgaaatatctctctttcgcttccgtaatcgtctacgttttaataatactctattcttcatcgctactacctactctcttattcgttctctttccccttttctatcccgtctttcgtatcaatactcctctctcgatctacctccccgtctcaacgactctctctaatttcttttttttatctataatcgtaatttctcgtttcttctcttctcgcccttcgttcgaccttctatcttcgtt

SEQ ID NO: 35665 - DNA, 580 bp, Artificial Sequence
  chemically treated genomic DNA (Homo sapiens) CpG-island No: 35665
  unsure (72)
gcggtttcggtacggcgcggttgtgttttgttttgtttttaattttttatgggttcgcgggtttcggtcgtnttcgttttttttcgtcgtatttcgtttttagttttcgtttttcgatttcgttgtagaaatatttttttttcggagaagtcgcgcgtacggcgttgtaggtttttttcggcgtttcggtcggtcggggtttgggtcgttattcgttcggttcgcggttttcggttgttttttaggttcgtcgttcgtcgttcggggtttaggttcgttcgttcggggtttaggtcgtcgtcgtcgtcgtttttaggggatttaggggaattcgtagggtttcgcgtggcgtcggggggcgagcggttcgtaacgcggggaagaggtcgggggcggacgatagttttcgtttatttcgatacgtatttcgtcgtttttaatttaatttttttggggtttcggcgttattcgcgttcggtagtcggcggagttcgttatttattaattcgtttgggataacgtcgcgtcggttatttgggttatggtagttgtttaggtcgggggtggtggggggttgggg

SEQ ID NO: 35666 - DNA, 580 bp, Artificial Sequence
  chemically treated genomic DNA (Homo sapiens) CpG-island No: 35666
  unsure (509)
ccccaaccccccaccacccccgacctaaacaactaccataacccaaataaccgacgcgacgttatcccaaacgaattaataaataacgaactccgccgactaccgaacgcgaataacgccgaaaccccaaaaaaattaaattaaaaacgacgaaatacgtatcgaaataaacgaaaactatcgtccgcccccgacctcttccccgcgttacgaaccgctcgccccccgacgccacgcgaaaccctacgaattcccctaaatcccctaaaaacgacgacgacgacgacctaaaccccgaacgaacgaacctaaaccccgaacgacgaacgacgaacctaaaaaacaaccgaaaaccgcgaaccgaacgaataacgacccaaaccccgaccgaccgaaacgccgaaaaaaacctacaacgccgtacgcgcgacttctccgaaaaaaaaatatttctacaacgaaatcgaaaaacgaaaactaaaaacgaaatacgacgaaaaaaaacgaanacgaccgaaacccgcgaacccataaaaaattaaaaacaaaacaaaacacaaccgcgccgtaccgaaaccgc

SEQ ID NO: 35667 - DNA, 580 bp, Artificial Sequence
  chemically treated genomic DNA (Homo sapiens) CpG-island No: 35667
  unsure (509)
ttttagttttttattattttcggtttaagtagttattatggtttaggtggtcggcgcggcgttgttttaggcgggttggtaagtggcgagtttcgtcggttgtcgggcgcgggtggcgtcggggttttagggaggttgggttgggggcggcggggtgcgtgtcggggtaggcggaggttgtcgttcgttttcggtttttttttcgcgttacgggtcgttcgtttttcggcgttacgcggagttttgcgagtttttttaggttttttggaggcggcggcggcggcggtttgggtttcgggcgagcgggtttgggtttcgggcggcgggcggcgggtttggggagtagtcgggggtcgcgagtcgggcgggtggcggtttagatttcggtcgatcggagcgtcggggaggatttgtagcgtcgtacgcgcggttttttcggggagggggtgtttttgtagcgggatcgggaggcgagggttgggaacgaagtgcggcggagagggacgaanacggtcggagttcgcgggtttataggaagttgagggtagagtagagtatagtcgcgtcgtgtcggagtcgt

SEQ ID NO: 35668 - DNA, 580 bp, Artificial Sequence
  chemically treated genomic DNA (Homo sapiens) CpG-island No: 35668
  unsure (72)
acgactccgacacgacgcgactatactctactctaccctcaacttcctataaacccgcgaactccgaccgtnttcgtccctctccgccgcacttcgttcccaaccctcgcctcccgatcccgctacaaaaacaccccctccccgaaaaaaccgcgcgtacgacgctacaaatcctccccgacgctccgatcgaccgaaatctaaaccgccacccgcccgactcgcgacccccgactactccccaaacccgccgcccgccgcccgaaacccaaacccgctcgcccgaaacccaaaccgccgccgccgccgcctccaaaaaacctaaaaaaactcgcaaaactccgcgtaacgccgaaaaacgaacgacccgtaacgcgaaaaaaaaaccgaaaacgaacgacaacctccgcctaccccgacacgcaccccgccgcccccaacccaacctccctaaaaccccgacgccacccgcgcccgacaaccgacgaaactcgccacttaccaacccgcctaaaacaacgccgcgccgaccacctaaaccataataactacttaaaccgaaaataataaaaaactaaaa

SEQ ID NO: 35669 - DNA, 546 bp, Artificial Sequence
  chemically treated genomic DNA (Homo sapiens) CpG-island No: 35669
tgttcgacgggaatttttggggagcggatatttgtagtaacgttaggtagtaggcgtttagggatagtatcgcgtcgggtttcgcgttcgagttcgagttcgtcgagttgtcgttattttcggatttttcgtcgttttcgacggcgtcggtttttagttcgtcggtcgcgcgttttttgtttcgtcgtttttttagatttatttttatcgagcgagggcgtattttcgtttcgttcgtcgaggtagtcgtcgtcgtcgagtcgtcgtcgtcgttcgtagggggcgttcgggtgttgttttcgttggtcgcgtttcgtcgttgtcggcggttgtcgcgatcgtagtcgtcgtcgtcgcgtttttgttaggcggatttggagcggaagttgaagtcgaagttttcggttagggggtcgttatcgtttagcggaggatcgtcgtcgtcgtcgttgcgttagcggttggttaggcgttgttgttgttgcggggttatcgttttttcgggttttttggtggagtcgcgggtagagttttcgggggtatggg

SEQ ID NO: 35670 - DNA, 546 bp, Artificial Sequence
  chemically treated genomic DNA (Homo sapiens) CpG-island No: 35670
cccatacccccgaaaactctacccgcgactccaccaaaaaacccgaaaaaacgataaccccgcaacaacaacaacgcctaaccaaccgctaacgcaacgacgacgacgacgatcctccgctaaacgataacgaccccctaaccgaaaacttcgacttcaacttccgctccaaatccgcctaacaaaaacgcgacgacgacgactacgatcgcgacaaccgccgacaacgacgaaacgcgaccaacgaaaacaacacccgaacgccccctacgaacgacgacgacgactcgacgacgacgactacctcgacgaacgaaacgaaaatacgccctcgctcgataaaaataaatctaaaaaaacgacgaaacaaaaaacgcgcgaccgacgaactaaaaaccgacgccgtcgaaaacgacgaaaaatccgaaaataacgacaactcgacgaactcgaactcgaacgcgaaacccgacgcgatactatccctaaacgcctactacctaacgttactacaaatatccgctccccaaaaattcccgtcgaaca

SEQ ID NO: 35671 - DNA, 546 bp, Artificial Sequence
  chemically treated genomic DNA (Homo sapiens) CpG-island No: 35671
tttatgttttcgggggttttgttcgcggttttattaagaaattcgggggggcggtgatttcgtagtagtagtagcgtttggttagtcgttggcgtagcgacgacgacgacgatttttcgttgagcggtgacgattttttggtcgggggtttcggttttagttttcgttttaagttcgtttggtaggagcgcggcggcgacgattgcggtcgcggtagtcgtcggtagcggcggggcgcggttagcgggggtagtattcgggcgttttttgcgggcggcggcggcggttcggcggcggcggttgtttcggcgggcgggacggaggtgcgttttcgttcggtggaggtgggtttggaggagcggcggggtaaggggcgcgcggtcgacgagttggaggtcggcgtcgtcgagggcggcgaggggttcggggatggcggtagttcggcggattcgggttcgggcgcggggttcggcgcggtgttgtttttgggcgtttgttgtttggcgttgttgtagatattcgttttttagaagttttcgtcggata

SEQ ID NO: 35672 - DNA, 546 bp, Artificial Sequence
  chemically treated genomic DNA (Homo sapiens) CpG-island No: 35672
tatccgacgaaaacttctaaaaaacgaatatctacaacaacgccaaacaacaaacgcccaaaaacaacaccgcgccgaaccccgcgcccgaacccgaatccgccgaactaccgccatccccgaacccctcgccgccctcgacgacgccgacctccaactcgtcgaccgcgcgccccttaccccgccgctcctccaaacccacctccaccgaacgaaaacgcacctccgtcccgcccgccgaaacaaccgccgccgccgaaccgccgccgccgcccgcaaaaaacgcccgaatactacccccgctaaccgcgccccgccgctaccgacgactaccgcgaccgcaatcgtcgccgccgcgctcctaccaaacgaacttaaaacgaaaactaaaaccgaaacccccgaccaaaaaatcgtcaccgctcaacgaaaaatcgtcgtcgtcgtcgctacgccaacgactaaccaaacgctactactactacgaaatcaccgcccccccgaatttcttaataaaaccgcgaacaaaacccccgaaaacataaa

SEQ ID NO: 35673 - DNA, 724 bp, Artificial Sequence
  chemically treated genomic DNA (Homo sapiens) CpG-island No: 35673
gcgttacggcggttaggtgggtcgcgaagtgttggtggtagttttcggcgtaggtcgttacgacgtcgaattcggcggggaatagcggttttagtcgttttattacggtttttaggtttttttttatggtgcggtttaagtgtagaaagacgttttcggggatttcggcgttcgcggtcggtcgttggtttatgcgtttttcggtcgttttcgttacgtcgcgtcgttatagttgtagttagcgtcgcgggcgcgtggtcgttagtttcgaggttttcggtttcgtcgtcgtcgtttggcggttttcgcgtttttgtttcgttattacggttagcgtttggcgtagtcgttcgggcggcgtttttagcggtcgtcgtagtacgtttagtatttggtcgcgtagtagttcgtatagcgtttttattttgttttggcgtcgtattagttttttttcgtttatatcgttcgtcgtcgtcgtcgtcgttagttttcgttttagcgttagtagcggtcgcgtcgtttttagttgttcgcgttttagcgtcgtttttagtttttttattgcgtcgggaaagtcgcgttagtttcggttttagtttatcgtttatcgggcggggcggttagcgttaagcggggatcgtttttttttagacgcgtatagggtcggcggttaatattttaaagggtgatgtcggtgtttttgattaggttgaaggttttttag

SEQ ID NO: 35674 - DNA, 724 bp, Artificial Sequence
  chemically treated genomic DNA (Homo sapiens) CpG-island No: 35674
ctaaaaaaccttcaacctaatcaaaaacaccgacatcaccctttaaaatattaaccgccgaccctatacgcgtctaaaaaaaaacgatccccgcttaacgctaaccgccccgcccgataaacgataaactaaaaccgaaactaacgcgactttcccgacgcaataaaaaaactaaaaacgacgctaaaacgcgaacaactaaaaacgacgcgaccgctactaacgctaaaacgaaaactaacgacgacgacgacgacgaacgatataaacgaaaaaaaactaatacgacgccaaaacaaaataaaaacgctatacgaactactacgcgaccaaatactaaacgtactacgacgaccgctaaaaacgccgcccgaacgactacgccaaacgctaaccgtaataacgaaacaaaaacgcgaaaaccgccaaacgacgacgacgaaaccgaaaacctcgaaactaacgaccacgcgcccgcgacgctaactacaactataacgacgcgacgtaacgaaaacgaccgaaaaacgcataaaccaacgaccgaccgcgaacgccgaaatccccgaaaacgtctttctacacttaaaccgcaccataaaaaaaaacctaaaaaccgtaataaaacgactaaaaccgctattccccgccgaattcgacgtcgtaacgacctacgccgaaaactaccaccaacacttcgcgacccacctaaccgccgtaacgc

SEQ ID NO: 35675 - DNA, 724 bp, Artificial Sequence
  chemically treated genomic DNA (Homo sapiens) CpG-island No: 35675
ttgggaggtttttagtttagttagggatatcgatattattttttagggtgttggtcgtcggttttgtgcgcgtttaggggaggacggttttcgtttggcgttggtcgtttcgttcggtgggcggtgggttggggtcggggttgacgcggttttttcggcgtagtggaggagttgaaggcggcgttggagcgcgggtagttggaggcggcgcggtcgttgttggcgttggagcgggagttggcggcggcggcggcggcgggcggtgtgagcgaggaggagttggtgcggcgttagagtaaggtggaggcgttgtacgagttgttgcgcgattaggtgttgggcgtgttgcggcggtcgttggaggcgtcgttcgaacggttgcgttaggcgttggtcgtggtggcggagtaggagcgcgaggatcgttaggcggcggcggcggggtcggggatttcggggttggcggttacgcgttcgcggcgttggttgtagttgtggcggcgcggcgtggcggaggcggtcgaggagcgtatgggttagcggtcggtcgcgggcgtcgaggttttcgagagcgtttttttgtatttgggtcgtattatgaaggaggatttggaggtcgtggtggagcggttgaagtcgttgtttttcgtcgagttcggcgtcgtggcggtttacgtcgagagttattattagtatttcgcggtttatttggtcgtcgtggcgt

SEQ ID NO: 35676 - DNA, 724 bp, Artificial Sequence
  chemically treated genomic DNA (Homo sapiens) CpG-island No: 35676
acgccacgacgaccaaataaaccgcgaaatactaataataactctcgacgtaaaccgccacgacgccgaactcgacgaaaaacaacgacttcaaccgctccaccacgacctccaaatcctccttcataatacgacccaaatacaaaaaaacgctctcgaaaacctcgacgcccgcgaccgaccgctaacccatacgctcctcgaccgcctccgccacgccgcgccgccacaactacaaccaacgccgcgaacgcgtaaccgccaaccccgaaatccccgaccccgccgccgccgcctaacgatcctcgcgctcctactccgccaccacgaccaacgcctaacgcaaccgttcgaacgacgcctccaacgaccgccgcaacacgcccaacacctaatcgcgcaacaactcgtacaacgcctccaccttactctaacgccgcaccaactcctcctcgctcacaccgcccgccgccgccgccgccgccaactcccgctccaacgccaacaacgaccgcgccgcctccaactacccgcgctccaacgccgccttcaactcctccactacgccgaaaaaaccgcgtcaaccccgaccccaacccaccgcccaccgaacgaaacgaccaacgccaaacgaaaaccgtcctcccctaaacgcgcacaaaaccgacgaccaacaccctaaaaaataatatcgatatccctaactaaactaaaaacctcccaa

SEQ ID NO: 35677 - DNA, 777 bp, Artificial Sequence
  chemically treated genomic DNA (Homo sapiens) CpG-island No: 35677
cgagatttatttgtcgtagacgttggcggtttagtttagtaggatatagagttgttcgtagtcgcgggcgtcgcgcgcgagtttttggaggcgttgggttacggcgttgtggaaggtacgtagatagattttttacgttgggaagtcggtcgtcgtatacgcgggttgtattttttgtcgtattttttgtaggtcgcggcgaattaagttatttagttcggttagaagttgggttaaattcgacgcgtttttcgttttttcgaaggtttatttcgcgttcggtcgtcgtacgcgtttttgagcgtttcgtcgtatcgtttttttttagtgttggcgttagcggcgcggcgtgcgtaggaagtcgtcgtcgtcggggggagaagggtgggttttttttttcgcgtttattacgcgggttagttcggttagcgcggtcgcgtttatatcgtcgttgtttagcgtttcgcgtacgatggcgtcgatttcggttgttagttcgtcgtaaagtaggtatacgtttatagcgcgtcgcgcgaaggtcgtagggttttgtttaaaggtgcgcgaggttttttcggttattagtagcgtttttaggcgtagaagttgttcgaaggtcgttagtagttgtcgtttagtaatgaggtcggttacggatttgttttttgtataggcgggcgagaagggcggtgagagggatcgttttaagattcgaatttggacgaagatttgtaggttacggtttaatttatcggggttggattgtttgttttttgt

SEQ ID NO: 35678 - DNA, 777 bp, Artificial Sequence
  chemically treated genomic DNA (Homo sapiens) CpG-island No: 35678
acaaaaaacaaacaatccaaccccgataaattaaaccgtaacctacaaatcttcgtccaaattcgaatcttaaaacgatccctctcaccgcccttctcgcccgcctatacaaaaaacaaatccgtaaccgacctcattactaaacgacaactactaacgaccttcgaacaacttctacgcctaaaaacgctactaataaccgaaaaaacctcgcgcacctttaaacaaaaccctacgaccttcgcgcgacgcgctataaacgtatacctactttacgacgaactaacaaccgaaatcgacgccatcgtacgcgaaacgctaaacaacgacgatataaacgcgaccgcgctaaccgaactaacccgcgtaataaacgcgaaaaaaaaaacccacccttctccccccgacgacgacgacttcctacgcacgccgcgccgctaacgccaacactaaaaaaaaacgatacgacgaaacgctcaaaaacgcgtacgacgaccgaacgcgaaataaaccttcgaaaaaacgaaaaacgcgtcgaatttaacccaacttctaaccgaactaaataacttaattcgccgcgacctacaaaaaatacgacaaaaaatacaacccgcgtatacgacgaccgacttcccaacgtaaaaaatctatctacgtaccttccacaacgccgtaacccaacgcctccaaaaactcgcgcgcgacgcccgcgactacgaacaactctatatcctactaaactaaaccgccaacgtctacgacaaataaatctcg

SEQ ID NO: 35679 - DNA, 777 bp, Artificial Sequence
  chemically treated genomic DNA (Homo sapiens) CpG-island No: 35679
gtagaggatagataatttagtttcgatggattgagtcgtggtttgtaggttttcgtttaggttcgggttttggggcggttttttttatcgtttttttcgttcgtttgtgtagaaggtaaattcgtggtcgattttattattgaacggtaattgttggcggttttcgaatagtttttgcgtttggagacgttgttggtggtcgagaaggtttcgcgtatttttgagtaggattttacggttttcgcgcggcgcgttatggacgtgtgtttgttttacgacgggttggtagtcgagatcggcgttatcgtgcgcgagacgttggatagcgacggtgtggacgcggtcgcgttggtcgagttggttcgcgtggtgagcgcggaggaggaagtttattttttttttttcgacgacggcgattttttgcgtacgtcgcgtcgttggcgttagtattgggaggaggcggtgcggcgaagcgtttaggagcgcgtgcggcggtcgggcgcggggtgggttttcggggaggcggagggcgcgtcgggtttggtttagtttttggtcgagttgggtggtttggttcgtcgcgatttgtagaaggtgcggtaggaggtgtagttcgcgtatgcggcggtcggttttttagcgtgggaggtttatttgcgtgttttttatagcgtcgtggtttagcgtttttaggagttcgcgcgcgacgttcgcggttgcgagtagttttatattttgttggattgggtcgttaacgtttacggtaggtgagtttcg

SEQ ID NO: 35680 - DNA, 777 bp, Artificial Sequence
  chemically treated genomic DNA (Homo sapiens) CpG-island No: 35680
cgaaactcacctaccgtaaacgttaacgacccaatccaacaaaatataaaactactcgcaaccgcgaacgtcgcgcgcgaactcctaaaaacgctaaaccacgacgctataaaaaacacgcaaataaacctcccacgctaaaaaaccgaccgccgcatacgcgaactacacctcctaccgcaccttctacaaatcgcgacgaaccaaaccacccaactcgaccaaaaactaaaccaaacccgacgcgccctccgcctccccgaaaacccaccccgcgcccgaccgccgcacgcgctcctaaacgcttcgccgcaccgcctcctcccaatactaacgccaacgacgcgacgtacgcaaaaaatcgccgtcgtcgaaaaaaaaaaaataaacttcctcctccgcgctcaccacgcgaaccaactcgaccaacgcgaccgcgtccacaccgtcgctatccaacgtctcgcgcacgataacgccgatctcgactaccaacccgtcgtaaaacaaacacacgtccataacgcgccgcgcgaaaaccgtaaaatcctactcaaaaatacgcgaaaccttctcgaccaccaacaacgtctccaaacgcaaaaactattcgaaaaccgccaacaattaccgttcaataataaaatcgaccacgaatttaccttctacacaaacgaacgaaaaaaacgataaaaaaaaccgccccaaaacccgaacctaaacgaaaacctacaaaccacgactcaatccatcgaaactaaattatctatcctctac

SEQ ID NO: 35681 - DNA, 627 bp, Artificial Sequence
  chemically treated genomic DNA (Homo sapiens) CpG-island No: 35681
tcgggcgggattagggttttcgtttcgcgtatcgttagcgtgaatatttggtttatttttcgttggattttggtcgtgattttcgggaacgggtagggtttttcgcgggttcgcgttattagtatttggcgttcggagtttcggtcggtttgggtgtttattagtattagtaggacggtttcgggtttttatagttcgcgtaggcgttcgcgtagcgttttacggtcgggaacgaggtttcgttgtatacgtttcggagtatcgtagacgcgtcgtcgtggcggatgtttaggttttggagcgtgattaggtgttcggcgttcgtcgcgtttacgatttttagtagcgcgggcgtcgcgtttgtttcgattttttcgcggatcgttttttcgtttacgtcgcgtattgttcggggagcggtcgtacgcgaattgcgtgtttagcgtggttttgtttacgttacgttttttagtagtatatttcggtagttttggcggggcgcgggattagttcgtagtgttcgggacgcggcggggaggggaggagagggaggaaggggaggggaaggaggaaggggaaggggtttgggagcgtagggaacggcgtattaggattgttcgggtaggg

SEQ ID NO: 35682 - DNA, 627 bp, Artificial Sequence
  chemically treated genomic DNA (Homo sapiens) CpG-island No: 35682
ccctacccgaacaatcctaatacgccgttccctacgctcccaaaccccttccccttcctccttcccctccccttcctccctctcctcccctccccgccgcgtcccgaacactacgaactaatcccgcgccccgccaaaactaccgaaatatactactaaaaaacgtaacgtaaacaaaaccacgctaaacacgcaattcgcgtacgaccgctccccgaacaatacgcgacgtaaacgaaaaaacgatccgcgaaaaaatcgaaacaaacgcgacgcccgcgctactaaaaatcgtaaacgcgacgaacgccgaacacctaatcacgctccaaaacctaaacatccgccacgacgacgcgtctacgatactccgaaacgtatacaacgaaacctcgttcccgaccgtaaaacgctacgcgaacgcctacgcgaactataaaaacccgaaaccgtcctactaatactaataaacacccaaaccgaccgaaactccgaacgccaaatactaataacgcgaacccgcgaaaaaccctacccgttcccgaaaatcacgaccaaaatccaacgaaaaataaaccaaatattcacgctaacgatacgcgaaacgaaaaccctaatcccgcccga

SEQ ID NO: 35683 - DNA, 627 bp, Artificial Sequence
  chemically treated genomic DNA (Homo sapiens) CpG-island No: 35683
ttttgttcggatagttttggtacgtcgttttttgcgtttttaggttttttttttttttttttttttttttttttttttttttttttttttttttcgtcgcgtttcggatattgcgggttggtttcgcgtttcgttagggttgtcggggtgtgttgttggggagcgtgacgtgggtaggattacgttggatacgtagttcgcgtgcggtcgtttttcgagtagtgcgcggcgtgggcggaggagcggttcgcgaggagatcgaggtaaacgcggcgttcgcgttgttggaaatcgtggacgcggcggacgtcgagtatttggttacgttttaggatttggatattcgttacggcgacgcgtttgcggtgtttcggggcgtgtgtagcgaggtttcgttttcggtcgtgaggcgttgcgcgagcgtttgcgcgggttgtgggaattcggggtcgttttgttggtgttggtgggtatttaggtcgatcgggatttcgagcgttaggtgttgatggcgcgggttcgcgaggggttttgttcgttttcgggggttacggttaagatttagcggaggatggattaggtgtttacgttggcggtgcgcgagacggaggttttgatttcgttcga

SEQ ID NO: 35684 - DNA, 627 bp, Artificial Sequence
  chemically treated genomic DNA (Homo sapiens) CpG-island No: 35684
tcgaacgaaatcaaaacctccgtctcgcgcaccgccaacgtaaacacctaatccatcctccgctaaatcttaaccgtaacccccgaaaacgaacaaaacccctcgcgaacccgcgccatcaacacctaacgctcgaaatcccgatcgacctaaatacccaccaacaccaacaaaacgaccccgaattcccacaacccgcgcaaacgctcgcgcaacgcctcacgaccgaaaacgaaacctcgctacacacgccccgaaacaccgcaaacgcgtcgccgtaacgaatatccaaatcctaaaacgtaaccaaatactcgacgtccgccgcgtccacgatttccaacaacgcgaacgccgcgtttacctcgatctcctcgcgaaccgctcctccgcccacgccgcgcactactcgaaaaacgaccgcacgcgaactacgtatccaacgtaatcctacccacgtcacgctccccaacaacacaccccgacaaccctaacgaaacgcgaaaccaacccgcaatatccgaaacgcgacgaaaaaaaaaaaaaaaaaaaaaaaaaaaaaaaaaaaaaaaaaaaaaaaaaacctaaaaacgcaaaaaacgacgtaccaaaactatccgaacaaaa

SEQ ID NO: 35685 - DNA, 1058 bp, Artificial Sequence
  chemically treated genomic DNA (Homo sapiens) CpG-island No: 35685
aggttagcgcggcggcggtcggtttcgtagtggttggttgcgttggtgttggtcgcgttttggttggttgcgggtcgcggggttgggtcgtcgggtcggggttggggtcgggttcgggcgtcggtcgggtttgcgtatcgttaggattttagaagataatagtttgcggcggcggcggcggggagggcgcgtcgcgggcggggttgagggcggcgggggcgggtcgttcgagttgggagggcgcggcgtcgaggggaggagagcggtttatggattcgcggggttcggcgttttagattttgcgtcgtcgggacggagtttaagatgtcggtttaggtcggggcgcgacgacgcggacggggcggcgaggaggcgtcgttgttgtcggggttcgtagtcgtcgagttttcgagggcgcgttttgacggattggtcgagtcggcggtgagaggtcggcgcgtcgggagcgggtcgcgcggtattatgtcggttaaggtgcggtttaagaagttggagtagttgtttttggacgggttttggcgtaacgagagcgttttgagcgtggaaacgttgttcgacgtgttcgtttgtttgtatatcgagtgtagttattcggttttgcgtcgcgataagtacgtggtcgagtttttcgagtggggtaagtgcgcgtcggtagggtcggatttgcggttttgcgattttcgcgttttagttcgcgtatttttacgttcgtttattttcgttcggatagattttgtcgtttttttgtttatttagttcgtgcgttcgttttttttcgttttggtagcgtttttaggttcgtagtttatttttttttagtcgtttttggtattttcgttttttcgttagttttttatttttttttgttttttttaggttcgatattcgcgttcgatcgtttcgtttttttattttgttttttggagttatattttacgtttttatttttattttttttttttcgtcgggttttcgtttggcggttttttagatttatttttcgagtttggatattattttttgtagtatttattggg

SEQ ID NO: 35686 - DNA, 1058 bp, Artificial Sequence
  chemically treated genomic DNA (Homo sapiens) CpG-island No: 35686
cccaataaatactacaaaaaataatatccaaactcgaaaaataaatctaaaaaaccgccaaacgaaaacccgacgaaaaaaaaaaaataaaaataaaaacgtaaaatataactccaaaaaacaaaataaaaaaacgaaacgatcgaacgcgaatatcgaacctaaaaaaaacaaaaaaaaataaaaaactaacgaaaaaacgaaaataccaaaaacgactaaaaaaaaataaactacgaacctaaaaacgctaccaaaacgaaaaaaaacgaacgcacgaactaaataaacaaaaaaacgacaaaatctatccgaacgaaaataaacgaacgtaaaaatacgcgaactaaaacgcgaaaatcgcaaaaccgcaaatccgaccctaccgacgcgcacttaccccactcgaaaaactcgaccacgtacttatcgcgacgcaaaaccgaataactacactcgatatacaaacaaacgaacacgtcgaacaacgtttccacgctcaaaacgctctcgttacgccaaaacccgtccaaaaacaactactccaacttcttaaaccgcaccttaaccgacataataccgcgcgacccgctcccgacgcgccgacctctcaccgccgactcgaccaatccgtcaaaacgcgccctcgaaaactcgacgactacgaaccccgacaacaacgacgcctcctcgccgccccgtccgcgtcgtcgcgccccgacctaaaccgacatcttaaactccgtcccgacgacgcaaaatctaaaacgccgaaccccgcgaatccataaaccgctctcctcccctcgacgccgcgccctcccaactcgaacgacccgcccccgccgccctcaaccccgcccgcgacgcgccctccccgccgccgccgccgcaaactattatcttctaaaatcctaacgatacgcaaacccgaccgacgcccgaacccgaccccaaccccgacccgacgacccaaccccgcgacccgcaaccaaccaaaacgcgaccaacaccaacgcaaccaaccactacgaaaccgaccgccgccgcgctaacct

SEQ ID NO: 35687 - DNA, 1058 bp, Artificial Sequence
  chemically treated genomic DNA (Homo sapiens) CpG-island No: 35687
tttagtgagtgttgtaggaaatgatatttagattcggagggtggatttaggaagtcgttaggcgagggttcggcgggggggagggggtgggagtgggaacgtaggatgtggttttaaggggtaggatgagggggcgggacgatcgaacgcggatgtcgagtttagggagggtaaggagggatgaaaagttagcggagggacgagggtgttaggagcggttggagagagatgggttgcgggtttgggggcgttgttagagcgagaggaggcgaacgtacgagttgggtgggtaggagggcggtagggtttgttcgggcggggatgggcgggcgtggggatgcgcgggttggggcgcgggggtcgtagagtcgtaggttcggttttgtcggcgcgtatttattttattcgaggaattcggttacgtatttgtcgcggcgtagggtcgagtggttgtattcggtgtataggtagacgagtacgtcgagtagcgtttttacgtttagggcgttttcgttgcgttagggttcgtttaggagtagttgttttagttttttgagtcgtattttggtcgatatggtgtcgcgcggttcgttttcgacgcgtcggttttttatcgtcggttcggttagttcgttagggcgcgttttcgggggttcggcggttgcgagtttcggtagtagcggcgttttttcgtcgtttcgttcgcgtcgtcgcgtttcggtttaggtcgatattttgggtttcgtttcgacggcgtagagtttggggcgtcgggtttcgcgggtttatgggtcgttttttttttttcggcgtcgcgtttttttagttcgggcggttcgttttcgtcgtttttagtttcgttcgcggcgcgtttttttcgtcgtcgtcgtcgtagattattattttttaggattttagcgatgcgtaagttcggtcggcgttcgagttcgattttagtttcgattcggcggtttagtttcgcggttcgtagttaattagggcgcggttagtattagcgtagttaattattacggggtcggtcgtcgtcgcgttgattt

SEQ ID NO: 35688 - DNA, 1058 bp, Artificial Sequence
  chemically treated genomic DNA (Homo sapiens) CpG-island No: 35688
aaatcaacgcgacgacgaccgaccccgtaataattaactacgctaatactaaccgcgccctaattaactacgaaccgcgaaactaaaccgccgaatcgaaactaaaatcgaactcgaacgccgaccgaacttacgcatcgctaaaatcctaaaaaataataatctacgacgacgacgacgaaaaaaacgcgccgcgaacgaaactaaaaacgacgaaaacgaaccgcccgaactaaaaaaacgcgacgccgaaaaaaaaaaaacgacccataaacccgcgaaacccgacgccccaaactctacgccgtcgaaacgaaacccaaaatatcgacctaaaccgaaacgcgacgacgcgaacgaaacgacgaaaaaacgccgctactaccgaaactcgcaaccgccgaacccccgaaaacgcgccctaacgaactaaccgaaccgacgataaaaaaccgacgcgtcgaaaacgaaccgcgcgacaccatatcgaccaaaatacgactcaaaaaactaaaacaactactcctaaacgaaccctaacgcaacgaaaacgccctaaacgtaaaaacgctactcgacgtactcgtctacctatacaccgaatacaaccactcgaccctacgccgcgacaaatacgtaaccgaattcctcgaataaaataaatacgcgccgacaaaaccgaacctacgactctacgacccccgcgccccaacccgcgcatccccacgcccgcccatccccgcccgaacaaaccctaccgccctcctacccacccaactcgtacgttcgcctcctctcgctctaacaacgcccccaaacccgcaacccatctctctccaaccgctcctaacaccctcgtccctccgctaacttttcatccctccttaccctccctaaactcgacatccgcgttcgatcgtcccgccccctcatcctaccccttaaaaccacatcctacgttcccactcccaccccctcccccccgccgaaccctcgcctaacgacttcctaaatccaccctccgaatctaaatatcatttcctacaacactcactaaa

SEQ ID NO: 35689 - DNA, 608 bp, Artificial Sequence
  chemically treated genomic DNA (Homo sapiens) CpG-island No: 35689
aacgagttttttaatcgaaattcgtatattaattataattcgagggaacgtttcgtaggttgtttatatgggtcggtcgtttttttcgacggttttcgcgacgttcgttttttattggatagatcgagtttacgttttaaggaagtcgggttaatcgaagtttagcgtatggtttgaaatcgaggttaaaggagatagaggtagcgtcgggtcgagggggaggggatacggagtgtttaattagcgtttagggattgcgcgacgtttcgtttagcgttgtgggaagcggtttaatcgtttttgtagggggcgttgttttttagtggtttttcggtttttgtcgttgcggtggttttgggttttttttcgtttggttttcgtagtcgaggagattttttggaaaatgggttattcgaagagagatgtttcgttgttttaggcggagggcggggacgtcgggtttgcgatattttatttttttttggtttcgaggtggttgggattcgttttattttcggtttagttttttagttaggtttttgagtcgtttagttcggatttgcgattcgtgaggttttgaggataagtgaaaagagttttttgtgtgg

SEQ ID NO: 35690 - DNA, 608 bp, Artificial Sequence
  chemically treated genomic DNA (Homo sapiens) CpG-island No: 35690
ccacacaaaaaactcttttcacttatcctcaaaacctcacgaatcgcaaatccgaactaaacgactcaaaaacctaactaaaaaactaaaccgaaaataaaacgaatcccaaccacctcgaaaccaaaaaaaaataaaatatcgcaaacccgacgtccccgccctccgcctaaaacaacgaaacatctctcttcgaataacccattttccaaaaaatctcctcgactacgaaaaccaaacgaaaaaaaacccaaaaccaccgcaacgacaaaaaccgaaaaaccactaaaaaacaacgccccctacaaaaacgattaaaccgcttcccacaacgctaaacgaaacgtcgcgcaatccctaaacgctaattaaacactccgtatcccctccccctcgacccgacgctacctctatctcctttaacctcgatttcaaaccatacgctaaacttcgattaacccgacttccttaaaacgtaaactcgatctatccaataaaaaacgaacgtcgcgaaaaccgtcgaaaaaaacgaccgacccatataaacaacctacgaaacgttccctcgaattataattaatatacgaatttcgattaaaaaactcgtt

SEQ ID NO: 35691 - DNA, 608 bp, Artificial Sequence
  chemically treated genomic DNA (Homo sapiens) CpG-island No: 35691
ttatataaagagttttttttatttgtttttaaaattttacgggtcgtaaattcgggttaaacggtttaggggtttggttggggaattgggtcgaaggtggaacggattttagttatttcggggttaggaaaagatgaagtgtcgtaggttcggcgttttcgtttttcgtttgaggtaacggagtattttttttcgagtagtttattttttagagagttttttcggttgcgaaagttagacgaagagggatttaaagttatcgtagcggtaagagtcggagaattattgagggatagcgttttttgtagaggcggttgaatcgttttttatagcgttgggcggggcgtcgcgtagtttttgggcgttgattgggtatttcgtgttttttttttttcggttcggcgttgtttttgttttttttgatttcgattttaagttatgcgttgagtttcggttggttcggtttttttgaggcgtaagttcggtttgtttaatgaggagcgagcgtcgcgggggtcgtcgggaagggcggtcgatttatataagtagtttgcggggcgttttttcgggttgtggttggtgtgcgggtttcggttggaggattcgtt

SEQ ID NO: 35692 - DNA, 608 bp, Artificial Sequence
  chemically treated genomic DNA (Homo sapiens) CpG-island No: 35692
aacgaatcctccaaccgaaacccgcacaccaaccacaacccgaaaaaacgccccgcaaactacttatataaatcgaccgcccttcccgacgacccccgcgacgctcgctcctcattaaacaaaccgaacttacgcctcaaaaaaaccgaaccaaccgaaactcaacgcataacttaaaatcgaaatcaaaaaaaacaaaaacaacgccgaaccgaaaaaaaaaaaacacgaaatacccaatcaacgcccaaaaactacgcgacgccccgcccaacgctataaaaaacgattcaaccgcctctacaaaaaacgctatccctcaataattctccgactcttaccgctacgataactttaaatccctcttcgtctaactttcgcaaccgaaaaaactctctaaaaaataaactactcgaaaaaaaatactccgttacctcaaacgaaaaacgaaaacgccgaacctacgacacttcatcttttcctaaccccgaaataactaaaatccgttccaccttcgacccaattccccaaccaaacccctaaaccgtttaacccgaatttacgacccgtaaaattttaaaaacaaataaaaaaaactctttatataa

SEQ ID NO: 35693 - DNA, 555 bp, Artificial Sequence
  chemically treated genomic DNA (Homo sapiens) CpG-island No: 35693
tagttttcgtttagtaagggaaagcggcggttttattcgtagatagttgcgaggtatcgcgttaagcgtatgcgtttgtttttaggtattttttttttcgtttttatttttttgttattttcgttttttatttagtttcgtcgtgcgtttgcgcgtttcggttcgtgggttagcgggtagtttatttacgtgggttttcgtatggtttagcgtcgttaagggtaaggcggagtttcgcgatcgtttcgtttttttcgtgtttcgttttttgtagggagcgcgggattttcggttggcgcgggtattttttagtttagttcggggcgtcggtttcgtcgcgtgcgcgtgcgtatggtggggtttggttggttgcgggatgcggtcgaggtcgtcgaggtcgtaaattttagtgggaaggcggcgtgtcgcggtcggtttcggtggaggagggggcgttttttcggaaaaggaaggaagtgggtgttacgggttttaatacggtttttttgacgttttgagtgggaaattataagatattgttttagatttttttat

SEQ ID NO: 35694 - DNA, 555 bp, Artificial Sequence
  chemically treated genomic DNA (Homo sapiens) CpG-island No: 35694
ataaaaaaatctaaaacaatatcttataatttcccactcaaaacgtcaaaaaaaccgtattaaaacccgtaacacccacttccttccttttccgaaaaaacgccccctcctccaccgaaaccgaccgcgacacgccgccttcccactaaaatttacgacctcgacgacctcgaccgcatcccgcaaccaaccaaaccccaccatacgcacgcgcacgcgacgaaaccgacgccccgaactaaactaaaaaatacccgcgccaaccgaaaatcccgcgctccctacaaaaaacgaaacacgaaaaaaacgaaacgatcgcgaaactccgccttacccttaacgacgctaaaccatacgaaaacccacgtaaataaactacccgctaacccacgaaccgaaacgcgcaaacgcacgacgaaactaaataaaaaacgaaaataacaaaaaaataaaaacgaaaaaaaaaatacctaaaaacaaacgcatacgcttaacgcgatacctcgcaactatctacgaataaaaccgccgctttcccttactaaacgaaaacta

SEQ ID NO: 35695 - DNA, 555 bp, Artificial Sequence
  chemically treated genomic DNA (Homo sapiens) CpG-island No: 35695
atgggaaaatttggagtagtattttgtgattttttatttaagacgttaaaggggtcgtattgaggttcgtgatatttattttttttttttttcggggaaacgtttttttttttatcgaagtcggtcgcggtacgtcgtttttttattggagtttgcggtttcggcggtttcgatcgtatttcgtagttagttaaattttattatgcgtacgcgtacgcggcgaagtcggcgtttcgggttgggttgggaagtgttcgcgttagtcgagggtttcgcgttttttataggaggcggggtacggagggggcggggcgatcgcgaggtttcgttttgtttttggcggcgttgggttatgcggaggtttacgtgagtagattgttcgttggtttacgggtcggggcgcgtaggcgtacggcggggttgggtggagggcggaggtggtaaaagggtgaaggcggaggagggagtgtttgggaataggcgtatacgtttggcgcggtgtttcgtagttgtttgcgggtggggtcgtcgtttttttttgttagacgaaagttg

SEQ ID NO: 35696 - DNA, 555 bp, Artificial Sequence
  chemically treated genomic DNA (Homo sapiens) CpG-island No: 35696
caactttcgtctaacaaaaaaaaacgacgaccccacccgcaaacaactacgaaacaccgcgccaaacgtatacgcctattcccaaacactccctcctccgccttcacccttttaccacctccgccctccacccaaccccgccgtacgcctacgcgccccgacccgtaaaccaacgaacaatctactcacgtaaacctccgcataacccaacgccgccaaaaacaaaacgaaacctcgcgatcgccccgccccctccgtaccccgcctcctataaaaaacgcgaaaccctcgactaacgcgaacacttcccaacccaacccgaaacgccgacttcgccgcgtacgcgtacgcataataaaatttaactaactacgaaatacgatcgaaaccgccgaaaccgcaaactccaataaaaaaacgacgtaccgcgaccgacttcgataaaaaaaaaaacgtttccccgaaaaaaaaaaaaaataaatatcacgaacctcaatacgacccctttaacgtcttaaataaaaaatcacaaaatactactccaaattttcccat

SEQ ID NO: 35697 - DNA, 523 bp, Artificial Sequence
  chemically treated genomic DNA (Homo sapiens) CpG-island No: 35697
  unsure (37..38, 41, 69..70, 72, 159..160, 165..166, 168..169, 178)
  unsure (184, 186, 202..203, 213..214, 216, 266..267, 269, 307, 512..513)
  unsure (515)
ttgtgggaggttttgaaacgcgcgggagttttttttnnttnttagtgtttttttagcgagagtgaaatnnnntttgaaattcggattaattggtagtcgttgttggtagaacgttttaaggattttttttcgcgggacggagggaggattcgggatagnnaattnnnnnngggagaanacgcgngnggggcgttcgagacgnntcgtgaaagnnnngtcgatttttgggaggattgataggtttagagatacgcgttgtttgttgnnnngggtttttcgggaataagtgaggggttttgtgtttcgnggatggttttagcgtagagtcgggtgtttgtcggggtgggtttttcgtattgttcgggtttcggcgggggcggttttgatttttttttatggttcgttttttatttcgggaatttttagtgttttttttttacggtttttttggcgttttttcgattttttcgcggtattttggtttatttttttttagcgtcgtggtttttttnnnngatttttt

SEQ ID NO: 35698 - DNA, 523 bp, Artificial Sequence
  chemically treated genomic DNA (Homo sapiens) CpG-island No: 35698
  unsure (9..10, 12, 217, 255..256, 258, 308..309, 311, 321..322, 338)
  unsure (340, 346, 354..355, 357..358, 364..365, 452..453, 455, 483)
  unsure (486..)
aaaaaatcnnnnaaaaaaaccacgacgctaaaaaaaaataaaccaaaataccgcgaaaaaatcgaaaaaacgccaaaaaaaccgtaaaaaaaaaacactaaaaattcccgaaataaaaaacgaaccataaaaaaaaatcaaaaccgcccccgccgaaacccgaacaatacgaaaaacccaccccgacaaacacccgactctacgctaaaaccatccncgaaacacaaaacccctcacttattcccgaaaaacccnnnncaacaaacaacgcgtatctctaaacctatcaatcctcccaaaaatcgacnnnnctttcacganncgtctcgaacgccccncncgcgtnttctcccnnnnnnaattnnctatcccgaatcctccctccgtcccgcgaaaaaaaatccttaaaacgttctaccaacaacgactaccaattaatccgaatttcaaannnnatttcactctcgctaaaaaaacactaanaannaaaaaaaactcccgcgcgtttcaaaacctcccacaa

SEQ ID NO: 35699 - DNA, 523 bp, Artificial Sequence
  chemically treated genomic DNA (Homo sapiens) CpG-island No: 35699
  unsure (9..10, 12, 217, 255..256, 258, 308..309, 311, 321..322, 338)
  unsure (340, 346, 354..355, 357..358, 364..365, 452..453, 455, 483)
  unsure (486..)
agggggttnnnngggaggattacggcgttgggggaaggtaggttaaagtgtcgcgggagagtcggggggacgttagaaaagtcgtggaaaaggagtattggggattttcggggtgggaggcgggttatggaaaggaattagagtcgttttcgtcggagttcgaataatgcggggagtttatttcggtagatattcggttttgcgttagaattatttncgaaatatagagttttttatttattttcgggaggtttnnnntaatagatagcgcgtgtttttagatttgttagtttttttaagggtcggtnnnntttttacggnncgtttcggacgttttntncgcgtntttttttnnnnnnaattnnttgtttcgagtttttttttcgtttcgcggggaggggtttttagggcgttttattaataacgattgttagttgattcgagttttaagnnnnattttattttcgttgggaaagtattggnggnngagggaagttttcgcgcgttttagggttttttatag

SEQ ID NO: 35700 - DNA, 523 bp, Artificial Sequence
  chemically treated genomic DNA (Homo sapiens) CpG-island No: 35700
  unsure (37..38, 41, 69..70, 72, 159..160, 165..166, 168..169, 178)
  unsure (184, 186, 202..203, 213..214, 216, 266..267, 269, 307, 512..513)
  unsure (515)
ctataaaaaaccctaaaacgcgcgaaaacttccctcnnccnccaatactttcccaacgaaaataaaatnnnncttaaaactcgaatcaactaacaatcgttattaataaaacgccctaaaaacccctccccgcgaaacgaaaaaaaaactcgaaacaannaattnnnnnnaaaaaaanacgcgnanaaaacgtccgaaacgnnccgtaaaaannnnaccgacccttaaaaaaactaacaaatctaaaaacacgcgctatctattannnnaaacctcccgaaaataaataaaaaactctatatttcgnaaataattctaacgcaaaaccgaatatctaccgaaataaactccccgcattattcgaactccgacgaaaacgactctaattcctttccataacccgcctcccaccccgaaaatccccaatactccttttccacgacttttctaacgtccccccgactctcccgcgacactttaacctaccttcccccaacgccgtaatcctcccnnnnaaccccct

SEQ ID NO: 35701 - DNA, 502 bp, Artificial Sequence
  chemically treated genomic DNA (Homo sapiens) CpG-island No: 35701
gtaggcgtcgcggtcgttagttttgtgaacgtagcggcggttttatttttaggttatttttaatttttcgttcggtcgggggtttttttacggtcgttattattgggtcgcggtttttagcgttattattttggatttcgcgtttgggttaggtagaattttcggtgcgtttttcgggattgcggtttttagttcgcgtttcgtttagtcgtttttcgtcggttttagttaattcgcgcgcgtttttttggtcgttttttatcggattaggtgttttttttgcgtagatttttttacgacgttagtcggcgtggcgtagttcgtttagttcggcggagtttgattttcggaggtatatcggcgcgttggttggttattaaggttatcgtcgagaggtcgcgtttttagttggttttagatatgcgtggcgtcggggttgtggtacggtcgggttcggggtgagtgatttttttaagtaattacgtttttgttttgttttttt

SEQ ID NO: 35702 - DNA, 502 bp, Artificial Sequence
  chemically treated genomic DNA (Homo sapiens) CpG-island No: 35702
aaaaaaacaaaacaaaaacgtaattacttaaaaaaatcactcaccccgaacccgaccgtaccacaaccccgacgccacgcatatctaaaaccaactaaaaacgcgacctctcgacgataaccttaataaccaaccaacgcgccgatatacctccgaaaatcaaactccgccgaactaaacgaactacgccacgccgactaacgtcgtaaaaaaatctacgcaaaaaaaacacctaatccgataaaaaacgaccaaaaaaacgcgcgcgaattaactaaaaccgacgaaaaacgactaaacgaaacgcgaactaaaaaccgcaatcccgaaaaacgcaccgaaaattctacctaacccaaacgcgaaatccaaaataataacgctaaaaaccgcgacccaataataacgaccgtaaaaaaacccccgaccgaacgaaaaattaaaaataacctaaaaataaaaccgccgctacgttcacaaaactaacgaccgcgacgcctac

SEQ ID NO: 35703 - DNA, 502 bp, Artificial Sequence
  chemically treated genomic DNA (Homo sapiens) CpG-island No: 35703
aaaagggtagaataaaaacgtagttatttgaaggggttatttatttcggattcgatcgtgttatagtttcgacgttacgtatgtttaggattagttgaggacgcggtttttcggcggtaattttggtaattagttagcgcgtcggtgtgttttcggaagttagatttcgtcgggttgagcgagttacgttacgtcgattggcgtcgtggaggagtttgcgtagaggagatatttgattcggtgggagacggttaggggagcgcgcgcggattggttggagtcgacgggggacggttgggcggggcgcggattggggatcgtagtttcggggagcgtatcggaagttttgtttggtttaggcgcggggtttaagatggtggcgttaggagtcgcgatttagtgatagcggtcgtggaggggttttcgatcgagcgggaggttgggggtagtttggaggtgagatcgtcgttgcgtttatagagttggcggtcgcggcgtttgt

SEQ ID NO: 35704 - DNA, 502 bp, Artificial Sequence
  chemically treated genomic DNA (Homo sapiens) CpG-island No: 35704
acaaacgccgcgaccgccaactctataaacgcaacgacgatctcacctccaaactacccccaacctcccgctcgatcgaaaacccctccacgaccgctatcactaaatcgcgactcctaacgccaccatcttaaaccccgcgcctaaaccaaacaaaacttccgatacgctccccgaaactacgatccccaatccgcgccccgcccaaccgtcccccgtcgactccaaccaatccgcgcgcgctcccctaaccgtctcccaccgaatcaaatatctcctctacgcaaactcctccacgacgccaatcgacgtaacgtaactcgctcaacccgacgaaatctaacttccgaaaacacaccgacgcgctaactaattaccaaaattaccgccgaaaaaccgcgtcctcaactaatcctaaacatacgtaacgtcgaaactataacacgatcgaatccgaaataaataaccccttcaaataactacgtttttattctaccctttt

SEQ ID NO: 35705 - DNA, 670 bp, Artificial Sequence
  chemically treated genomic DNA (Homo sapiens) CpG-island No: 35705
gtttttcggtcgttggggagaatttcgcgggggtcggggtcgtttttcgggttttttcggggcgttcgttattttttagtttttattaattagtttgtttcggtcgtcgtcgtcggatttttcgaacgtttaatgggtacgcgttacggttttcgtttcgttcgtcgggggaggcgcgtcggggttgggatagcgcgcgggcggtcgcgggcgcgggggcggggggcgtcgcgcggtcggaattgcgggcggggggtttttcgggggcggggggcgttgagcggttgcggcgcggttgtaggagcgcgaggaggaggtggcggcggcggcggaattggcgggggttttttcgcggcgttcgggattttcggtttttaggtatgggcgtttttgcggtgtagagtagtttagggtcggttggtgcgcgatttcggaaagcgggggtggagaggcgagcggagttcgcggggttaggtgaggggttgtcggggtggcgggaggtgggtttcggagaggtcgggtaatttcgggttttcggtggatgtttttgggcgggttcggggttacgtcggagtttcgtttggaaattggggagtcgggggggggattggatttttagcggaatcgttggtttcgagttagtttttaagggcgacggttaaggtttttt

SEQ ID NO: 35706 - DNA, 670 bp, Artificial Sequence
  chemically treated genomic DNA (Homo sapiens) CpG-island No: 35706
aaaaaaccttaaccgtcgcccttaaaaactaactcgaaaccaacgattccgctaaaaatccaatcccccccccgactccccaatttccaaacgaaactccgacgtaaccccgaacccgcccaaaaacatccaccgaaaacccgaaattacccgacctctccgaaacccacctcccgccaccccgacaacccctcacctaaccccgcgaactccgctcgcctctccacccccgctttccgaaatcgcgcaccaaccgaccctaaactactctacaccgcaaaaacgcccatacctaaaaaccgaaaatcccgaacgccgcgaaaaaacccccgccaattccgccgccgccgccacctcctcctcgcgctcctacaaccgcgccgcaaccgctcaacgccccccgcccccgaaaaaccccccgcccgcaattccgaccgcgcgacgccccccgcccccgcgcccgcgaccgcccgcgcgctatcccaaccccgacgcgcctcccccgacgaacgaaacgaaaaccgtaacgcgtacccattaaacgttcgaaaaatccgacgacgacgaccgaaacaaactaattaataaaaactaaaaaataacgaacgccccgaaaaaacccgaaaaacgaccccgacccccgcgaaattctccccaacgaccgaaaaac

SEQ ID NO: 35707 - DNA, 670 bp, Artificial Sequence
  chemically treated genomic DNA (Homo sapiens) CpG-island No: 35707
agaaagttttggtcgtcgtttttgggggttgattcggagttagcggtttcgttgggaatttagtttttttttcgattttttagtttttaagcgggatttcggcgtggtttcgagttcgtttaaaggtatttatcgaagattcgagattgttcggttttttcggggtttatttttcgttatttcggtagttttttatttggtttcgcgggtttcgttcgtttttttattttcgtttttcggggtcgcgtattagtcggttttgagttgttttgtatcgtaggggcgtttatgtttggaggtcgggggtttcgggcgtcgcgaggggattttcgttagtttcgtcgtcgtcgttatttttttttcgcgtttttgtagtcgcgtcgtagtcgtttagcgtttttcgttttcgggaagtttttcgttcgtagtttcggtcgcgcggcgtttttcgttttcgcgttcgcggtcgttcgcgcgttgttttagtttcggcgcgtttttttcggcgggcggggcggggatcgtgacgcgtgtttattgaacgttcgggaaattcggcggcggcggtcgaagtaaattaattaatgggggttaaaaaatagcgggcgtttcggaaaaattcgggaggcggtttcggttttcgcggggttttttttaacggtcggaaaat

SEQ ID NO: 35708 - DNA, 670 bp, Artificial Sequence
  chemically treated genomic DNA (Homo sapiens) CpG-island No: 35708
attttccgaccgttaaaaaaaaccccgcgaaaaccgaaaccgcctcccgaatttttccgaaacgcccgctattttttaacccccattaattaatttacttcgaccgccgccgccgaatttcccgaacgttcaataaacacgcgtcacgatccccgccccgcccgccgaaaaaaacgcgccgaaactaaaacaacgcgcgaacgaccgcgaacgcgaaaacgaaaaacgccgcgcgaccgaaactacgaacgaaaaacttcccgaaaacgaaaaacgctaaacgactacgacgcgactacaaaaacgcgaaaaaaaaataacgacgacgacgaaactaacgaaaatcccctcgcgacgcccgaaacccccgacctccaaacataaacgcccctacgatacaaaacaactcaaaaccgactaatacgcgaccccgaaaaacgaaaataaaaaaacgaacgaaacccgcgaaaccaaataaaaaactaccgaaataacgaaaaataaaccccgaaaaaaccgaacaatctcgaatcttcgataaatacctttaaacgaactcgaaaccacgccgaaatcccgcttaaaaactaaaaaatcgaaaaaaaaactaaattcccaacgaaaccgctaactccgaatcaacccccaaaaacgacgaccaaaactttct

SEQ ID NO: 35709 - DNA, 569 bp, Artificial Sequence
  chemically treated genomic DNA (Homo sapiens) CpG-island No: 35709
gcggcgggcgcgaggagtttatttatagattaaataattcgcgttttttgcgttaatggaatttcgcgtgcgttacgcgcgtagatattttaggtttttttttttcgtttcgttttttcgggtttttcgggtcgtatttttttttggtcgtttttcgtcggaatcgtatcgtttttcgcgtttttgtatggttaaagttcgacgggcggtttgcgttagtggcgttttcgttttttttcgtgcgttacggagcgtttaagaggagggtcgggttcggtcggggagttttagtggcggaggttacgaaatttgggggagtgtatagaagaatttcgggagcgtacgcgggattagggattaggttgagattcggggcgttagttcgggtaggggtagcgggagtcggtcgggtaggtttttttcggggaacgtgtatttgtttttaggagcggtgtatgaaggagatgggtgtacgcgcgggtagagaggatgttgtagggtcggtatgtaagagggtaggtgtagtgtgtagttgtagtataacgggatgagaatttaggttagattgg

SEQ ID NO: 35710 - DNA, 569 bp, Artificial Sequence
  chemically treated genomic DNA (Homo sapiens) CpG-island No: 35710
ccaatctaacctaaattctcatcccgttatactacaactacacactacacctaccctcttacataccgaccctacaacatcctctctacccgcgcgtacacccatctccttcatacaccgctcctaaaaacaaatacacgttccccgaaaaaaacctacccgaccgactcccgctacccctacccgaactaacgccccgaatctcaacctaatccctaatcccgcgtacgctcccgaaattcttctatacactcccccaaatttcgtaacctccgccactaaaactccccgaccgaacccgaccctcctcttaaacgctccgtaacgcacgaaaaaaaacgaaaacgccactaacgcaaaccgcccgtcgaactttaaccatacaaaaacgcgaaaaacgatacgattccgacgaaaaacgaccaaaaaaaaatacgacccgaaaaacccgaaaaaacgaaacgaaaaaaaaaaacctaaaatatctacgcgcgtaacgcacgcgaaattccattaacgcaaaaaacgcgaattatttaatctataaataaactcctcgcgcccgccgc

SEQ ID NO: 35711 - DNA, 569 bp, Artificial Sequence
  chemically treated genomic DNA (Homo sapiens) CpG-island No: 35711
ttagtttgatttgggtttttatttcgttgtgttatagttgtatattatatttatttttttgtatgtcggttttataatattttttttgttcgcgcgtatatttattttttttatgtatcgtttttaaaaatagatgtacgtttttcgaagggaatttattcggtcggttttcgttgtttttgttcggattggcgtttcgagttttagtttggtttttggtttcgcgtgcgttttcgaagtttttttgtgtatttttttaagtttcgtagttttcgttattgggatttttcggtcgagttcgattttttttttaagcgtttcgtgacgtacggggaggggcgggggcgttattgacgtaggtcgttcgtcgagttttggttatataagggcgcggggggcggtgcggtttcggcgggaggcggttagggggaggtgcggttcggggagttcgagggggcggggcgaggagggggggtttggaatgtttgcgcgcgtgacgtacgcggggttttattgacgtagggagcgcggattgtttgatttataaataggtttttcgcgttcgtcgt

SEQ ID NO: 35712 - DNA, 569 bp, Artificial Sequence
  chemically treated genomic DNA (Homo sapiens) CpG-island No: 35712
acgacgaacgcgaaaaacctatttataaatcaaacaatccgcgctccctacgtcaataaaaccccgcgtacgtcacgcgcgcaaacattccaaaccccccctcctcgccccgccccctcgaactccccgaaccgcacctccccctaaccgcctcccgccgaaaccgcaccgccccccgcgcccttatataaccaaaactcgacgaacgacctacgtcaataacgcccccgcccctccccgtacgtcacgaaacgcttaaaaaaaaaatcgaactcgaccgaaaaatcccaataacgaaaactacgaaacttaaaaaaatacacaaaaaaacttcgaaaacgcacgcgaaaccaaaaaccaaactaaaactcgaaacgccaatccgaacaaaaacaacgaaaaccgaccgaataaattcccttcgaaaaacgtacatctatttttaaaaacgatacataaaaaaaataaatatacgcgcgaacaaaaaaaatattataaaaccgacatacaaaaaaataaatataatatacaactataacacaacgaaataaaaacccaaatcaaactaa

SEQ ID NO: 35713 - DNA, 1634 bp, Artificial Sequence
  chemically treated genomic DNA (Homo sapiens) CpG-island No: 35713
ttttcgttattacgggtcggagcggagggggaggacggcgttacgaggcggggagttcgaggtttagggcggggcgttcgggaattttagttcgagtaagtcggggaggtgcgggcgcgggcgggaagcggagggcggcgcggagggaggtgagcggcgcgcgcggagtcggcgggcgaggaggaggattgtatagaggtttcgtttatcgtcgtcgcgagtcggtttttcgtcgttttcgaattcgtttattttgtttttcgtttttggacggcggcgggttcgtcggattcgcggtcgtagggagcgtcggagacggggagttatttcgttcggcgttttattcggcgttcgtagtttttagggggtcggtttcgcggtttgggagagggtatcgcggtttcggtgtgcgtagttttcgggcgcgagggtcggcgagcggatatagtcgcgtttttagtcggtggggtttagtcgtggcgtcggcgaggatttttcggttattcgtaggtaacgtcgggcggagggacgcgttattagtagcgtcggagatattcgagtttagggattttcgggttagcggagggtaggagcggagtttcgagggagcgcgggtttcgacggcgcgttttttcgttagttacgggtaggtaggttcgcgtggcggtttggggtggggggttgtagcggggttttcgggtcgaaagtttttcgggcggttagttatgattttcgggcgtagcggggcggtttcggtggtgttgaacgtgggcggcgttcggtattcgttgtttcgggagttgttgaaggatttttcgttgcgtcgcgtgagtcggttgtacggttgtcgtttcgagcgcgacgtgttcgaggtgtgcgacgattacgatcgcgagcgtaacgagtattttttcgatcggtattcggaggttttcggttttattttgttttacgtgcgcggttacggtaagttgcgtttcgcgcgcggatgtgcgagttttttttttataacgagatgatttattggggtttggagggcgcgtatttcgagtattgttgttagcgtcgtttcgacgatcgtatgttcgatatttatattttttattcggtcgacgagtcgggcgtgttgggtcgcgacgaggcgcgtttcggcgcgcgaggcggttttttttaggcgttggttggagcgtatgcggcggattttcgaggagtttacgtcgtcgttggtcgcgtagattttggttagcgtgtcggtggtgttcgtgatcgtgtttatggtggtgttgtgcgttagtacgttgttcgattggcgtaacgtagtcgtcgataatcgtagtttggatgatcggagtaggtatttcgtcggttttgggagggagtttttcgggtaggacgtattgtttttttattcgtttcgttcgttttgtcgcgtttgttcgtttcgtttatacgtttcgttttcgttttgttcgttttcgggcgatcgagttagcggggtgcgcgtttagcgaggtttaggcgcggttaattacgggatcggtcggtttttatttttatttcgttgttcggggtattagcggggtttggtttttatattagacgtattttttgagggcgaaatttttaggtatggg

SEQ ID NO: 35714 - DNA, 1634 bp, Artificial Sequence
  chemically treated genomic DNA (Homo sapiens) CpG-island No: 35714
cccatacctaaaaatttcgccctcaaaaaatacgtctaatataaaaaccaaaccccgctaataccccgaacaacgaaataaaaataaaaaccgaccgatcccgtaattaaccgcgcctaaacctcgctaaacgcgcaccccgctaactcgatcgcccgaaaacgaacaaaacgaaaacgaaacgtataaacgaaacgaacaaacgcgacaaaacgaacgaaacgaataaaaaaacaatacgtcctacccgaaaaactccctcccaaaaccgacgaaatacctactccgatcatccaaactacgattatcgacgactacgttacgccaatcgaacaacgtactaacgcacaacaccaccataaacacgatcacgaacaccaccgacacgctaaccaaaatctacgcgaccaacgacgacgtaaactcctcgaaaatccgccgcatacgctccaaccaacgcctaaaaaaaaccgcctcgcgcgccgaaacgcgcctcgtcgcgacccaacacgcccgactcgtcgaccgaataaaaaatataaatatcgaacatacgatcgtcgaaacgacgctaacaacaatactcgaaatacgcgccctccaaaccccaataaatcatctcgttataaaaaaaaaactcgcacatccgcgcgcgaaacgcaacttaccgtaaccgcgcacgtaaaacaaaataaaaccgaaaacctccgaataccgatcgaaaaaatactcgttacgctcgcgatcgtaatcgtcgcacacctcgaacacgtcgcgctcgaaacgacaaccgtacaaccgactcacgcgacgcaacgaaaaatccttcaacaactcccgaaacaacgaataccgaacgccgcccacgttcaacaccaccgaaaccgccccgctacgcccgaaaatcataactaaccgcccgaaaaactttcgacccgaaaaccccgctacaaccccccaccccaaaccgccacgcgaacctacctacccgtaactaacgaaaaaacgcgccgtcgaaacccgcgctccctcgaaactccgctcctaccctccgctaacccgaaaatccctaaactcgaatatctccgacgctactaataacgcgtccctccgcccgacgttacctacgaataaccgaaaaatcctcgccgacgccacgactaaaccccaccgactaaaaacgcgactatatccgctcgccgaccctcgcgcccgaaaactacgcacaccgaaaccgcgataccctctcccaaaccgcgaaaccgaccccctaaaaactacgaacgccgaataaaacgccgaacgaaataactccccgtctccgacgctccctacgaccgcgaatccgacgaacccgccgccgtccaaaaacgaaaaacaaaataaacgaattcgaaaacgacgaaaaaccgactcgcgacgacgataaacgaaacctctatacaatcctcctcctcgcccgccgactccgcgcgcgccgctcacctccctccgcgccgccctccgcttcccgcccgcgcccgcacctccccgacttactcgaactaaaattcccgaacgccccgccctaaacctcgaactccccgcctcgtaacgccgtcctccccctccgctccgacccgtaataacgaaaa

SEQ ID NO: 35715 - DNA, 1634 bp, Artificial Sequence
  chemically treated genomic DNA (Homo sapiens) CpG-island No: 35715
tttatgtttgaggatttcgtttttaagaggtgcgtttagtgtaagggttagatttcgttggtgtttcggataacggggtaggagtggggatcgatcggtttcgtagttggtcgcgtttgggtttcgttgggcgcgtatttcgttggttcggtcgttcggaggcggataggacggagacgggacgtatggacgggacggatagacgcgataggacggacgggacgggtagagaagtagtgcgttttattcggagggtttttttttagggtcggcggagtatttgtttcggttatttaggttgcggttgtcggcggttgcgttgcgttagtcgggtaacgtgttggcgtatagtattattatggatacgattacgaatattatcgatacgttagttaggatttgcgcggttagcgacgacgtgggtttttcgaaggttcgtcgtatgcgttttagttagcgtttggagggagtcgtttcgcgcgtcggggcgcgtttcgtcgcggtttagtacgttcggttcgtcggtcgagtagaaggtgtaggtgtcggatatgcggtcgtcgaggcggcgttggtagtagtattcgaggtgcgcgttttttaggttttagtagattatttcgttgtagaaggagagttcgtatattcgcgcgcgaagcgtagtttgtcgtggtcgcgtacgtagagtaggatgaagtcgaaggttttcgagtgtcggtcgaagaagtattcgttgcgttcgcggtcgtagtcgtcgtatatttcgagtacgtcgcgttcggagcggtagtcgtgtagtcggtttacgcggcgtagcgggaagttttttagtagttttcgggatagcgaatatcgggcgtcgtttacgtttagtattatcgaggtcgtttcgttgcgttcgaaggttatggttggtcgttcgggggattttcggttcgagggtttcgttgtagttttttattttaagtcgttacgcgggtttgtttgttcgtggttgacgggggagcgcgtcgtcggggttcgcgttttttcggggtttcgtttttgtttttcgttggttcgggggtttttgggttcgagtattttcggcgttgttagtagcgcgttttttcgttcggcgttatttgcgggtggtcggggagttttcgtcggcgttacggttgagttttatcggttgggaacgcggttgtgttcgttcgtcgattttcgcgttcgagggttgcgtatatcgaggtcgcggtgtttttttttaagtcgcggggtcgattttttgagggttgcgggcgtcgaatggagcgtcgggcggaatagtttttcgttttcggcgttttttgcggtcgcgaattcggcgagttcgtcgtcgtttagaggcgagaggtaaagtgagcgggttcggaggcggcgaagagtcggttcgcggcggcggtgggcggggtttttgtgtagttttttttttcgttcgtcggtttcgcgcgcgtcgtttattttttttcgcgtcgtttttcgtttttcgttcgcgttcgtattttttcggtttgttcgggttgggattttcgggcgtttcgttttggatttcgggtttttcgtttcgtgacgtcgtttttttttttcgtttcggttcgtagtggcgggga

SEQ ID NO: 35716 - DNA, 1634 bp, Artificial Sequence
  chemically treated genomic DNA (Homo sapiens) CpG-island No: 35716
tccccgccactacgaaccgaaacgaaaaaaaaaaacgacgtcacgaaacgaaaaacccgaaatccaaaacgaaacgcccgaaaatcccaacccgaacaaaccgaaaaaatacgaacgcgaacgaaaaacgaaaaacgacgcgaaaaaaaataaacgacgcgcgcgaaaccgacgaacgaaaaaaaaaactacacaaaaaccccgcccaccgccgccgcgaaccgactcttcgccgcctccgaacccgctcactttacctctcgcctctaaacgacgacgaactcgccgaattcgcgaccgcaaaaaacgccgaaaacgaaaaactattccgcccgacgctccattcgacgcccgcaaccctcaaaaaatcgaccccgcgacttaaaaaaaaacaccgcgacctcgatatacgcaaccctcgaacgcgaaaatcgacgaacgaacacaaccgcgttcccaaccgataaaactcaaccgtaacgccgacgaaaactccccgaccacccgcaaataacgccgaacgaaaaaacgcgctactaacaacgccgaaaatactcgaacccaaaaacccccgaaccaacgaaaaacaaaaacgaaaccccgaaaaaacgcgaaccccgacgacgcgctcccccgtcaaccacgaacaaacaaacccgcgtaacgacttaaaataaaaaactacaacgaaaccctcgaaccgaaaatcccccgaacgaccaaccataaccttcgaacgcaacgaaacgacctcgataatactaaacgtaaacgacgcccgatattcgctatcccgaaaactactaaaaaacttcccgctacgccgcgtaaaccgactacacgactaccgctccgaacgcgacgtactcgaaatatacgacgactacgaccgcgaacgcaacgaatacttcttcgaccgacactcgaaaaccttcgacttcatcctactctacgtacgcgaccacgacaaactacgcttcgcgcgcgaatatacgaactctccttctacaacgaaataatctactaaaacctaaaaaacgcgcacctcgaatactactaccaacgccgcctcgacgaccgcatatccgacacctacaccttctactcgaccgacgaaccgaacgtactaaaccgcgacgaaacgcgccccgacgcgcgaaacgactccctccaaacgctaactaaaacgcatacgacgaaccttcgaaaaacccacgtcgtcgctaaccgcgcaaatcctaactaacgtatcgataatattcgtaatcgtatccataataatactatacgccaacacgttacccgactaacgcaacgcaaccgccgacaaccgcaacctaaataaccgaaacaaatactccgccgaccctaaaaaaaaaccctccgaataaaacgcactacttctctacccgtcccgtccgtcctatcgcgtctatccgtcccgtccatacgtcccgtctccgtcctatccgcctccgaacgaccgaaccaacgaaatacgcgcccaacgaaacccaaacgcgaccaactacgaaaccgatcgatccccactcctaccccgttatccgaaacaccaacgaaatctaacccttacactaaacgcacctcttaaaaacgaaatcctcaaacataaa

SEQ ID NO: 35717 - DNA, 500 bp, Artificial Sequence
  chemically treated genomic DNA (Homo sapiens) CpG-island No: 35717
atatgcgtatatcgtaaatcgacgggcgtacgtagatataaaggagataaaagatagtatagggagggagaggaaagtaaaaacgaggtcgatagcgaaagatcgataagaaattcgaataggacgggtcgggagaagtcggaataagaaattcgtagaaacgtagatttcgacgaaataaggagcggagatagagcgcggaggtagtagcgatagacgcgacgtaagagagagagcggatagtaaggtatcgaaggggagtttacggaatagtattaaacgaggataacggggacgagttagtagagcgttatttattagtagtcgttatagtagattataatcgttagtagtatattagtaatagatagcgtacgagcggaggttaaggttacgtttcgcgagattaacgcgatttcgtagttacgagttttaatttattttattttatttgtttatataggatttttatttttagtttgttgtagagtgttggtata

SEQ ID NO: 35718 - DNA, 500 bp, Artificial Sequence
  chemically treated genomic DNA (Homo sapiens) CpG-island No: 35718
tataccaacactctacaacaaactaaaaataaaaatcctatataaacaaataaaataaaataaattaaaactcgtaactacgaaatcgcgttaatctcgcgaaacgtaaccttaacctccgctcgtacgctatctattactaatatactactaacgattataatctactataacgactactaataaataacgctctactaactcgtccccgttatcctcgtttaatactattccgtaaactccccttcgataccttactatccgctctctctcttacgtcgcgtctatcgctactacctccgcgctctatctccgctccttatttcgtcgaaatctacgtttctacgaatttcttattccgacttctcccgacccgtcctattcgaatttcttatcgatctttcgctatcgacctcgtttttactttcctctccctccctatactatcttttatctcctttatatctacgtacgcccgtcgatttacgatatacgcatat

SEQ ID NO: 35719 - DNA, 500 bp, Artificial Sequence
  chemically treated genomic DNA (Homo sapiens) CpG-island No: 35719
tatattagtattttatagtaggttggagatggaagttttgtgtggatagatgggatggggtgggttgaagttcgtagttacggagtcgcgttggtttcgcgggacgtggttttagttttcgttcgtgcgttgtttgttgttggtgtgttgttggcgattgtggtttgttgtggcgattgttggtgaatggcgttttgttggttcgttttcgttgttttcgtttggtattgtttcgtggattttttttcggtattttattgttcgtttttttttttgcgtcgcgtttgtcgttgttgttttcgcgttttgttttcgttttttgtttcgtcggggtttgcgtttttgcgggttttttgtttcggtttttttcggttcgttttgttcgagttttttgtcggtttttcgttgtcggtttcgtttttgtttttttttttttttttgtgttgttttttgttttttttgtgtttgcgtgcgttcgtcggtttgcggtgtgcgtatgt

SEQ ID NO: 35720 - DNA, 500 bp, Artificial Sequence
  chemically treated genomic DNA (Homo sapiens) CpG-island No: 35720
acatacgcacaccgcaaaccgacgaacgcacgcaaacacaaaaaaaacaaaaaacaacacaaaaaaaaaaaaaaaaacaaaaacgaaaccgacaacgaaaaaccgacaaaaaactcgaacaaaacgaaccgaaaaaaaccgaaacaaaaaacccgcaaaaacgcaaaccccgacgaaacaaaaaacgaaaacaaaacgcgaaaacaacaacgacaaacgcgacgcaaaaaaaaaaacgaacaataaaataccgaaaaaaaatccacgaaacaataccaaacgaaaacaacgaaaacgaaccaacaaaacgccattcaccaacaatcgccacaacaaaccacaatcgccaacaacacaccaacaacaaacaacgcacgaacgaaaactaaaaccacgtcccgcgaaaccaacgcgactccgtaactacgaacttcaacccaccccatcccatctatccacacaaaacttccatctccaacctactataaaatactaatata

SEQ ID NO: 35721 - DNA, 742 bp, Artificial Sequence
  chemically treated genomic DNA (Homo sapiens) CpG-island No: 35721
ttgtttttcgaagtgagttgcgaaatcgttttttagcgcgtacggggtttttatttttttcgtgtatgcgaacggtttttcgagatgttttttttatgggtttggttatcgttatttttgttataaattaacgtttgggattcggattgttgttaataggaaattttcgcgattcgttgtttagttcgtcgtttttataagattggattttgtataggttatttatgttcgttggtgtatttcgttttttcgtacgtttaattcgcggggacgttttcgattttttattttagttttcgttatagttagtttcgttttttcgcgtagatttcgtggagttttgttacgtttttcgcgcgttgcggtagtcgggagattgtgaagggtattttcggtagttaattaatattcgtatattgggcgggattacgtttgggtaggcggagggggtcgatcgaaggcggggatttttgagtgataaggatgatggttaatcgtcggaggtttttttattgcgtttcgtttttgagtcggtcgtttagtttttagtggggttttcggcgcggggaatgtttcgggtggagttggttgagtcgcgcgttttgttttattcgacggggttgtgtgtgttgggtttggttcgcggcgaatcgagatggtagagtagtcggacgaggtcgtgaagtattatattttagaggagatttagaagtataattatagtaagagtatttggttgatt

SEQ ID NO: 35722 - DNA, 742 bp, Artificial Sequence
  chemically treated genomic DNA (Homo sapiens) CpG-island No: 35722
aatcaaccaaatactcttactataattatacttctaaatctcctctaaaatataatacttcacgacctcgtccgactactctaccatctcgattcgccgcgaaccaaacccaacacacacaaccccgtcgaataaaacaaaacgcgcgactcaaccaactccacccgaaacattccccgcgccgaaaaccccactaaaaactaaacgaccgactcaaaaacgaaacgcaataaaaaaacctccgacgattaaccatcatccttatcactcaaaaatccccgccttcgatcgaccccctccgcctacccaaacgtaatcccgcccaatatacgaatattaattaactaccgaaaatacccttcacaatctcccgactaccgcaacgcgcgaaaaacgtaacaaaactccacgaaatctacgcgaaaaaacgaaactaactataacgaaaactaaaataaaaaatcgaaaacgtccccgcgaattaaacgtacgaaaaaacgaaatacaccaacgaacataaataacctatacaaaatccaatcttataaaaacgacgaactaaacaacgaatcgcgaaaatttcctattaacaacaatccgaatcccaaacgttaatttataacaaaaataacgataaccaaacccataaaaaaaacatctcgaaaaaccgttcgcatacacgaaaaaaataaaaaccccgtacgcgctaaaaaacgatttcgcaactcacttcgaaaaacaa

SEQ ID NO: 35723 - DNA, 742 bp, Artificial Sequence
  chemically treated genomic DNA (Homo sapiens) CpG-island No: 35723
gattagttaggtgtttttgttgtggttgtgtttttgaattttttttagggtgtagtattttacggtttcgttcgattgttttgttatttcggttcgtcgcgagttaggtttagtatatatagtttcgtcgggtggagtagagcgcgcgatttagttagttttattcgggatatttttcgcgtcgggaattttattgggggttgggcggtcggtttaggggcggggcgtagtagaagggttttcgacggttggttattatttttgttatttaaaagttttcgttttcggtcgatttttttcgtttgtttaagcgtggtttcgtttagtatgcgggtgttaattggttgtcggaggtgttttttataatttttcggttgtcgtagcgcgcggagagcgtgataggattttacggagtttgcgcggaagggcgggattaattgtggcgagggttgaggtgggaggtcgggggcgttttcgcgggttaagcgtgcgagagagcgaggtgtattagcgggtatggatggtttgtgtagagtttagttttgtgagggcggcgaattaggtagcgaatcgcgggagttttttattggtagtagttcgagttttagacgttaatttgtaataaaagtagcgatggttaagtttataaagggggtatttcggaaagtcgttcgtatgtacggaagagatgaaagtttcgtgcgcgttagaaaacggtttcgtaatttatttcgggaagtaa

SEQ ID NO: 35724 - DNA, 742 bp, Artificial Sequence
  chemically treated genomic DNA (Homo sapiens) CpG-island No: 35724
ttacttcccgaaataaattacgaaaccgttttctaacgcgcacgaaactttcatctcttccgtacatacgaacgactttccgaaataccccctttataaacttaaccatcgctacttttattacaaattaacgtctaaaactcgaactactaccaataaaaaactcccgcgattcgctacctaattcgccgccctcacaaaactaaactctacacaaaccatccatacccgctaatacacctcgctctctcgcacgcttaacccgcgaaaacgcccccgacctcccacctcaaccctcgccacaattaatcccgcccttccgcgcaaactccgtaaaatcctatcacgctctccgcgcgctacgacaaccgaaaaattataaaaaacacctccgacaaccaattaacacccgcatactaaacgaaaccacgcttaaacaaacgaaaaaaatcgaccgaaaacgaaaacttttaaataacaaaaataataaccaaccgtcgaaaacccttctactacgccccgcccctaaaccgaccgcccaacccccaataaaattcccgacgcgaaaaatatcccgaataaaactaactaaatcgcgcgctctactccacccgacgaaactatatatactaaacctaactcgcgacgaaccgaaataacaaaacaatcgaacgaaaccgtaaaatactacaccctaaaaaaaattcaaaaacacaaccacaacaaaaacacctaactaatc

SEQ ID NO: 35725 - DNA, 526 bp, Artificial Sequence
  chemically treated genomic DNA (Homo sapiens) CpG-island No: 35725
gcggggtcgcgggacgggcggaggcgggggtggggcgcgggttttatttgatcgggttgtgtttcgtcgttatcgttttcgggttgttttgggattcgggggcggcggtaaggttacgggagttttcggttttaatggggaattttcgattttgcgggggtttttggggggcgtttatgtttaagtttcggggcgttttgcgcggggagtggcggttaggtttttttcgggtcgtcgggcgtcgtcgtttcgcgttcgttttttgggtcgtcgtttatttttcggcggttgagatcggttttaggttagaagtagttgtcggagttttggtcgcgggagaacgtttcggtttaggcggagtcgggtaggtttttgtggcgtgttcgggttcgggcgtcgaggagggtagtattgtgattcgggtcgcggcgcgttgattttatagagtacgttttttttattggagaatttttaacggtgttttttgtcgtttttggtatttagcgcgggttagaatcggggattg

SEQ ID NO: 35726 - DNA, 526 bp, Artificial Sequence
  chemically treated genomic DNA (Homo sapiens) CpG-island No: 35726
caatccccgattctaacccgcgctaaataccaaaaacgacaaaaaacaccgttaaaaattctccaataaaaaaaacgtactctataaaatcaacgcgccgcgacccgaatcacaatactaccctcctcgacgcccgaacccgaacacgccacaaaaacctacccgactccgcctaaaccgaaacgttctcccgcgaccaaaactccgacaactacttctaacctaaaaccgatctcaaccgccgaaaaataaacgacgacccaaaaaacgaacgcgaaacgacgacgcccgacgacccgaaaaaaacctaaccgccactccccgcgcaaaacgccccgaaacttaaacataaacgccccccaaaaacccccgcaaaatcgaaaattccccattaaaaccgaaaactcccgtaaccttaccgccgcccccgaatcccaaaacaacccgaaaacgataacgacgaaacacaacccgatcaaataaaacccgcgccccacccccgcctccgcccgtcccgcgaccccgc

SEQ ID NO: 35727 - DNA, 526 bp, Artificial Sequence
  chemically treated genomic DNA (Homo sapiens) CpG-island No: 35727
tagttttcgattttggttcgcgttgagtgttaggggcggtagggggtatcgttgggggttttttagtgggaggaacgtgttttgtgaggttagcgcgtcgcggttcgggttataatgttgtttttttcgacgttcgggttcgggtacgttatagagatttgttcggtttcgtttggatcggagcgttttttcgcggttagggtttcggtagttgtttttagtttgggatcggttttaatcgtcgggaggtgagcgacggtttagggggcgggcgcgaggcggcggcgttcggcgattcgggagaggtttgatcgttatttttcgcgtagagcgtttcggggtttggatatgagcgttttttaggagttttcgtagggtcggagattttttattgaggtcggagattttcgtggttttgtcgtcgttttcgagttttaggatagttcggaggcggtagcgacggagtataattcggttaggtaaggttcgcgttttattttcgttttcgttcgtttcgcggtttcgt

SEQ ID NO: 35728 - DNA, 526 bp, Artificial Sequence
  chemically treated genomic DNA (Homo sapiens) CpG-island No: 35728
acgaaaccgcgaaacgaacgaaaacgaaaataaaacgcgaaccttacctaaccgaattatactccgtcgctaccgcctccgaactatcctaaaactcgaaaacgacgacaaaaccacgaaaatctccgacctcaataaaaaatctccgaccctacgaaaactcctaaaaaacgctcatatccaaaccccgaaacgctctacgcgaaaaataacgatcaaacctctcccgaatcgccgaacgccgccgcctcgcgcccgccccctaaaccgtcgctcacctcccgacgattaaaaccgatcccaaactaaaaacaactaccgaaaccctaaccgcgaaaaaacgctccgatccaaacgaaaccgaacaaatctctataacgtacccgaacccgaacgtcgaaaaaaacaacattataacccgaaccgcgacgcgctaacctcacaaaacacgttcctcccactaaaaaacccccaacgataccccctaccgcccctaacactcaacgcgaaccaaaatcgaaaacta

SEQ ID NO: 35729 - DNA, 909 bp, Artificial Sequence
  chemically treated genomic DNA (Homo sapiens) CpG-island No: 35729
ggtcgcgttcgtagagatttcggtttcggttttgttttgtttttttcgcgcgttttcgcggcggtcgttcgtttttgtttcgcgtagttcgagtttttttagagttcgcggcgttcgacggttttagatacgttcggcgtcgttttcgtcgttttttcgtcgtcgtttttaggaggtttcgcgcgttttttcgttttttttcgggtcgggtcgggcggcgaggcgggcgcgggcggcgacggcgcggttattgtttcgtagtttttttcgggcgcgtagaaagggtcggtttcgcgggttgggaggcgcggtcgggcgcggggaggggcggtcgggagtcggtgtttattaacgttcgtcgtcgtttcgggttgggttcgtcgtcgtcgtcgtagtcgttcgcgtttttttcgtggtcgtttatagtttttcggagtcggcgtcgtcgtcgtcgttattgcgtttcgggttgtaaatggcgttcgttcgtttcggcgtttttcgtcgcgttttcggttcggggacgtttgggggaggcgcgttcggggttcgtattttagtattgtcgtcgttcgggtcgttagagttcgcggttaggttcgcggcgggtttcgggtagtttcgacgttcgttcgtttttcgtcggcgtcgcgtgtagttatttatcgcgggtcgcggcgtatcggtcggtcgcgcgcgcgggtcgagggaagatttttggttttcggttggggaaggattttttttcgaggtcgtttttttgcgttttaaaataagtagttttaacgtgagagaaataaaaggtatttgttgacgtgggcgttggatagaaacgttcgagggttggggatataattaaaggggtaacgtatagattttaggtattaattagtagtttcgtttattttt

SEQ ID NO: 35730 - DNA, 909 bp, Artificial Sequence
  chemically treated genomic DNA (Homo sapiens) CpG-island No: 35730
aaaaataaacgaaactactaattaatacctaaaatctatacgttacccctttaattatatccccaaccctcgaacgtttctatccaacgcccacgtcaacaaataccttttatttctctcacgttaaaactacttattttaaaacgcaaaaaaacgacctcgaaaaaaaatccttccccaaccgaaaaccaaaaatcttccctcgacccgcgcgcgcgaccgaccgatacgccgcgacccgcgataaataactacacgcgacgccgacgaaaaacgaacgaacgtcgaaactacccgaaacccgccgcgaacctaaccgcgaactctaacgacccgaacgacgacaatactaaaatacgaaccccgaacgcgcctcccccaaacgtccccgaaccgaaaacgcgacgaaaaacgccgaaacgaacgaacgccatttacaacccgaaacgcaataacgacgacgacgacgccgactccgaaaaactataaacgaccacgaaaaaaacgcgaacgactacgacgacgacgacgaacccaacccgaaacgacgacgaacgttaataaacaccgactcccgaccgcccctccccgcgcccgaccgcgcctcccaacccgcgaaaccgaccctttctacgcgcccgaaaaaaactacgaaacaataaccgcgccgtcgccgcccgcgcccgcctcgccgcccgacccgacccgaaaaaaaacgaaaaaacgcgcgaaacctcctaaaaacgacgacgaaaaaacgacgaaaacgacgccgaacgtatctaaaaccgtcgaacgccgcgaactctaaaaaaactcgaactacgcgaaacaaaaacgaacgaccgccgcgaaaacgcgcgaaaaaaacaaaacaaaaccgaaaccgaaatctctacgaacgcgacc

SEQ ID NO: 35731 - DNA, 909 bp, Artificial Sequence
  chemically treated genomic DNA (Homo sapiens) CpG-island No: 35731
gggagtgggcgaagttgttggttggtgtttgaaatttgtgcgttgtttttttaattgtgtttttagttttcgggcgtttttgtttaacgtttacgttagtaaatattttttgttttttttacgttggggttatttgttttagggcgtaaaggaacggtttcgaaagggggtttttttttagtcgagaattaggaattttttttcggttcgcgcgcgcgatcggtcggtgcgtcgcggttcgcggtaagtggttgtacgcggcgtcggcggagggcgggcgggcgtcggggttgttcgggattcgtcgcgagtttggtcgcgggttttgacggttcgggcggcggtagtgttgggatgcgggtttcgggcgcgttttttttagacgttttcgggtcgggagcgcggcgggaggcgtcgaggcgagcgggcgttatttgtagttcggggcgtagtggcggcggcggcggcgtcggtttcgaggggttgtgggcggttacggaggaggcgcgggcggttgcggcggcggcggcgggtttagttcggggcggcggcgggcgttggtgggtatcggttttcggtcgttttttttcgcgttcggtcgcgttttttagttcgcggggtcggttttttttgcgcgttcgggaggggttgcgggataatggtcgcgtcgtcgtcgttcgcgttcgtttcgtcgttcggttcggttcggggaaaggcgggaaggcgcgcggagttttttggaggcggcggcgggaaggcggcggggacggcgtcgggcgtgtttggagtcgtcgggcgtcgcggattttggaggggttcgggttgcgcggagtaaagacgggcggtcgtcgcgggggcgcgcggggagggtagggtagggtcggggtcggagtttttgcgggcgcggtt

SEQ ID NO: 35732 - DNA, 909 bp, Artificial Sequence
  chemically treated genomic DNA (Homo sapiens) CpG-island No: 35732
aaccgcgcccgcaaaaactccgaccccgaccctaccctaccctccccgcgcgcccccgcgacgaccgcccgtctttactccgcgcaacccgaacccctccaaaatccgcgacgcccgacgactccaaacacgcccgacgccgtccccgccgccttcccgccgccgcctccaaaaaactccgcgcgccttcccgcctttccccgaaccgaaccgaacgacgaaacgaacgcgaacgacgacgacgcgaccattatcccgcaacccctcccgaacgcgcaaaaaaaaccgaccccgcgaactaaaaaacgcgaccgaacgcgaaaaaaaacgaccgaaaaccgatacccaccaacgcccgccgccgccccgaactaaacccgccgccgccgccgcaaccgcccgcgcctcctccgtaaccgcccacaacccctcgaaaccgacgccgccgccgccgccactacgccccgaactacaaataacgcccgctcgcctcgacgcctcccgccgcgctcccgacccgaaaacgtctaaaaaaaacgcgcccgaaacccgcatcccaacactaccgccgcccgaaccgtcaaaacccgcgaccaaactcgcgacgaatcccgaacaaccccgacgcccgcccgccctccgccgacgccgcgtacaaccacttaccgcgaaccgcgacgcaccgaccgatcgcgcgcgcgaaccgaaaaaaaattcctaattctcgactaaaaaaaaaccccctttcgaaaccgttcctttacgccctaaaacaaataaccccaacgtaaaaaaaacaaaaaatatttactaacgtaaacgttaaacaaaaacgcccgaaaactaaaaacacaattaaaaaaacaacgcacaaatttcaaacaccaaccaacaacttcgcccactccc

SEQ ID NO: 35733 - DNA, 583 bp, Artificial Sequence
  chemically treated genomic DNA (Homo sapiens) CpG-island No: 35733
gcgcgggtagagggcgagagggcgagagggcgggagggcgtcggggttgtttcggatttgtaattagtttggtagcgggcggcggcggcggcggcgttgggatgcgggttacgggcgtgcggtttttagtcgtttttcggtcgagagcgaggtcggaggcgttaagtcgagcgggcgttatttgtagtttggggcgtagtagttgtagcgttgttttcgaggggttgggaacggttaaggaggaggcgcgggcggcggcggtgggcgttggcgggtatcggttttcggtcgttttttttcgcgttcggtcggtcggttttttttgcgcgttcggaaggggttgcggaataatggtcgcgtcgttgtcgtcgttcggttcggttcggggaaagtcgggaaggcgcgcggagttttttggcggcggcggcggcggcggcgggaaggcggcggggacggcgtcgggcgtgtttggagtcgttcggcgcggcggatttcggggaggtttggtttgcgtcgcgtagagatagtagtcgtcgggggcggggcgcgagttagcgaatttgtagaattttttttaattggg

SEQ ID NO: 35734 - DNA, 583 bp, Artificial Sequence
  chemically treated genomic DNA (Homo sapiens) CpG-island No: 35734
cccaattaaaaaaaattctacaaattcgctaactcgcgccccgcccccgacgactactatctctacgcgacgcaaaccaaacctccccgaaatccgccgcgccgaacgactccaaacacgcccgacgccgtccccgccgccttcccgccgccgccgccgccgccgccaaaaaactccgcgcgccttcccgactttccccgaaccgaaccgaacgacgacaacgacgcgaccattattccgcaaccccttccgaacgcgcaaaaaaaaccgaccgaccgaacgcgaaaaaaaacgaccgaaaaccgatacccgccaacgcccaccgccgccgcccgcgcctcctccttaaccgttcccaacccctcgaaaacaacgctacaactactacgccccaaactacaaataacgcccgctcgacttaacgcctccgacctcgctctcgaccgaaaaacgactaaaaaccgcacgcccgtaacccgcatcccaacgccgccgccgccgccgcccgctaccaaactaattacaaatccgaaacaaccccgacgccctcccgccctctcgccctctcgccctctacccgcgc

SEQ ID NO: 35735 - DNA, 583 bp, Artificial Sequence
  chemically treated genomic DNA (Homo sapiens) CpG-island No: 35735
tttaattgagggaagttttgtaaattcgttggttcgcgtttcgttttcggcggttgttgtttttgcgcggcgtagattaagttttttcggagttcgtcgcgtcggacggttttagatacgttcgacgtcgttttcgtcgttttttcgtcgtcgtcgtcgtcgtcgttaggaggtttcgcgcgttttttcggtttttttcgggtcgggtcgggcggcgatagcggcgcggttattgtttcgtagtttttttcgggcgcgtaggagaggtcggtcggtcgggcgcggggagggacggtcgggagtcggtgttcgttaacgtttatcgtcgtcgttcgcgttttttttttggtcgtttttaatttttcggagatagcgttgtagttgttgcgttttaggttgtaaatggcgttcgttcggtttggcgttttcggtttcgttttcggtcgggagacggttgagggtcgtacgttcgtggttcgtattttaacgtcgtcgtcgtcgtcgttcgttattaggttggttgtaggttcggggtagtttcgacgttttttcgttttttcgttttttcgttttttgttcgcgt

SEQ ID NO: 35736 - DNA, 583 bp, Artificial Sequence
  chemically treated genomic DNA (Homo sapiens) CpG-island No: 35736
acgcgaacaaaaaacgaaaaaacgaaaaaacgaaaaaacgtcgaaactaccccgaacctacaaccaacctaataacgaacgacgacgacgacgacgttaaaatacgaaccacgaacgtacgaccctcaaccgtctcccgaccgaaaacgaaaccgaaaacgccaaaccgaacgaacgccatttacaacctaaaacgcaacaactacaacgctatctccgaaaaattaaaaacgaccaaaaaaaaaacgcgaacgacgacgataaacgttaacgaacaccgactcccgaccgtccctccccgcgcccgaccgaccgacctctcctacgcgcccgaaaaaaactacgaaacaataaccgcgccgctatcgccgcccgacccgacccgaaaaaaaccgaaaaaacgcgcgaaacctcctaacgacgacgacgacgacgacgaaaaaacgacgaaaacgacgtcgaacgtatctaaaaccgtccgacgcgacgaactccgaaaaaacttaatctacgccgcgcaaaaacaacaaccgccgaaaacgaaacgcgaaccaacgaatttacaaaacttccctcaattaaa

SEQ ID NO: 35737 - DNA, 675 bp, Artificial Sequence
  chemically treated genomic DNA (Homo sapiens) CpG-island No: 35737
gaggcgttcgaacgaggtcgtagttttttgattttttttttttatttttttttcgtaggtgcgtacggttttggttcgcggagatatggtgtcggtcgagatcgttttacgcgaggttcggaattttttttttatttttttggtcgtgggtatcgcggttatggtgttttgtattatttttatcgtagttattattatcgtcgcgtagtattacgagaattattgggatttttaaaaacgtttttggttcggttttattttgcgtttttcgattttttaggttttttttgtagttatatcgcggatttaatgggcgttttgtatattcgtttttggggtcgttagatttggatatatcgtaaatttcgtttttacggaacgtttcgttttgcgagtaagttcggaatttagttttttaggaatttttttaaaatttatatttttagggacgtcgtttttcgggatttcggttaaacgtcggatttttagtcgttttaggtttttttatttttaaagtgtagcgtttttaatcgagtaatttcggtttggtttttaaaatttcgttttttttataagtatcgttttagttttgataaaatttcgtttttaggtcggtaggtttcgtttttttttttttttcgcggggtgatttagtttagtgattgggtttgtggt

SEQ ID NO: 35738 - DNA, 675 bp, Artificial Sequence
  chemically treated genomic DNA (Homo sapiens) CpG-island No: 35738
accacaaacccaatcactaaactaaatcaccccgcgaaaaaaaaaaaaaaacgaaacctaccgacctaaaaacgaaattttatcaaaactaaaacgatacttataaaaaaaacgaaattttaaaaaccaaaccgaaattactcgattaaaaacgctacactttaaaaataaaaaaacctaaaacgactaaaaatccgacgtttaaccgaaatcccgaaaaacgacgtccctaaaaatataaattttaaaaaaattcctaaaaaactaaattccgaacttactcgcaaaacgaaacgttccgtaaaaacgaaatttacgatatatccaaatctaacgaccccaaaaacgaatatacaaaacgcccattaaatccgcgatataactacaaaaaaaacctaaaaaatcgaaaaacgcaaaataaaaccgaaccaaaaacgtttttaaaaatcccaataattctcgtaatactacgcgacgataataataactacgataaaaataatacaaaacaccataaccgcgatacccacgaccaaaaaaataaaaaaaaaattccgaacctcgcgtaaaacgatctcgaccgacaccatatctccgcgaaccaaaaccgtacgcacctacgaaaaaaaaataaaaaaaaaaaatcaaaaaactacgacctcgttcgaacgcctc

SEQ ID NO: 35739 - DNA, 675 bp, Artificial Sequence
  chemically treated genomic DNA (Homo sapiens) CpG-island No: 35739
gttataaatttaattattggattgaattatttcgcggagaagaaaagaaggcggagtttgtcgatttggaggcggggttttgttagagttggggcggtgtttatagaggaggcggggttttagggattaaatcgaggttgttcggttgggggcgttatattttgagggtgagggggtttggagcgattgagggttcggcgtttggtcgggatttcggaaagcggcgtttttgggggtgtgggttttggaggggtttttgaggaattggatttcgagtttgttcgtaaggcgagacgtttcgtggaggcggagtttacgatgtatttaagtttgacggttttagaaacgggtgtgtagggcgtttattgggttcgcggtatgattgtagaaagagtttgggagatcgaggggcgtagagtggggtcggattaggggcgtttttagggattttagtagttttcgtggtgttgcgcggcgatgatgatgattacggtgaggatggtatagagtattatggtcgcgatgtttacggttagggagatgaaggagaagtttcgggtttcgcgtgaagcgatttcggtcgatattatgttttcgcgggttaaggtcgtgcgtatttacggaggaggggtgggggaaggaggttaaagagttgcggtttcgttcgaacgtttt

SEQ ID NO: 35740 - DNA, 675 bp, Artificial Sequence
  chemically treated genomic DNA (Homo sapiens) CpG-island No: 35740
aaaacgttcgaacgaaaccgcaactctttaacctccttcccccacccctcctccgtaaatacgcacgaccttaacccgcgaaaacataatatcgaccgaaatcgcttcacgcgaaacccgaaacttctccttcatctccctaaccgtaaacatcgcgaccataatactctataccatcctcaccgtaatcatcatcatcgccgcgcaacaccacgaaaactactaaaatccctaaaaacgcccctaatccgaccccactctacgcccctcgatctcccaaactctttctacaatcataccgcgaacccaataaacgccctacacacccgtttctaaaaccgtcaaacttaaatacatcgtaaactccgcctccacgaaacgtctcgccttacgaacaaactcgaaatccaattcctcaaaaacccctccaaaacccacacccccaaaaacgccgctttccgaaatcccgaccaaacgccgaaccctcaatcgctccaaaccccctcaccctcaaaatataacgcccccaaccgaacaacctcgatttaatccctaaaaccccgcctcctctataaacaccgccccaactctaacaaaaccccgcctccaaatcgacaaactccgccttcttttcttctccgcgaaataattcaatccaataattaaatttataac

SEQ ID NO: 35741 - DNA, 739 bp, Artificial Sequence
  chemically treated genomic DNA (Homo sapiens) CpG-island No: 35741
tacggcgcggtaagcgggttggttcgaggtcgaggttaaacgcgttcgaggttaaacgcgttcgaggttggcgtttttacgttcgtttgaaaggacgtttaggagcggcgttttcggaaaggtcgtgttcgttttatagtttagaattcgcgtagtttcgcggtttacggtatttttacgattcggtttagttttaattcgttttagattcgtattcgcgcgcggacgtttagggttttgaagtcgaagtttttcgcggttattttcgcgcgtttttttcgttattttcggagtttttagcgtcgggttcgtaataaatttattgaatttataaaagacgtcgtcgtcgagtcgcgttcgcgcgttcgcggtttcgcgattacgtgatatcgttcgtttttcgtgtttcgcgtacgcgtttaaatcgtcggtttttgtgcgttttcgggcggtttcgaacgggtcgggacgagtcggggattgtatacgcgtatattcgtacgcgcgtatacgcgtatattttttttttacgtggtagcgaaggataaagaggaagaacgggttatttgtaagtattattaagagtgtatgtgcgtatgcgcgaaggaaggagtttcgcgaatttaattttttatagtgtttcgcgttcggaagtgtttgtcgtttggagacggagtgattttaaacgggtttatacggttttttgagaaatataaagggaaatcgaatttattaatat

SEQ ID NO: 35742 - DNA, 739 bp, Artificial Sequence
  chemically treated genomic DNA (Homo sapiens) CpG-island No: 35742
atattaataaattcgatttccctttatatttctcaaaaaaccgtataaacccgtttaaaatcactccgtctccaaacgacaaacacttccgaacgcgaaacactataaaaaattaaattcgcgaaactccttccttcgcgcatacgcacatacactcttaataatacttacaaataacccgttcttcctctttatccttcgctaccacgtaaaaaaaaaatatacgcgtatacgcgcgtacgaatatacgcgtatacaatccccgactcgtcccgacccgttcgaaaccgcccgaaaacgcacaaaaaccgacgatttaaacgcgtacgcgaaacacgaaaaacgaacgatatcacgtaatcgcgaaaccgcgaacgcgcgaacgcgactcgacgacgacgtcttttataaattcaataaatttattacgaacccgacgctaaaaactccgaaaataacgaaaaaaacgcgcgaaaataaccgcgaaaaacttcgacttcaaaaccctaaacgtccgcgcgcgaatacgaatctaaaacgaattaaaactaaaccgaatcgtaaaaataccgtaaaccgcgaaactacgcgaattctaaactataaaacgaacacgacctttccgaaaacgccgctcctaaacgtcctttcaaacgaacgtaaaaacgccaacctcgaacgcgtttaacctcgaacgcgtttaacctcgacctcgaaccaacccgcttaccgcgccgta

SEQ ID NO: 35743 - DNA, 739 bp, Artificial Sequence
  chemically treated genomic DNA (Homo sapiens) CpG-island No: 35743
atattggtggattcggtttttttttatgttttttagaaaatcgtgtgagttcgtttggagttatttcgtttttaagcgataggtattttcggacgcggggtattgtgggaagttgagttcgcggggttttttttttcgcgtatgcgtatatgtatttttggtaatgtttgtaggtggttcgttttttttttttgtttttcgttgttacgtgagaggggagtgtacgcgtgtgcgcgcgtgcgagtgtgcgcgtgtgtagttttcgattcgtttcggttcgttcggagtcgttcgggagcgtataaaggtcgacggtttgggcgcgtgcgcgggatacgggggacgggcggtgttacgtgatcgcgaggtcgcgggcgcgcgggcgcgattcggcggcggcgttttttgtgagtttagtgagtttattgcgggttcggcgttgggggtttcgggaatggcgggggaggcgcgcgggagtggtcgcggggagtttcggttttaaggttttgggcgttcgcgcgcggatgcgggtttggggcgggttggggttgggtcgggtcgtgaagatgtcgtgggtcgcggagttgcgcggattttgggttgtggggcgggtacggttttttcggaggcgtcgtttttgggcgtttttttaggcgggcgtggaggcgttagtttcgggcgcgtttagtttcgggcgcgtttagtttcgatttcgggttagttcgtttgtcgcgtcgtg

SEQ ID NO: 35744 - DNA, 739 bp, Artificial Sequence
  chemically treated genomic DNA (Homo sapiens) CpG-island No: 35744
cacgacgcgacaaacgaactaacccgaaatcgaaactaaacgcgcccgaaactaaacgcgcccgaaactaacgcctccacgcccgcctaaaaaaacgcccaaaaacgacgcctccgaaaaaaccgtacccgccccacaacccaaaatccgcgcaactccgcgacccacgacatcttcacgacccgacccaaccccaacccgccccaaacccgcatccgcgcgcgaacgcccaaaaccttaaaaccgaaactccccgcgaccactcccgcgcgcctcccccgccattcccgaaacccccaacgccgaacccgcaataaactcactaaactcacaaaaaacgccgccgccgaatcgcgcccgcgcgcccgcgacctcgcgatcacgtaacaccgcccgtcccccgtatcccgcgcacgcgcccaaaccgtcgacctttatacgctcccgaacgactccgaacgaaccgaaacgaatcgaaaactacacacgcgcacactcgcacgcgcgcacacgcgtacactcccctctcacgtaacaacgaaaaacaaaaaaaaaaaacgaaccacctacaaacattaccaaaaatacatatacgcatacgcgaaaaaaaaaaccccgcgaactcaacttcccacaataccccgcgtccgaaaatacctatcgcttaaaaacgaaataactccaaacgaactcacacgattttctaaaaaacataaaaaaaaaccgaatccaccaatat

SEQ ID NO: 35745 - DNA, 516 bp, Artificial Sequence
  chemically treated genomic DNA (Homo sapiens) CpG-island No: 35745
  unsure (75)
ttaaatttttttcgatatttatatttagcgtttcgtcgtcgttcgttttataggttttattttattttttggttnttattttcgcgcgtttttagagttttcgtttgaggtcgtttttcgcgtatgcgtttaggtcggtttttaggtttttttcgttttagtcggtaagtagttcgttcgcgttggggttacgcgagtcggttcgtagcggggttatcgcgatttcgggcgtagatatagaggtcgtttttagtttcgtcgtttcgtggtttcggtttcgttgtacgtttttttatttttcggatttcgtagggtcgcggcggatacggttcgatcggggacgtgaacgcgtagaattatattttttagcgtttcgttcgcgttggaattatatttttcggggggttcggcggtgtattcgtcggggtcgcggattggaggttttcggttggaaaagttttttggcggttaattggggaggattggaagaaatttaggatggagttagtattgttg

SEQ ID NO: 35746 - DNA, 516 bp, Artificial Sequence
  chemically treated genomic DNA (Homo sapiens) CpG-island No: 35746
  unsure (442)
caacaatactaactccatcctaaatttcttccaatcctccccaattaaccgccaaaaaacttttccaaccgaaaacctccaatccgcgaccccgacgaatacaccgccgaaccccccgaaaaatataattccaacgcgaacgaaacgctaaaaaatataattctacgcgttcacgtccccgatcgaaccgtatccgccgcgaccctacgaaatccgaaaaataaaaaaacgtacaacgaaaccgaaaccacgaaacgacgaaactaaaaacgacctctatatctacgcccgaaatcgcgataaccccgctacgaaccgactcgcgtaaccccaacgcgaacgaactacttaccgactaaaacgaaaaaaacctaaaaaccgacctaaacgcatacgcgaaaaacgacctcaaacgaaaactctaaaaacgcgcgaaaataanaaccaaaaaataaaataaaacctataaaacgaacgacgacgaaacgctaaatataaatatcgaaaaaaatttaa

SEQ ID NO: 35747 - DNA, 516 bp, Artificial Sequence
  chemically treated genomic DNA (Homo sapiens) CpG-island No: 35747
  unsure (442)
tagtagtgttggttttattttagattttttttagttttttttagttagtcgttaaggggtttttttaatcggaaatttttaattcgcgatttcggcgggtgtatcgtcgagtttttcggaaagtgtagttttagcgcgagcgggacgttgggaaatgtagttttgcgcgtttacgttttcgatcgggtcgtgttcgtcgcggttttgcgaggttcgaggggtaagggagcgtgtagcggggtcgggattacgaggcggcggggttgagggcggtttttgtgtttgcgttcgggatcgcggtgatttcgttgcggatcggttcgcgtgattttagcgcgaacgagttgtttgtcggttggggcgagaaaggtttggggatcggtttgggcgtatgcgcgaaaggcggttttaggcgggggttttgggggcgcgcgggggtggnagttaaagggtggggtggggtttgtagggcgggcggcggcggggcgttgaatgtgggtgtcgggggagatttgg

SEQ ID NO: 35748 - DNA, 516 bp, Artificial Sequence
  chemically treated genomic DNA (Homo sapiens) CpG-island No: 35748
  unsure (75)
ccaaatctcccccgacacccacattcaacgccccgccgccgcccgccctacaaaccccaccccaccctttaactnccacccccgcgcgcccccaaaacccccgcctaaaaccgcctttcgcgcatacgcccaaaccgatccccaaacctttctcgccccaaccgacaaacaactcgttcgcgctaaaatcacgcgaaccgatccgcaacgaaatcaccgcgatcccgaacgcaaacacaaaaaccgccctcaaccccgccgcctcgtaatcccgaccccgctacacgctcccttacccctcgaacctcgcaaaaccgcgacgaacacgacccgatcgaaaacgtaaacgcgcaaaactacatttcccaacgtcccgctcgcgctaaaactacactttccgaaaaactcgacgatacacccgccgaaatcgcgaattaaaaatttccgattaaaaaaaccccttaacgactaactaaaaaaaactaaaaaaaatctaaaataaaaccaacactacta

SEQ ID NO: 35749 - DNA, 1404 bp, Artificial Sequence
  chemically treated genomic DNA (Homo sapiens) CpG-island No: 35749
atgcgggggcggcggttgggggttcgggatgtggaggtgaggttcgaggtgcggggatcgggttgcgggggcgaggttttaggtgcgggggatgtaggagtcgggtgcggggtcgaggttttaggtgcgggagatgtaggagtcgggtgcgggggcgaggttttaggtgtgggagatgtaggagtcgggtgcgggggcgaggttttaggtgtaagggatgtaggagtcgggtgcgggggcgaggttttaggtgcgggagatgtaggagtcgggtgcgggggcgaggttttaggtgtgggagatgtaggagtcgggtgcgggggcgaggttttaggtgcgggagatgtagaagtcgggtgcgggggcgaggttttaggtgtgggagatgtaggagtcgggtgcgggggcgaggttttaggtgcgggggatgtaggagtcgggtgcgggggcgaggttttaggtgtgggagatgtaggagtcgggtgcgggggcgaggttttaggtgcgggggatgtaggagtcgggtgcgggggcgaggttttaggtttgggagatgtaggagtttggggtgtaggggtcggggtgcgggggcgatgtattaggtgtggggggtgcggggtcggggggaagcgttgaggttcgatttgtcggggttgtagggtcggggtgcgggggtgtaggggtcggggtgcgggggcgaggttttaggtgtaggggtcggggtgagaggttgaggtttgagttgtcgggggtgcgggggcggaggttttcgtattggcggtcgtgcgtgagattgcggggatttgagagttttgtaggagggttttcgggatttttcgtattatttacgcggtcgcggggcgcgatttttgcggagggcgagggttttttttcgcgttcgtcgtcgttgcgttgcgttttcgggagttttgggagtcggacgttgggaagaggacggaatttcggaggattttaagtgaggcggcgatcgcgacggtcgggttttgcgaggttcgggggttttcgcgggtgttggcggttcggtttttggtatttgtggagggaaaggggcggcggggcggtggcgttttgggatggatgttttcgtcgtttttagtttcggcggtttttagggtaaagtcggttgtatttttgcgtagtttgttttttgagcgttttttttttcgtttttaagttgtggttagagagatttcgttcgtatagaatgtatcgtttaacggtttttaggcgtgtggcgcggtggtggtttttacgtgtacggcgtggttttgagtttagcgtcggagggacgttaggtggaagcgtttttggtagagttggtagcgaatcggagaggtgatttttagcgagtgtggttattggaagtatatatttgttttttga

SEQ ID NO: 35750 - DNA, 1404 bp, Artificial Sequence
  chemically treated genomic DNA (Homo sapiens) CpG-island No: 35750
tcaaaaaacaaatatatacttccaataaccacactcgctaaaaatcacctctccgattcgctaccaactctaccaaaaacgcttccacctaacgtccctccgacgctaaactcaaaaccacgccgtacacgtaaaaaccaccaccgcgccacacgcctaaaaaccgttaaacgatacattctatacgaacgaaatctctctaaccacaacttaaaaacgaaaaaaaaaacgctcaaaaaacaaactacgcaaaaatacaaccgactttaccctaaaaaccgccgaaactaaaaacgacgaaaacatccatcccaaaacgccaccgccccgccgcccctttccctccacaaataccaaaaaccgaaccgccaacacccgcgaaaacccccgaacctcgcaaaacccgaccgtcgcgatcgccgcctcacttaaaatcctccgaaattccgtcctcttcccaacgtccgactcccaaaactcccgaaaacgcaacgcaacgacgacgaacgcgaaaaaaaaccctcgccctccgcaaaaatcgcgccccgcgaccgcgtaaataatacgaaaaatcccgaaaaccctcctacaaaactctcaaatccccgcaatctcacgcacgaccgccaatacgaaaacctccgcccccgcacccccgacaactcaaacctcaacctctcaccccgacccctacacctaaaacctcgcccccgcaccccgacccctacacccccgcaccccgaccctacaaccccgacaaatcgaacctcaacgcttccccccgaccccgcaccccccacacctaatacatcgcccccgcaccccgacccctacaccccaaactcctacatctcccaaacctaaaacctcgcccccgcacccgactcctacatcccccgcacctaaaacctcgcccccgcacccgactcctacatctcccacacctaaaacctcgcccccgcacccgactcctacatcccccgcacctaaaacctcgcccccgcacccgactcctacatctcccacacctaaaacctcgcccccgcacccgacttctacatctcccgcacctaaaacctcgcccccgcacccgactcctacatctcccacacctaaaacctcgcccccgcacccgactcctacatctcccgcacctaaaacctcgcccccgcacccgactcctacatcccttacacctaaaacctcgcccccgcacccgactcctacatctcccacacctaaaacctcgcccccgcacccgactcctacatctcccgcacctaaaacctcgaccccgcacccgactcctacatcccccgcacctaaaacctcgcccccgcaacccgatccccgcacctcgaacctcacctccacatcccgaacccccaaccgccgcccccgcat

SEQ ID NO: 35751 - DNA, 1404 bp, Artificial Sequence
  chemically treated genomic DNA (Homo sapiens) CpG-island No: 35751
ttagaaagtaagtgtgtgtttttaataattatattcgttggaaattattttttcgattcgttattagttttgttaaagacgtttttatttaacgttttttcggcgttgagtttaggattacgtcgtgtacgtgggaattattatcgcgttatacgtttaaaaatcgttgagcggtatattttatgcgagcggggtttttttggttataatttaaaaacgaaaagaaaagcgtttagagaataggttgcgtaggggtgtagtcggttttgttttggaggtcgtcggggttgaagacggcgagagtatttattttaggacgttatcgtttcgtcgtttttttttttttataggtgttaagggtcgggtcgttagtattcgcgaggattttcgggtttcgtagagttcggtcgtcgcggtcgtcgttttatttggggtttttcggagtttcgttttttttttaacgttcggtttttaaggttttcgggggcgtagcgtagcggcggcggacgcgggaaggggttttcgtttttcgtagagatcgcgtttcgcggtcgcgtgggtagtgcgggaggtttcgaaggtttttttgtagagtttttaggttttcgtagttttacgtacggtcgttaatgcggagattttcgttttcgtattttcggtaatttaggttttagttttttatttcggtttttgtatttgggatttcgttttcgtatttcggtttttgtattttcgtatttcggttttatagtttcggtaagtcgggttttagcgttttttttcggtttcgtattttttatatttgatatatcgttttcgtatttcggtttttgtattttaggtttttgtattttttaaatttgggatttcgttttcgtattcggtttttgtatttttcgtatttgggatttcgttttcgtattcggtttttgtattttttatatttgggatttcgttttcgtattcggtttttgtatttttcgtatttgggatttcgttttcgtattcggtttttgtattttttatatttgggatttcgttttcgtattcggtttttgtatttttcgtatttgggatttcgttttcgtattcggtttttgtattttttatatttgggatttcgttttcgtattcggtttttgtatttttcgtatttgggatttcgttttcgtattcggtttttgtattttttgtatttgggatttcgttttcgtattcggtttttgtattttttatatttgggatttcgttttcgtattcggtttttgtatttttcgtatttgggatttcgatttcgtattcggtttttgtatttttcgtatttgggatttcgttttcgtaattcggttttcgtatttcgagttttatttttatatttcggatttttagtcgtcgttttcgtat

SEQ ID NO: 35752 - DNA, 1404 bp, Artificial Sequence
  chemically treated genomic DNA (Homo sapiens) CpG-island No: 35752
atacgaaaacgacgactaaaaatccgaaatataaaaataaaactcgaaatacgaaaaccgaattacgaaaacgaaatcccaaatacgaaaaatacaaaaaccgaatacgaaatcgaaatcccaaatacgaaaaatacaaaaaccgaatacgaaaacgaaatcccaaatataaaaaatacaaaaaccgaatacgaaaacgaaatcccaaatacaaaaaatacaaaaaccgaatacgaaaacgaaatcccaaatacgaaaaatacaaaaaccgaatacgaaaacgaaatcccaaatataaaaaatacaaaaaccgaatacgaaaacgaaatcccaaatacgaaaaatacaaaaaccgaatacgaaaacgaaatcccaaatataaaaaatacaaaaaccgaatacgaaaacgaaatcccaaatacgaaaaatacaaaaaccgaatacgaaaacgaaatcccaaatataaaaaatacaaaaaccgaatacgaaaacgaaatcccaaatacgaaaaatacaaaaaccgaatacgaaaacgaaatcccaaatttaaaaaatacaaaaacctaaaatacaaaaaccgaaatacgaaaacgatatatcaaatataaaaaatacgaaaccgaaaaaaaacgctaaaacccgacttaccgaaactataaaaccgaaatacgaaaatacaaaaaccgaaatacgaaaacgaaatcccaaatacaaaaaccgaaataaaaaactaaaacctaaattaccgaaaatacgaaaacgaaaatctccgcattaacgaccgtacgtaaaactacgaaaacctaaaaactctacaaaaaaaccttcgaaacctcccgcactacccacgcgaccgcgaaacgcgatctctacgaaaaacgaaaaccccttcccgcgtccgccgccgctacgctacgcccccgaaaaccttaaaaaccgaacgttaaaaaaaaaacgaaactccgaaaaaccccaaataaaacgacgaccgcgacgaccgaactctacgaaacccgaaaatcctcgcgaatactaacgacccgacccttaacacctataaaaaaaaaaaaacgacgaaacgataacgtcctaaaataaatactctcgccgtcttcaaccccgacgacctccaaaacaaaaccgactacacccctacgcaacctattctctaaacgcttttcttttcgtttttaaattataaccaaaaaaaccccgctcgcataaaatataccgctcaacgatttttaaacgtataacgcgataataattcccacgtacacgacgtaatcctaaactcaacgccgaaaaaacgttaaataaaaacgtctttaacaaaactaataacgaatcgaaaaaataatttccaacgaatataattattaaaaacacacacttactttctaa

SEQ ID NO: 35753 - DNA, 637 bp, Artificial Sequence
  chemically treated genomic DNA (Homo sapiens) CpG-island No: 35753
gcgcgttggtaattatgtcgtttattgtcgtaacggtattgacgttattgttttttagaattttcgatattatacgtaaggttggatttgtttgtagtatcggtttacgcgtggtttgggtttttgcgtttaaacgaaaaatgtcgtcgttatcgcgttgtatttcgttgttcgtggtttttattagtttaagacgttttattggcgtaatcgtatttgtcggatcgttcggattgagcgtcgagattgtgttatcggtagtaatagtgattttcgtttttttcggatagtaattggtttagtttcgtttattatcggatgtttttgaattgttagttgttcggtgggattaatttgaatgttgttattacgcgtatatttttcgttgtcgttagcggtttgtacggttagtttagttattttgttgtaacgcgaacgtttatcggtcgttaggtgtaattaattttgtcggtcgtaatatttgcgttcgtcggtgacgttcggaataaacgtggtcgtgggtcgagaaagtttttttatttggaatcggcggtaaataattaaatggttcgttaaaatcgggcgttggaggtattggttaaataattgggggtaatcgttcggggaataaaagggt

SEQ ID NO: 35754 - DNA, 637 bp, Artificial Sequence
  chemically treated genomic DNA (Homo sapiens) CpG-island No: 35754
acccttttattccccgaacgattacccccaattatttaaccaatacctccaacgcccgattttaacgaaccatttaattatttaccgccgattccaaataaaaaaactttctcgacccacgaccacgtttattccgaacgtcaccgacgaacgcaaatattacgaccgacaaaattaattacacctaacgaccgataaacgttcgcgttacaacaaaataactaaactaaccgtacaaaccgctaacgacaacgaaaaatatacgcgtaataacaacattcaaattaatcccaccgaacaactaacaattcaaaaacatccgataataaacgaaactaaaccaattactatccgaaaaaaacgaaaatcactattactaccgataacacaatctcgacgctcaatccgaacgatccgacaaatacgattacgccaataaaacgtcttaaactaataaaaaccacgaacaacgaaatacaacgcgataacgacgacatttttcgtttaaacgcaaaaacccaaaccacgcgtaaaccgatactacaaacaaatccaaccttacgtataatatcgaaaattctaaaaaacaataacgtcaataccgttacgacaataaacgacataattaccaacgcgc

SEQ ID NO: 35755 - DNA, 637 bp, Artificial Sequence
  chemically treated genomic DNA (Homo sapiens) CpG-island No: 35755
atttttttatttttcgggcggttatttttaattatttggttaatgtttttaacgttcggttttggcgggttatttaattgtttatcgtcggttttaaatgaaagggttttttcggtttacggttacgtttgtttcgggcgttatcggcgggcgtaaatattacggtcggtaaaattgattatatttggcggtcggtggacgttcgcgttgtagtagaatggttgggttggtcgtgtagatcgttgacggtagcgaagggtatacgcgtaatggtagtatttaggttgattttatcgggtaattgataatttaggggtattcggtgataggcgaggttgggttaattgttgttcggaaggggcggaaattattattgttgtcgatggtataatttcggcgtttaattcgggcgattcggtaaatacggttgcgttagtagggcgttttaaattggtgaaagttacgggtagcgaagtgtagcgcggtgacgacggtatttttcgtttaagcgtagaaatttaggttacgcgtgggtcggtattgtaggtagatttaattttgcgtgtgatgtcgggggttttggaaggtagtaacgttaatgtcgttgcggtaatgagcgatatgattgttagcgcgt

SEQ ID NO: 35756 - DNA, 637 bp, Artificial Sequence
  chemically treated genomic DNA (Homo sapiens) CpG-island No: 35756
acgcgctaacaatcatatcgctcattaccgcaacgacattaacgttactaccttccaaaacccccgacatcacacgcaaaattaaatctacctacaataccgacccacgcgtaacctaaatttctacgcttaaacgaaaaataccgtcgtcaccgcgctacacttcgctacccgtaactttcaccaatttaaaacgccctactaacgcaaccgtatttaccgaatcgcccgaattaaacgccgaaattataccatcgacaacaataataatttccgccccttccgaacaacaattaacccaacctcgcctatcaccgaatacccctaaattatcaattacccgataaaatcaacctaaatactaccattacgcgtatacccttcgctaccgtcaacgatctacacgaccaacccaaccattctactacaacgcgaacgtccaccgaccgccaaatataatcaattttaccgaccgtaatatttacgcccgccgataacgcccgaaacaaacgtaaccgtaaaccgaaaaaaccctttcatttaaaaccgacgataaacaattaaataacccgccaaaaccgaacgttaaaaacattaaccaaataattaaaaataaccgcccgaaaaataaaaaaat

SEQ ID NO: 35757 - DNA, 513 bp, Artificial Sequence
  chemically treated genomic DNA (Homo sapiens) CpG-island No: 35757
aatgcgcgtgttcggtaaagttttcgcgttttttttttttaagttatttcgttagtttcggttttttttattttttttcgtttttgtcgttttttcgtcgtgggacgtttttcgtttattttcgttagagtttagtttgcgcgcgggatttagttgttattttattttttttcgtcgtttttttattttttttttcgaattcgcggggtagttcgttcgagcgcgtttcgttttcgttttttcgcggtcgcgcgtcggaggaggaggggcggggggaggagggacgcgcggcgtcgtatggtcgacgtggggttcgttttcgcggtttttttcgggcgggcgcgtaggtacgtatttgcgggtgcgcgcgcggacggtcgggcggcggcggttttcggaggtggtggttttattttttaggatttaggggtagttatagcgatatcgcggtagtagttttaggagtcggagttggaacggtcgggggcggcggtagcggcggcgttgagggtg

SEQ ID NO: 35758 - DNA, 513 bp, Artificial Sequence
  chemically treated genomic DNA (Homo sapiens) CpG-island No: 35758
caccctcaacgccgccgctaccgccgcccccgaccgttccaactccgactcctaaaactactaccgcgatatcgctataactacccctaaatcctaaaaaataaaaccaccacctccgaaaaccgccgccgcccgaccgtccgcgcgcgcacccgcaaatacgtacctacgcgcccgcccgaaaaaaaccgcgaaaacgaaccccacgtcgaccatacgacgccgcgcgtccctcctccccccgcccctcctcctccgacgcgcgaccgcgaaaaaacgaaaacgaaacgcgctcgaacgaactaccccgcgaattcgaaaaaaaaaataaaaaaacgacgaaaaaaaataaaataacaactaaatcccgcgcgcaaactaaactctaacgaaaataaacgaaaaacgtcccacgacgaaaaaacgacaaaaacgaaaaaaaataaaaaaaaccgaaactaacgaaataacttaaaaaaaaaaaacgcgaaaactttaccgaacacgcgcatt

SEQ ID NO: 35759 - DNA, 513 bp, Artificial Sequence
  chemically treated genomic DNA (Homo sapiens) CpG-island No: 35759
tatttttagcgtcgtcgttgtcgtcgttttcggtcgttttagtttcggtttttgaggttgttgtcgcggtgtcgttgtggttgtttttgagttttggaaagtgaagttattattttcgggagtcgtcgtcgttcggtcgttcgcgcgcgtattcgtagatgcgtgtttgcgcgttcgttcgggagagatcgcgagagcgagttttacgtcggttatgcggcgtcgcgcgtttttttttttttcgttttttttttttcggcgcgcggtcgcgagggggcgggggcgggacgcgttcgggcgggttgtttcgcggattcgggagagggggtggggaggcggcgaggaaaagtaaagtgatagttgggtttcgcgcgtagattgggttttgacgggggtgagcgaggggcgttttacggcgaaggaacgataaggacggggagaagtgggggaaatcgaggttgacggggtggtttgaggggaggggacgcgaggattttgtcgggtacgcgtatt

SEQ ID NO: 35760 - DNA, 513 bp, Artificial Sequence
  chemically treated genomic DNA (Homo sapiens) CpG-island No: 35760
aatacgcgtacccgacaaaatcctcgcgtcccctcccctcaaaccaccccgtcaacctcgatttcccccacttctccccgtccttatcgttccttcgccgtaaaacgcccctcgctcacccccgtcaaaacccaatctacgcgcgaaacccaactatcactttacttttcctcgccgcctccccaccccctctcccgaatccgcgaaacaacccgcccgaacgcgtcccgcccccgccccctcgcgaccgcgcgccgaaaaaaaaaaaacgaaaaaaaaaaaaacgcgcgacgccgcataaccgacgtaaaactcgctctcgcgatctctcccgaacgaacgcgcaaacacgcatctacgaatacgcgcgcgaacgaccgaacgacgacgactcccgaaaataataacttcactttccaaaactcaaaaacaaccacaacgacaccgcgacaacaacctcaaaaaccgaaactaaaacgaccgaaaacgacgacaacgacgacgctaaaaata

SEQ ID NO: 35761 - DNA, 509 bp, Artificial Sequence
  chemically treated genomic DNA (Homo sapiens) CpG-island No: 35761
cgtaagttgtaattgagtttcgcggcggtggtgtttgtatcgtatagcgcgagtagtaggagtaggtggaggcgtattttgagatttcgcgttatcgagatgtggagagatcgaaaggtagcgttgtaagggatcggcggtgaagttatttattttttcggaagtagtcgaggttttaggttttcgtttcggtttcgtttttaggttagttgagcgtttttcgggcgtagtcgcgggcgggaggggaacgaggaggttgcgtttgtattcgttgaaagtcgggcgtcgcgggtgcgggagttgtagttttcgagaatagttataggttggggggtattgcggtttgagttttttttcggcgttttttttcgtcgttttagtatatataattggaggtaagaattttgtacggtaattgggatagaaagatttttgggcgcgtagtggtataaagtttcgggagattagagatcgattgtacgtggagattatagttggagagttttttt

SEQ ID NO: 35762 - DNA, 509 bp, Artificial Sequence
  chemically treated genomic DNA (Homo sapiens) CpG-island No: 35762
aaaaaaactctccaactataatctccacgtacaatcgatctctaatctcccgaaactttataccactacgcgcccaaaaatctttctatcccaattaccgtacaaaattcttacctccaattatatatactaaaacgacgaaaaaaaacgccgaaaaaaaactcaaaccgcaataccccccaacctataactattctcgaaaactacaactcccgcacccgcgacgcccgactttcaacgaatacaaacgcaacctcctcgttcccctcccgcccgcgactacgcccgaaaaacgctcaactaacctaaaaacgaaaccgaaacgaaaacctaaaacctcgactacttccgaaaaaataaataacttcaccgccgatcccttacaacgctacctttcgatctctccacatctcgataacgcgaaatctcaaaatacgcctccacctactcctactactcgcgctatacgatacaaacaccaccgccgcgaaactcaattacaacttacg

SEQ ID NO: 35763 - DNA, 509 bp, Artificial Sequence
  chemically treated genomic DNA (Homo sapiens) CpG-island No: 35763
gaggggattttttagttatggtttttacgtatagtcggtttttgatttttcgaggttttgtgttattgcgcgtttagggatttttttgttttaattatcgtgtaagatttttgtttttagttgtatgtattgaggcggcgggaagaagcgtcgagggaaggtttagatcgtaatgttttttagtttgtagttattttcgggggttgtagttttcgtattcgcgacgttcggtttttagcgggtgtaggcgtagttttttcgtttttttttcgttcgcggttgcgttcggagagcgtttagttgatttaggggcggggtcggggcggggatttaaagtttcggttattttcgagggggtgagtggttttatcgtcggttttttgtagcgttgtttttcgatttttttatatttcggtggcgcgggattttaagatgcgtttttatttgtttttgttgttcgcgttgtgcggtgtaggtattatcgtcgcggagtttagttatagtttgcg

SEQ ID NO: 35764 - DNA, 509 bp, Artificial Sequence
  chemically treated genomic DNA (Homo sapiens) CpG-island No: 35764
cgcaaactataactaaactccgcgacgataatacctacaccgcacaacgcgaacaacaaaaacaaataaaaacgcatcttaaaatcccgcgccaccgaaatataaaaaaatcgaaaaacaacgctacaaaaaaccgacgataaaaccactcaccccctcgaaaataaccgaaactttaaatccccgccccgaccccgcccctaaatcaactaaacgctctccgaacgcaaccgcgaacgaaaaaaaaacgaaaaaactacgcctacacccgctaaaaaccgaacgtcgcgaatacgaaaactacaacccccgaaaataactacaaactaaaaaacattacgatctaaaccttccctcgacgcttcttcccgccgcctcaatacatacaactaaaaacaaaaatcttacacgataattaaaacaaaaaaatccctaaacgcgcaataacacaaaacctcgaaaaatcaaaaaccgactatacgtaaaaaccataactaaaaaatcccctc

SEQ ID NO: 35765 - DNA, 526 bp, Artificial Sequence
  chemically treated genomic DNA (Homo sapiens) CpG-island No: 35765
ttttttttgcgtttttgggaagtggatattagtcgtcgtattagtttcgattcgtcgttgtcggtataggtattggaagttagttcgaaaggttattatatttaattagtggtgtagtcgttggggtggtataacgaatcgttgacggtcgtgatgtatggcgacgatgtttcgtagcgtggcgagcgtttattcgttggtttgtaatatgcgcggttgtataacggcgacgagcgtatcgaaattcgcgatgaggaatttgttttcgtataaagcgtttgataggttgagtgaatgttaaacgttcggaggcgtttttcgcgattcgggttttttaatggtaaggtttgtaatttgtagatttgataagacgcgtaaagcgtcgtattaggtatggcgtacgattgtcggatgcggcgtgaacgttttattcggtttatatttcgtttataaatcgtaggtttgataagacgcgtatagcgtcgtattaggtatttgcgtacgatttatttatgtttattatatt

SEQ ID NO: 35766 - DNA, 526 bp, Artificial Sequence
  chemically treated genomic DNA (Homo sapiens) CpG-island No: 35766
aatataataaacataaataaatcgtacgcaaatacctaatacgacgctatacgcgtcttatcaaacctacgatttataaacgaaatataaaccgaataaaacgttcacgccgcatccgacaatcgtacgccatacctaatacgacgctttacgcgtcttatcaaatctacaaattacaaaccttaccattaaaaaacccgaatcgcgaaaaacgcctccgaacgtttaacattcactcaacctatcaaacgctttatacgaaaacaaattcctcatcgcgaatttcgatacgctcgtcgccgttatacaaccgcgcatattacaaaccaacgaataaacgctcgccacgctacgaaacatcgtcgccatacatcacgaccgtcaacgattcgttataccaccccaacgactacaccactaattaaatataataacctttcgaactaacttccaatacctataccgacaacgacgaatcgaaactaatacgacgactaatatccacttcccaaaaacgcaaaaaaaa

SEQ ID NO: 35767 - DNA, 526 bp, Artificial Sequence
  chemically treated genomic DNA (Homo sapiens) CpG-island No: 35767
gatgtggtaaatatagataagtcgtgcgtagatgtttgatgcgacgttatgcgcgttttattaggtttacggtttatgggcgaagtgtagatcggataaggcgtttacgtcgtattcggtagtcgtgcgttatgtttgatgcgacgttttgcgcgttttattaggtttataggttataaattttgttattaaaaagttcggatcgcgggaagcgttttcgggcgtttaatatttatttaatttattaggcgttttgtgcgagagtaagttttttatcgcgggtttcgatacgttcgtcgtcgttatatagtcgcgtatgttgtagattaacgaataaacgttcgttacgttgcggggtatcgtcgttatgtattacgatcgttagcggttcgttgtattattttagcggttgtattattaattgggtgtagtgatttttcgggttggtttttagtatttgtatcggtagcggcgaatcgaggttggtacggcggttgatatttattttttaagggcgtaggaagag

SEQ ID NO: 35768 - DNA, 526 bp, Artificial Sequence
  chemically treated genomic DNA (Homo sapiens) CpG-island No: 35768
ctcttcctacgcccttaaaaaataaatatcaaccgccgtaccaacctcgattcgccgctaccgatacaaatactaaaaaccaacccgaaaaatcactacacccaattaataatacaaccgctaaaataatacaacgaaccgctaacgatcgtaatacataacgacgataccccgcaacgtaacgaacgtttattcgttaatctacaacatacgcgactatataacgacgacgaacgtatcgaaacccgcgataaaaaacttactctcgcacaaaacgcctaataaattaaataaatattaaacgcccgaaaacgcttcccgcgatccgaactttttaataacaaaatttataacctataaacctaataaaacgcgcaaaacgtcgcatcaaacataacgcacgactaccgaatacgacgtaaacgccttatccgatctacacttcgcccataaaccgtaaacctaataaaacgcgcataacgtcgcatcaaacatctacgcacgacttatctatatttaccacatc

SEQ ID NO: 35769 - DNA, 613 bp, Artificial Sequence
  chemically treated genomic DNA (Homo sapiens) CpG-island No: 35769
ggagtcgcgggtcgagggggttgtcgcgggtcgaggggttgtcgcgggtcgaggggtagttcggagcgggacgcggttcggttggtcgggttttttttagggtcggggaaggcgcggcgttggattcgcggggaggttatttattagttcgagcgcgaagaagacggcgagtagggcgaggtaggagtttatgacgatgagtagtaggaagacgatgagcgggtgttgttggtttatgtagtagtaggattcgtagagttagtttcgggatcgcggtagttcgttttcgtcgttcgtcgttttttcggagcggtttcgtaggtagtaggcggcgtcgtatcgtttttttgttttatatcggggtcgtttatagaggcgtttagtcgtgcgcgttcggttcgggtagcgtcgttcgtcgcggtcgttttgtgttttattttcgcgttcgttttaggttcggttcggattgtcggttattcggagttgcgtttaagggattttcgtgtacgggacggtatattcggaagttttcgagtttgtagacgcgattgtaacgtatcgtgatacgataggttattggaaagaaggaattattgatttatattcgattaaa

SEQ ID NO: 35770 - DNA, 613 bp, Artificial Sequence
  chemically treated genomic DNA (Homo sapiens) CpG-island No: 35770
tttaatcgaatataaatcaataattccttctttccaataacctatcgtatcacgatacgttacaatcgcgtctacaaactcgaaaacttccgaatataccgtcccgtacacgaaaatcccttaaacgcaactccgaataaccgacaatccgaaccgaacctaaaacgaacgcgaaaataaaacacaaaacgaccgcgacgaacgacgctacccgaaccgaacgcgcacgactaaacgcctctataaacgaccccgatataaaacaaaaaaacgatacgacgccgcctactacctacgaaaccgctccgaaaaaacgacgaacgacgaaaacgaactaccgcgatcccgaaactaactctacgaatcctactactacataaaccaacaacacccgctcatcgtcttcctactactcatcgtcataaactcctacctcgccctactcgccgtcttcttcgcgctcgaactaataaataacctccccgcgaatccaacgccgcgccttccccgaccctaaaaaaaacccgaccaaccgaaccgcgtcccgctccgaactacccctcgacccgcgacaacccctcgacccgcgacaaccccctcgacccgcgactcc

SEQ ID NO: 35771 - DNA, 613 bp, Artificial Sequence
  chemically treated genomic DNA (Homo sapiens) CpG-island No: 35771
tttggtcgaatgtgagttagtagttttttttttttagtgatttatcgtgttacgatacgttatagtcgcgtttgtagattcggggattttcgagtatgtcgtttcgtgtacggaggttttttgagcgtagtttcgggtagtcggtagttcgggtcggatttgaggcggacgcgagggtgggatatagggcggtcgcggcgagcggcgttgttcgggtcgggcgcgtacggttgggcgtttttgtgagcggtttcgatgtaggataggaggacgatgcggcgtcgtttgttatttgcgggatcgtttcgaggaggcggcgggcggcggagacgggttgtcgcggtttcgggattggttttacgagttttattattgtatgagttagtagtattcgtttatcgtttttttgttgtttatcgttatgggtttttgtttcgttttgttcgtcgtttttttcgcgttcgggttggtgagtggttttttcgcgggtttagcgtcgcgtttttttcggttttgagaggagttcggttagtcgagtcgcgtttcgtttcgggttgtttttcggttcgcggtagtttttcggttcgcggtagttttttcggttcgcggtttt

SEQ ID NO: 35772 - DNA, 613 bp, Artificial Sequence
  chemically treated genomic DNA (Homo sapiens) CpG-island No: 35772
aaaaccgcgaaccgaaaaaactaccgcgaaccgaaaaactaccgcgaaccgaaaaacaacccgaaacgaaacgcgactcgactaaccgaactcctctcaaaaccgaaaaaaacgcgacgctaaacccgcgaaaaaaccactcaccaacccgaacgcgaaaaaaacgacgaacaaaacgaaacaaaaacccataacgataaacaacaaaaaaacgataaacgaatactactaactcatacaataataaaactcgtaaaaccaatcccgaaaccgcgacaacccgtctccgccgcccgccgcctcctcgaaacgatcccgcaaataacaaacgacgccgcatcgtcctcctatcctacatcgaaaccgctcacaaaaacgcccaaccgtacgcgcccgacccgaacaacgccgctcgccgcgaccgccctatatcccaccctcgcgtccgcctcaaatccgacccgaactaccgactacccgaaactacgctcaaaaaacctccgtacacgaaacgacatactcgaaaatccccgaatctacaaacgcgactataacgtatcgtaacacgataaatcactaaaaaaaaaaaactactaactcacattcgaccaaa

SEQ ID NO: 35773 - DNA, 521 bp, Artificial Sequence
  chemically treated genomic DNA (Homo sapiens) CpG-island No: 35773
cgatacgattttagtattttaaattgttcgatgacgtttagtatttttttttttttatttcgtgattatatttcgttattagtgttgtattggtttttcggattaatttgtaatgacgagaattttattattaaggcgggtgtttagcgggtagcggcggaattggggattgtattggtgatgttagatattagttcgcgcggcgaaaaggttgttaacgacgatggttacgatttaggttaggcgtaggtttttattttaatgttacgtaatcgtcgtgggcgacgtattatcggatgtatgatatttgcgcgatgaatatcggcgttggtttagtcgtaatttaatgttagcgatcgttgcgttattagcggttatttaatgggtggttacggtgcgttgattatggcgttgaaaaattcgggtaaatatattagcgtttcggtttttgcgttaattgtgaattcgtgtagcgtttcgtggggaattaaagcgtttagtagttatttaggtgaggataa

SEQ ID NO: 35774 - DNA, 521 bp, Artificial Sequence
  chemically treated genomic DNA (Homo sapiens) CpG-island No: 35774
ttatcctcacctaaataactactaaacgctttaattccccacgaaacgctacacgaattcacaattaacgcaaaaaccgaaacgctaatatatttacccgaatttttcaacgccataatcaacgcaccgtaaccacccattaaataaccgctaataacgcaacgatcgctaacattaaattacgactaaaccaacgccgatattcatcgcgcaaatatcatacatccgataatacgtcgcccacgacgattacgtaacattaaaataaaaacctacgcctaacctaaatcgtaaccatcgtcgttaacaaccttttcgccgcgcgaactaatatctaacatcaccaatacaatccccaattccgccgctacccgctaaacacccgccttaataataaaattctcgtcattacaaattaatccgaaaaaccaatacaacactaataacgaaatataatcacgaaataaaaaaaaaaaaatactaaacgtcatcgaacaatttaaaatactaaaatcgtatcg

SEQ ID NO: 35775 - DNA, 521 bp, Artificial Sequence
  chemically treated genomic DNA (Homo sapiens) CpG-island No: 35775
ttgtttttatttaaatagttgttaaacgttttgattttttacgggacgttgtacggatttataattggcgtaaaggtcgaaacgttggtgtatttattcggattttttagcgttataattagcgtatcgtgattatttattgagtgatcgttaatggcgtagcggtcgttgatattaaattgcgattgaattagcgtcggtatttatcgcgtagatattatatattcggtaatgcgtcgtttacggcggttgcgtggtattaagataaaagtttgcgtttggtttaaatcgtagttatcgtcgttggtaattttttcgtcgcgcgggttggtgtttggtattattagtataatttttagtttcgtcgttattcgttgggtattcgttttggtggtgaagttttcgttattgtaggttaattcggaaagttagtatagtattggtggcggagtgtgattacgaggtggagggagaaagatattgaacgttatcgggtagtttaaggtattggagtcgtgtcg

SEQ ID NO: 35776 - DNA, 521 bp, Artificial Sequence
  chemically treated genomic DNA (Homo sapiens) CpG-island No: 35776
cgacacgactccaataccttaaactacccgataacgttcaatatctttctccctccacctcgtaatcacactccgccaccaatactatactaactttccgaattaacctacaataacgaaaacttcaccaccaaaacgaatacccaacgaataacgacgaaactaaaaattatactaataataccaaacaccaacccgcgcgacgaaaaaattaccaacgacgataactacgatttaaaccaaacgcaaacttttatcttaataccacgcaaccgccgtaaacgacgcattaccgaatatataatatctacgcgataaataccgacgctaattcaatcgcaatttaatatcaacgaccgctacgccattaacgatcactcaataaataatcacgatacgctaattataacgctaaaaaatccgaataaatacaccaacgtttcgacctttacgccaattataaatccgtacaacgtcccgtaaaaaatcaaaacgtttaacaactatttaaataaaaacaa

SEQ ID NO: 35777 - DNA, 534 bp, Artificial Sequence
  chemically treated genomic DNA (Homo sapiens) CpG-island No: 35777
cgtttaggatttagtcgcgttcgggcgtttcgattcggaggttggcggcgggtaggtacgttttttcgcgttgagagtttttttgcggagatgaattttcgagtgtcgtcgtcgcgcgcgggttcgatcgatatcggcgggcggacgtgttttcgtcgtcgatagtagttatagggcggtgtagttagttgttcggtcgttcggtcgtattttttattagtttaatattcgtagaggacgtgtatcggttttttttcggatatttatttcgtggttttcgtcgtattttttgtttatcgtttttttcgttcggtcgttcggcgtagagcgggagttttttagttagacgttttcgcgttgggggtagtcgggtttcggttcgagcggagggcgtcgtgaggtggttttttcgttcggttttttagtgggacgtttcgcggaggtagttaaggcggggagtgtcgagtttttttatattttggattttattttttggcgttttcgttcgggaggttgtagggggaggcggattta

SEQ ID NO: 35778 - DNA, 534 bp, Artificial Sequence
  chemically treated genomic DNA (Homo sapiens) CpG-island No: 35778
taaatccgcctccccctacaacctcccgaacgaaaacgccaaaaaataaaatccaaaatataaaaaaactcgacactccccgccttaactacctccgcgaaacgtcccactaaaaaaccgaacgaaaaaaccacctcacgacgccctccgctcgaaccgaaacccgactacccccaacgcgaaaacgtctaactaaaaaactcccgctctacgccgaacgaccgaacgaaaaaaacgataaacaaaaaatacgacgaaaaccacgaaataaatatccgaaaaaaaaccgatacacgtcctctacgaatattaaactaataaaaaatacgaccgaacgaccgaacaactaactacaccgccctataactactatcgacgacgaaaacacgtccgcccgccgatatcgatcgaacccgcgcgcgacgacgacactcgaaaattcatctccgcaaaaaaactctcaacgcgaaaaaacgtacctacccgccgccaacctccgaatcgaaacgcccgaacgcgactaaatcctaaacg

SEQ ID NO: 35779 - DNA, 534 bp, Artificial Sequence
  chemically treated genomic DNA (Homo sapiens) CpG-island No: 35779
tgggttcgtttttttttgtagtttttcgggcgaagacgttagaaggtaaggtttagagtgtgagggagttcgatatttttcgttttggttgttttcgcggagcgttttattggggagtcgggcgaaaaggttattttacgacgtttttcgttcgggtcgggattcggttgtttttaacgcgagggcgtttggttgaaaagttttcgttttgcgtcggacggtcgagcggaaggggcggtgggtagaaggtgcggcggagattacggggtgggtgttcgggagggaatcggtgtacgttttttgcgggtattgagttgatgagaagtgcgatcgagcggtcggatagttgattgtatcgttttgtggttgttgtcggcggcgggagtacgttcgttcgtcggtatcgatcgggttcgcgcgcggcggcgatattcgagagtttattttcgtagaagggtttttagcgcgggagagcgtgtttgttcgtcgttagttttcgagtcgggacgttcgagcgcggttgggttttgggcg

SEQ ID NO: 35780 - DNA, 534 bp, Artificial Sequence
  chemically treated genomic DNA (Homo sapiens) CpG-island No: 35780
cgcccaaaacccaaccgcgctcgaacgtcccgactcgaaaactaacgacgaacaaacacgctctcccgcgctaaaaacccttctacgaaaataaactctcgaatatcgccgccgcgcgcgaacccgatcgataccgacgaacgaacgtactcccgccgccgacaacaaccacaaaacgatacaatcaactatccgaccgctcgatcgcacttctcatcaactcaatacccgcaaaaaacgtacaccgattccctcccgaacacccaccccgtaatctccgccgcaccttctacccaccgccccttccgctcgaccgtccgacgcaaaacgaaaacttttcaaccaaacgccctcgcgttaaaaacaaccgaatcccgacccgaacgaaaaacgtcgtaaaataaccttttcgcccgactccccaataaaacgctccgcgaaaacaaccaaaacgaaaaatatcgaactccctcacactctaaaccttaccttctaacgtcttcgcccgaaaaactacaaaaaaaaacgaaccca

SEQ ID NO: 35781 - DNA, 573 bp, Artificial Sequence
  chemically treated genomic DNA (Homo sapiens) CpG-island No: 35781
ggtatacgcgtcgtggtaaggtaagcgagggcgttcggtttcggtatcgtttcgcgtcggttttcgtttttttttttttcgaaaggcggttttgtgttgttgcgtagcgcggcggttgggggtggggtttatcgcggttttcgatttcgttatcgcgagaagtcggttcgcgattttgtggtcgttttttttttttttttgtttttcggattcgggttgcggcgttacgtttttcgggtttcggtagcggtacgattcgttcgttttagttttagcgtttttcggttattttcggtttaggttcgtagcgtcgttcgttttcggtcgtttcgacgtcggtttgggcgtcggtcgtagtttcgggttcgcgtaggcgtcgatcgttttcggttcgttttttatgggtttcggttagaggcgtcgcgtcgtcggttcgcggagtttcgatgttggttcggaggaagtcggtgttgtcggcgtttattattaattttattatcgtcgagggtttattttttattagcgagggcgttttcgagtgagtgggtaggggttagtcggaggtttggggtg

SEQ ID NO: 35782 - DNA, 573 bp, Artificial Sequence
  chemically treated genomic DNA (Homo sapiens) CpG-island No: 35782
caccccaaacctccgactaacccctacccactcactcgaaaacgccctcgctaataaaaaataaaccctcgacgataataaaattaataataaacgccgacaacaccgacttcctccgaaccaacatcgaaactccgcgaaccgacgacgcgacgcctctaaccgaaacccataaaaaacgaaccgaaaacgatcgacgcctacgcgaacccgaaactacgaccgacgcccaaaccgacgtcgaaacgaccgaaaacgaacgacgctacgaacctaaaccgaaaataaccgaaaaacgctaaaactaaaacgaacgaatcgtaccgctaccgaaacccgaaaaacgtaacgccgcaacccgaatccgaaaaacaaaaaaaaaaaaaaaacgaccacaaaatcgcgaaccgacttctcgcgataacgaaatcgaaaaccgcgataaaccccacccccaaccgccgcgctacgcaacaacacaaaaccgcctttcgaaaaaaaaaaaaacgaaaaccgacgcgaaacgataccgaaaccgaacgccctcgcttaccttaccacgacgcgtatacc

SEQ ID NO: 35783 - DNA, 573 bp, Artificial Sequence
  chemically treated genomic DNA (Homo sapiens) CpG-island No: 35783
tattttaagttttcggttgatttttgtttatttattcggaggcgttttcgttggtaggggatgggttttcggcgatggtagggttgatggtgagcgtcggtagtatcggtttttttcgggttagtatcggggtttcgcgggtcggcggcgcggcgtttttagtcggggtttatagggggcgggtcgggagcggtcggcgtttacgcgagttcggggttgcggtcggcgtttaggtcggcgtcggggcggtcgagggcgggcggcgttgcgggtttgggtcgagggtagtcgaggggcgttggggttgaggcgagcgagtcgtatcgttgtcgaggttcgaagaacgtgacgtcgtagttcgagttcgagaggtagggggaggggaggggcggttataagatcgcggatcggtttttcgcgataacgggatcgggagtcgcgatggattttatttttagtcgtcgcgttgcgtagtagtataaggtcgtttttcggaggggaaaggggcggagatcgacgcgaggcggtgtcgggatcgggcgttttcgtttgttttattacggcgcgtgtgtt

SEQ ID NO: 35784 - DNA, 573 bp, Artificial Sequence
  chemically treated genomic DNA (Homo sapiens) CpG-island No: 35784
aacacacgcgccgtaataaaacaaacgaaaacgcccgatcccgacaccgcctcgcgtcgatctccgcccctttcccctccgaaaaacgaccttatactactacgcaacgcgacgactaaaaataaaatccatcgcgactcccgatcccgttatcgcgaaaaaccgatccgcgatcttataaccgcccctcccctccccctacctctcgaactcgaactacgacgtcacgttcttcgaacctcgacaacgatacgactcgctcgcctcaaccccaacgcccctcgactaccctcgacccaaacccgcaacgccgcccgccctcgaccgccccgacgccgacctaaacgccgaccgcaaccccgaactcgcgtaaacgccgaccgctcccgacccgccccctataaaccccgactaaaaacgccgcgccgccgacccgcgaaaccccgatactaacccgaaaaaaaccgatactaccgacgctcaccatcaaccctaccatcgccgaaaacccatcccctaccaacgaaaacgcctccgaataaataaacaaaaatcaaccgaaaacttaaaata

SEQ ID NO: 35785 - DNA, 576 bp, Artificial Sequence
  chemically treated genomic DNA (Homo sapiens) CpG-island No: 35785
tcggatgttggtttggcgttggggtagcgttcgggaagtaggtggttttaggtgagggaggtcgaggtttcggggcgttttttgtttttcgggttttgcgtagggaggagcgtatcgggcgttagcgttttcgtgtggtcgcgagtatcgcgcgcgtaaagggggggcgagcgtcgttcggggcgtgggtgacggggttggtattaaggtagagggcggtcgggtagggaggaggggtagtttcgttagcgtcgagtttagttttgaagtcgtttcggttgtgtagatgatgagcgatttaggtcgaggcgaattaggagtttaggtgtttgtttaagtatagttggacgaaatgtttgttatttcgacggttggggcgcgggattttgtagggacgtggtgttgtagcggtttttgtttgggtttggcgtgcggttattttaggttaattttttattcgttgcgtggattcgttttcgggaggcggttttacgtttttagtttgtggattaataaggcggagaattatttttgtattttcgtcgggaaattagtttttattttcggttttttgtt

SEQ ID NO: 35786 - DNA, 576 bp, Artificial Sequence
  chemically treated genomic DNA (Homo sapiens) CpG-island No: 35786
aacaaaaaaccgaaaataaaaactaatttcccgacgaaaatacaaaaataattctccgccttattaatccacaaactaaaaacgtaaaaccgcctcccgaaaacgaatccacgcaacgaataaaaaattaacctaaaataaccgcacgccaaacccaaacaaaaaccgctacaacaccacgtccctacaaaatcccgcgccccaaccgtcgaaataacaaacatttcgtccaactatacttaaacaaacacctaaactcctaattcgcctcgacctaaatcgctcatcatctacacaaccgaaacgacttcaaaactaaactcgacgctaacgaaactacccctcctccctacccgaccgccctctaccttaataccaaccccgtcacccacgccccgaacgacgctcgccccccctttacgcgcgcgatactcgcgaccacacgaaaacgctaacgcccgatacgctcctccctacgcaaaacccgaaaaacaaaaaacgccccgaaacctcgacctccctcacctaaaaccacctacttcccgaacgctaccccaacgccaaaccaacatccga

SEQ ID NO: 35787 - DNA, 576 bp, Artificial Sequence
  chemically treated genomic DNA (Homo sapiens) CpG-island No: 35787
aatagggggtcggaggtaggagttggtttttcggcgagggtgtaaaggtggtttttcgttttgttgatttataggttggaaacgtggggtcgtttttcgggggcgaatttacgtagcgaatggagaattagtttgaggtagtcgtacgttaggtttaggtagaggtcgttgtagtattacgtttttgtaaggtttcgcgttttagtcgtcggggtaatagatatttcgtttagttgtgtttgggtaagtatttgggtttttgattcgtttcgatttgggtcgtttattatttgtatagtcgaaacgattttagggttgggttcggcgttggcggggttgttttttttttttgttcggtcgttttttattttgatgttagtttcgttatttacgtttcgggcggcgttcgttttttttttgcgcgcgcggtgttcgcggttatacgggggcgttggcgttcgatgcgtttttttttgcgtagaattcggagaataaagggcgtttcgggatttcggttttttttatttggagttatttgtttttcgggcgttgttttagcgttaggttagtattcgg

SEQ ID NO: 35788 - DNA, 576 bp, Artificial Sequence
  chemically treated genomic DNA (Homo sapiens) CpG-island No: 35788
ccgaatactaacctaacgctaaaacaacgcccgaaaaacaaataactccaaataaaaaaaaccgaaatcccgaaacgccctttattctccgaattctacgcaaaaaaaaacgcatcgaacgccaacgcccccgtataaccgcgaacaccgcgcgcgcaaaaaaaaaacgaacgccgcccgaaacgtaaataacgaaactaacatcaaaataaaaaacgaccgaacaaaaaaaaaaaacaaccccgccaacgccgaacccaaccctaaaatcgtttcgactatacaaataataaacgacccaaatcgaaacgaatcaaaaacccaaatacttacccaaacacaactaaacgaaatatctattaccccgacgactaaaacgcgaaaccttacaaaaacgtaatactacaacgacctctacctaaacctaacgtacgactacctcaaactaattctccattcgctacgtaaattcgcccccgaaaaacgaccccacgtttccaacctataaatcaacaaaacgaaaaaccacctttacaccctcgccgaaaaaccaactcctacctccgaccccctatt

SEQ ID NO: 35789 - DNA, 612 bp, Artificial Sequence
  chemically treated genomic DNA (Homo sapiens) CpG-island No: 35789
aacggtatttttcggaacggtcgtaaattcgtttaaattcgattggatatcgttatcgatttttatttcggattcggatattcgtacgcgcgtttgatatttcggtatcggtaagcgatttgtggtttcgtatttcgaatatcggcgtttcgttattgcgaatatcggaatcgagacggcgatattcgtatttttgaaattttaaatttcgttttcgtatttcgcgatttttcgaaatcgacgtattatcgaatcgaatattcggttatcgcggattttcgaatttcgtttagtcgatatcggttattcgttaattttttaatttcgtatgcggttaatttttatttcgatatttttaattttgagtttttagatttcggtatacgtggtttacgggcgatcgtagaattcgagattgaggtatttcgttatgttggagaatcgtattttcgtattttcgggttttcgcgatttcggtatattgttttttcgcgatcgtcgggtatcgttatttcgtgttattttttatatttttacgatttatattttacgaaattatcgtgtcgtttgtatttttatttttttttatttttcggaaattcgcgaatttta

SEQ ID NO: 35790 - DNA, 612 bp, Artificial Sequence
  chemically treated genomic DNA (Homo sapiens) CpG-island No: 35790
taaaattcgcgaatttccgaaaaataaaaaaaaataaaaatacaaacgacacgataatttcgtaaaatataaatcgtaaaaatataaaaaataacacgaaataacgatacccgacgatcgcgaaaaaacaatataccgaaatcgcgaaaacccgaaaatacgaaaatacgattctccaacataacgaaatacctcaatctcgaattctacgatcgcccgtaaaccacgtataccgaaatctaaaaactcaaaattaaaaatatcgaaataaaaattaaccgcatacgaaattaaaaaattaacgaataaccgatatcgactaaacgaaattcgaaaatccgcgataaccgaatattcgattcgataatacgtcgatttcgaaaaatcgcgaaatacgaaaacgaaatttaaaatttcaaaaatacgaatatcgccgtctcgattccgatattcgcaataacgaaacgccgatattcgaaatacgaaaccacaaatcgcttaccgataccgaaatatcaaacgcgcgtacgaatatccgaatccgaaataaaaatcgataacgatatccaatcgaatttaaacgaatttacgaccgttccgaaaaataccgtt

SEQ ID NO: 35791 - DNA, 612 bp, Artificial Sequence
  chemically treated genomic DNA (Homo sapiens) CpG-island No: 35791
tggaattcgcgagttttcgaagagtaagagagagtggaagtataggcgatacggtagtttcgtgaagtatgagtcgtgagaatgtgagaggtggtacggggtggcgatgttcggcgatcgcgggagagtaatatgtcggagtcgcggagattcggaagtacggaggtgcggttttttagtatgacggagtattttaatttcggattttacgatcgttcgtggattacgtgtatcgaagtttaggagtttagagttggaggtgtcgggatggaggttagtcgtatgcgaggttgagaagttggcgagtgatcgatatcggttgagcggagttcgagagttcgcgatgatcgagtattcgattcggtagtgcgtcggtttcgagaagtcgcggagtgcgagagcgaagtttgggattttaagaatgcgagtatcgtcgtttcggtttcggtgttcgtaatagcgagacgtcgatgttcgaagtacgaagttatagatcgtttgtcggtatcggaatattagacgcgcgtgcgggtattcgagttcgaggtgggaatcgatagcgatatttaatcggatttgggcgagtttgcgatcgtttcggaaggtatcgtt

SEQ ID NO: 35792 - DNA, 612 bp, Artificial Sequence
  chemically treated genomic DNA (Homo sapiens) CpG-island No: 35792
aacgataccttccgaaacgatcgcaaactcgcccaaatccgattaaatatcgctatcgattcccacctcgaactcgaatacccgcacgcgcgtctaatattccgataccgacaaacgatctataacttcgtacttcgaacatcgacgtctcgctattacgaacaccgaaaccgaaacgacgatactcgcattcttaaaatcccaaacttcgctctcgcactccgcgacttctcgaaaccgacgcactaccgaatcgaatactcgatcatcgcgaactctcgaactccgctcaaccgatatcgatcactcgccaacttctcaacctcgcatacgactaacctccatcccgacacctccaactctaaactcctaaacttcgatacacgtaatccacgaacgatcgtaaaatccgaaattaaaatactccgtcatactaaaaaaccgcacctccgtacttccgaatctccgcgactccgacatattactctcccgcgatcgccgaacatcgccaccccgtaccacctctcacattctcacgactcatacttcacgaaactaccgtatcgcctatacttccactctctcttactcttcgaaaactcgcgaattcca

SEQ ID NO: 35793 - DNA, 990 bp, Artificial Sequence
  chemically treated genomic DNA (Homo sapiens) CpG-island No: 35793
tagtcgggaggcggattgggtttagtagtatcgacgcgggggtagcgaggcgtcgcgcggggcgaaataggtgggattcggcgtagattttagggtgtattttcgggtttgtttatttatttttattcgcgcgttttttcgtcgcggtttttgtttcgcgtttcgttttagtcggtttgcgagtcgcggaggattcgggaagaattttttttttaatttggtcgggttttttcgttttatttttatttttatttttttttttttttttgttttagatttgtttttcgtagatacgtgggttgcggcggtggattagggaaaaagttgcgggaatttcggagtggaagtcgtttaagcgtattcgatcggggcgttcggttttaagtagtttttcgcgtttcgagttttagatataaaaggcggggatacgagttcggggattttcgcgtcgggaggttttttaatttcgtgtcgcgtatttattttatcgaggcggcggcggcgtttttcggatttagttggttgttttatttcgttcgtcgtttttttaggaaaacgcggtcgtcgggttcgttttttgttcggttttttgcgtcgtagtttttttttttttttcgttgcgggggttagtgggcgtcgagttttcgggttaggtcggcggggcgggggtagcggtagtattattacgtggtcgtcgggcgtcggttttcgtcgatttggatttagtgggagcgggaagggaggcgttaattattttttttttattttatttttcgcggttttaaatttcgcgagttaggtgattcggtttcgggttttggtcgggatttgcggggggtgtttttcgttttttagttttcggcgtattttttcggttcgcgcgtttcggttgttcgtggtttgtttttagtttttagggatcgtgggattttttttcgcggatttgttttatttttttaatttgaagttagtggaagttttttacgtttt

SEQ ID NO: 35794 - DNA, 990 bp, Artificial Sequence
  chemically treated genomic DNA (Homo sapiens) CpG-island No: 35794
aaaacgtaaaaaacttccactaacttcaaattaaaaaaataaaacaaatccgcgaaaaaaaatcccacgatccctaaaaactaaaaacaaaccacgaacaaccgaaacgcgcgaaccgaaaaaatacgccgaaaactaaaaaacgaaaaacaccccccgcaaatcccgaccaaaacccgaaaccgaatcacctaactcgcgaaatttaaaaccgcgaaaaataaaataaaaaaaaaataattaacgcctcccttcccgctcccactaaatccaaatcgacgaaaaccgacgcccgacgaccacgtaataatactaccgctacccccgccccgccgacctaacccgaaaactcgacgcccactaacccccgcaacgaaaaaaaaaaaaaaactacgacgcaaaaaaccgaacaaaaaacgaacccgacgaccgcgttttcctaaaaaaacgacgaacgaaataaaacaaccaactaaatccgaaaaacgccgccgccgcctcgataaaataaatacgcgacacgaaattaaaaaacctcccgacgcgaaaatccccgaactcgtatccccgccttttatatctaaaactcgaaacgcgaaaaactacttaaaaccgaacgccccgatcgaatacgcttaaacgacttccactccgaaattcccgcaactttttccctaatccaccgccgcaacccacgtatctacgaaaaacaaatctaaaacaaaaaaaaaaaaaaaaataaaaataaaaataaaacgaaaaaacccgaccaaattaaaaaaaaaattcttcccgaatcctccgcgactcgcaaaccgactaaaacgaaacgcgaaacaaaaaccgcgacgaaaaaacgcgcgaataaaaataaataaacaaacccgaaaatacaccctaaaatctacgccgaatcccacctatttcgccccgcgcgacgcctcgctacccccgcgtcgatactactaaacccaatccgcctcccgacta

SEQ ID NO: 35795 - DNA, 990 bp, Artificial Sequence
  chemically treated genomic DNA (Homo sapiens) CpG-island No: 35795
agagcgtggggggtttttattaattttaggttaagaggatgaaatagattcgcggagaagggttttacgatttttggagattaaaagtaagttacgaatagtcgggacgcgcgggtcggggagatgcgtcgggggttggagggcggagagtatttttcgtaggtttcggttagagttcggggtcgggttatttgattcgcggaatttggggtcgcgaggggtggaatgggaggggaatggttagcgttttttttttcgtttttattggatttaggtcggcgggggtcggcgttcggcggttacgtggtggtgttgtcgttgttttcgtttcgtcggtttagttcgggagttcggcgtttattgattttcgtagcgggggaggaggagggattgcggcgtaggaagtcgagtaggaagcgagttcggcggtcgcgtttttttggggaagcggcgggcggggtggagtagttagttgggttcggggagcgtcgtcgtcgtttcgatggggtgagtgcgcggtacggagttgggaggtttttcggcgcgggggttttcgggttcgtgttttcgttttttgtgtttggagttcggggcgcgggaggttgtttgggatcgggcgtttcggtcggatgcgtttgagcggtttttatttcggggttttcgtaattttttttttggtttatcgtcgtagtttacgtgtttgcggagagtagatttgggataagagaaggagaggaagtggagatgagggtagagcgggaagattcggttaagttaggagaagggtttttttcgggtttttcgcgattcgtaggtcggttggggcggggcgcggggtaggggtcgcggcggaggagcgcgcgggtgggaatgaatgagtagattcggagatgtattttggagtttgcgtcgggttttatttgtttcgtttcgcgcggcgtttcgttgttttcgcgtcggtgttgttgagtttaattcgtttttcggttg

SEQ ID NO: 35796 - DNA, 990 bp, Artificial Sequence
  chemically treated genomic DNA (Homo sapiens) CpG-island No: 35796
caaccgaaaaacgaattaaactcaacaacaccgacgcgaaaacaacgaaacgccgcgcgaaacgaaacaaataaaacccgacgcaaactccaaaatacatctccgaatctactcattcattcccacccgcgcgctcctccgccgcgacccctaccccgcgccccgccccaaccgacctacgaatcgcgaaaaacccgaaaaaaacccttctcctaacttaaccgaatcttcccgctctaccctcatctccacttcctctccttctcttatcccaaatctactctccgcaaacacgtaaactacgacgataaaccaaaaaaaaaattacgaaaaccccgaaataaaaaccgctcaaacgcatccgaccgaaacgcccgatcccaaacaacctcccgcgccccgaactccaaacacaaaaaacgaaaacacgaacccgaaaacccccgcgccgaaaaacctcccaactccgtaccgcgcactcaccccatcgaaacgacgacgacgctccccgaacccaactaactactccaccccgcccgccgcttccccaaaaaaacgcgaccgccgaactcgcttcctactcgacttcctacgccgcaatccctcctcctcccccgctacgaaaatcaataaacgccgaactcccgaactaaaccgacgaaacgaaaacaacgacaacaccaccacgtaaccgccgaacgccgacccccgccgacctaaatccaataaaaacgaaaaaaaaaacgctaaccattcccctcccattccacccctcgcgaccccaaattccgcgaatcaaataacccgaccccgaactctaaccgaaacctacgaaaaatactctccgccctccaacccccgacgcatctccccgacccgcgcgtcccgactattcgtaacttacttttaatctccaaaaatcgtaaaacccttctccgcgaatctatttcatcctcttaacctaaaattaataaaaaccccccacgctct

SEQ ID NO: 35797 - DNA, 1010 bp, Artificial Sequence
  chemically treated genomic DNA (Homo sapiens) CpG-island No: 35797
agacgagttgggatcgagcgcggtttttattagcgagcgttgcgaagagcgtggtggggacgcggtcgatttacgtcggggagattatcgttcggatttggcgcgacgtcgcgttattttggtagtttggacgagtcggcgcgggcggcgacggcgacgattataagagtagtagcgaggagatcggtagtagcgaggatttatagttacgtggcggttatttcgagggttatttatgttcgtatttggttatgggagttcgagagtttcggtgataatttgtacgtgtgtatttcgtgcggtaagggtttttttagttttgagtagttgaacgcgtacgtggaggtttacgtggaggaggaggaagcgttgtacggtagggcgaggcgcgaagtggcgggggcgtcggttagggttttttttggaggcggcggggataaggtcgtcggggtttcgggtggtttgggagagttgttgcgttttatcgttgcggtcgtgcgataagagttataaggattcggttacgttgcggtatacgagaagacgtattggttgattcggttttatttatgtattatttgcgggaagaagtttacgtagcgtgggattatgacgcgttatatgcgagttatttgggttttaagttttcgcgtggatttgcgtatgcggtttacggttagtatcgttttacggagtatatgcgtatttattcgggcgagaagtttacgagtgttaggtgtgcggcggtaagttcgtatagtaacgtaattttattagttatatgaagatgtacgtcgtgggggggcggcggggcgggcgttggcgggtttgggggggtttttcggcgttttcggtttcgacgtaagggtaagttcgattttttcgagggcgtttttgttgtggttcgttttacggtcgagtagttgagtttgaagtagtaggataaggcggtcgggtagttgttggcgtagattacgtattttttgtacgattttaaggtggcgttggag

SEQ ID NO: 35798 - DNA, 1010 bp, Artificial Sequence
  chemically treated genomic DNA (Homo sapiens) CpG-island No: 35798
ctccaacgccaccttaaaatcgtacaaaaaatacgtaatctacgccaacaactacccgaccgccttatcctactacttcaaactcaactactcgaccgtaaaacgaaccacaacaaaaacgccctcgaaaaaatcgaacttacccttacgtcgaaaccgaaaacgccgaaaaacccccccaaacccgccaacgcccgccccgccgcccccccacgacgtacatcttcatataactaataaaattacgttactatacgaacttaccgccgcacacctaacactcgtaaacttctcgcccgaataaatacgcatatactccgtaaaacgatactaaccgtaaaccgcatacgcaaatccacgcgaaaacttaaaacccaaataactcgcatataacgcgtcataatcccacgctacgtaaacttcttcccgcaaataatacataaataaaaccgaatcaaccaatacgtcttctcgtataccgcaacgtaaccgaatccttataactcttatcgcacgaccgcaacgataaaacgcaacaactctcccaaaccacccgaaaccccgacgaccttatccccgccgcctccaaaaaaaaccctaaccgacgcccccgccacttcgcgcctcgccctaccgtacaacgcttcctcctcctccacgtaaacctccacgtacgcgttcaactactcaaaactaaaaaaacccttaccgcacgaaatacacacgtacaaattatcaccgaaactctcgaactcccataaccaaatacgaacataaataaccctcgaaataaccgccacgtaactataaatcctcgctactaccgatctcctcgctactactcttataatcgtcgccgtcgccgcccgcgccgactcgtccaaactaccaaaataacgcgacgtcgcgccaaatccgaacgataatctccccgacgtaaatcgaccgcgtccccaccacgctcttcgcaacgctcgctaataaaaaccgcgctcgatcccaactcgtct

SEQ ID NO: 35799 - DNA, 1010 bp, Artificial Sequence
  chemically treated genomic DNA (Homo sapiens) CpG-island No: 35799
ttttagcgttattttggggtcgtgtaggaagtgcgtggtttgcgttagtagttgttcggtcgttttgttttgttgttttaggtttagttgttcggtcgtgaggcgagttatagtaaagacgttttcggggaagtcgagtttgtttttgcgtcggggtcggggacgtcggggagtttttttaagttcgttagcgttcgtttcgtcgtttttttacggcgtgtatttttatgtggttgatgaggttgcgttgttgtgcgaatttgtcgtcgtatatttggtattcgtaggtttttcgttcgagtggatgcgtatgtgtttcgtgaggcggtattggtcgtgaatcgtatgcgtaggtttacgcgaaggtttgaggtttaggtggttcgtatgtggcgcgttatggttttacgttgcgtgaattttttttcgtagatggtgtatgggtagggtcgggttagttagtgcgttttttcgtgtgtcgtagcgtggtcgggtttttgtagtttttgtcgtacgatcgtagcggtagggcgtagtagtttttttaggttattcggagtttcggcgattttgttttcgtcgtttttaaaaggggttttagtcggcgttttcgttatttcgcgtttcgttttgtcgtatagcgttttttttttttttacgtgagtttttacgtgcgcgtttagttgtttagagttggggaagtttttgtcgtacggaatgtatacgtataggttgttatcgaagttttcgggtttttatagttaggtgcgggtatgggtagttttcgaggtggtcgttacgtggttgtgggttttcgttgttatcggttttttcgttgttgtttttgtagtcgtcgtcgtcgtcgttcgcgtcggttcgtttaggttgttagggtagcgcggcgtcgcgttaggttcgagcggtggttttttcggcgtagatcggtcgcgtttttattacgtttttcgtagcgttcgttggtgggagtcgcgttcggttttagttcgttt

SEQ ID NO: 35800 - DNA, 1010 bp, Artificial Sequence
  chemically treated genomic DNA (Homo sapiens) CpG-island No: 35800
aaacgaactaaaaccgaacgcgactcccaccaacgaacgctacgaaaaacgtaataaaaacgcgaccgatctacgccgaaaaaaccaccgctcgaacctaacgcgacgccgcgctaccctaacaacctaaacgaaccgacgcgaacgacgacgacgacgactacaaaaacaacaacgaaaaaaccgataacaacgaaaacccacaaccacgtaacgaccacctcgaaaactacccatacccgcacctaactataaaaacccgaaaacttcgataacaacctatacgtatacattccgtacgacaaaaacttccccaactctaaacaactaaacgcgcacgtaaaaactcacgtaaaaaaaaaaaaaacgctatacgacaaaacgaaacgcgaaataacgaaaacgccgactaaaaccccttttaaaaacgacgaaaacaaaatcgccgaaactccgaataacctaaaaaaactactacgccctaccgctacgatcgtacgacaaaaactacaaaaacccgaccacgctacgacacacgaaaaaacgcactaactaacccgaccctacccatacaccatctacgaaaaaaaattcacgcaacgtaaaaccataacgcgccacatacgaaccacctaaacctcaaaccttcgcgtaaacctacgcatacgattcacgaccaataccgcctcacgaaacacatacgcatccactcgaacgaaaaacctacgaataccaaatatacgacgacaaattcgcacaacaacgcaacctcatcaaccacataaaaatacacgccgtaaaaaaacgacgaaacgaacgctaacgaacttaaaaaaactccccgacgtccccgaccccgacgcaaaaacaaactcgacttccccgaaaacgtctttactataactcgcctcacgaccgaacaactaaacctaaaacaacaaaacaaaacgaccgaacaactactaacgcaaaccacgcacttcctacacgaccccaaaataacgctaaaa

SEQ ID NO: 35801 - DNA, 578 bp, Artificial Sequence
  chemically treated genomic DNA (Homo sapiens) CpG-island No: 35801
gcgcgtttcgcgagcggttttttaaatgggtgcgagagggaagagggtagagcgcggcggggcgttcggggggcgttcggtattcgaggcgggcgtacgtatttaaataggagagcggcgttcggagttatttagtgcgggtagaagagcggggcgaggagcggggtcgcgttcgttggaggcgcggggcgagcggaggaagaggaggaggagagtagaaggaaggggaagcggttcgtatttgttgcgcgtcggggcgtttgttgtttttttttcggtatgatgttttttcggcgattgttattgtcgtcgtcgtcgtcgttgtcgggttgaggatagggagggagggggcggcgggttcgcgggggggcgaggcgggtttgtttttagtttttttttcggagagcggcgttcgtaggatgttgttgcgtttaggtttttcgcgtgtttttcgcgtcgcgtttcggcgcgaatttcgaacgtgcggagggaagaaggagggcgggcgagggaggttcggggagggaggagtacgggggggaggaggaggtaaggaagacgacgtggaggaggaggaa

SEQ ID NO: 35802 - DNA, 578 bp, Artificial Sequence
  chemically treated genomic DNA (Homo sapiens) CpG-island No: 35802
ttcctcctcctccacgtcgtcttccttacctcctcctcccccccgtactcctccctccccgaacctccctcgcccgccctccttcttccctccgcacgttcgaaattcgcgccgaaacgcgacgcgaaaaacacgcgaaaaacctaaacgcaacaacatcctacgaacgccgctctccgaaaaaaaaactaaaaacaaacccgcctcgcccccccgcgaacccgccgccccctccctccctatcctcaacccgacaacgacgacgacgacgacaataacaatcgccgaaaaaacatcataccgaaaaaaaaacaacaaacgccccgacgcgcaacaaatacgaaccgcttccccttccttctactctcctcctcctcttcctccgctcgccccgcgcctccaacgaacgcgaccccgctcctcgccccgctcttctacccgcactaaataactccgaacgccgctctcctatttaaatacgtacgcccgcctcgaataccgaacgccccccgaacgccccgccgcgctctaccctcttccctctcgcacccatttaaaaaaccgctcgcgaaacgcgc

SEQ ID NO: 35803 - DNA, 578 bp, Artificial Sequence
  chemically treated genomic DNA (Homo sapiens) CpG-island No: 35803
tttttttttttttacgtcgttttttttgtttttttttttttttcgtgttttttttttttcgagtttttttcgttcgttttttttttttttttcgtacgttcggggttcgcgtcggagcgcggcgcggggggtacgcggagagtttgggcgtagtagtattttgcgggcgtcgtttttcgggggggaggttgagagtaggttcgtttcgttttttcgcgggttcgtcgttttttttttttttgtttttagttcggtagcggcggcggcggcggtagtggtagtcgtcggagaagtattatgtcgaggaggaagtagtaggcgtttcggcgcgtagtaggtacgagtcgtttttttttttttttgttttttttttttttttttttcgttcgtttcgcgtttttagcgggcgcgatttcgtttttcgtttcgtttttttgttcgtattgagtaatttcgggcgtcgtttttttgtttgggtgcgtgcgttcgtttcgggtatcgggcgtttttcggacgtttcgtcgcgttttgtttttttttttttcgtatttatttggggagtcgttcgcggagcgcgt

SEQ ID NO: 35804 - DNA, 578 bp, Artificial Sequence
  chemically treated genomic DNA (Homo sapiens) CpG-island No: 35804
acgcgctccgcgaacgactccccaaataaatacgaaaaaaaaaaaaacaaaacgcgacgaaacgtccgaaaaacgcccgatacccgaaacgaacgcacgcacccaaacaaaaaaacgacgcccgaaattactcaatacgaacaaaaaaacgaaacgaaaaacgaaatcgcgcccgctaaaaacgcgaaacgaacgaaaaaaaaaaaaaaaaaaaacaaaaaaaaaaaaaaacgactcgtacctactacgcgccgaaacgcctactacttcctcctcgacataatacttctccgacgactaccactaccgccgccgccgccgctaccgaactaaaaacaaaaaaaaaaaaaacgacgaacccgcgaaaaaacgaaacgaacctactctcaacctcccccccgaaaaacgacgcccgcaaaatactactacgcccaaactctccgcgtaccccccgcgccgcgctccgacgcgaaccccgaacgtacgaaaaaaaaaaaaaaaacgaacgaaaaaaactcgaaaaaaaaaaaacacgaaaaaaaaaaaaaaacaaaaaaaacgacgtaaaaaaaaaaaaa

SEQ ID NO: 35805 - DNA, 854 bp, Artificial Sequence
  chemically treated genomic DNA (Homo sapiens) CpG-island No: 35805
tagttcgtgttgtgcgtggcgggttgtcgttgtaatgtgtagtttattgatattgatggatgcgttaatggttggacggatagatgttagggcggatcgtatagcgttcggcgtttgagcgggggagggttaggtagcgatttagcggcggcggtcggttacgcggagattcgagtttaggtcgcggttcgtagtgggagggggtcgaaggaatagaggtttgtaagaatagcgaggggatggaaaggaggagaaaagcgcgattagggagaattatacgttttcgtgtgcggcgtttcgcgttgtgtatacgtcgtatcgggcgcgtttaagtgggagtttcgaaggtgagttgggagtcggcgggagttgatttcgtgcggcgtaattcgtttttaggcgataggagtttagcgcggttattagaatggtgaggtcgtcggcggtgtcggttaatttatcgttttttcgtttgtaagaagcgttttacgttttacggtcgcgttttttcggtttggaggagtagcggttttggtttttgcggtcgcgggtatttaacgcgtacggcgttttagttttcgagttcgttagttcgagagtttcgtcgtagttcgtttcggattttttgtttcgtttggggttcgtattttataatttcgagcgtttttgcgcgcggaaaggcgttggaggcggttttatagtcggggaggttagcggcggcgtatttgtattttgggagacgtttggatttagtttaagttcgtaggttgggcgagcggagatttttgattttatcgtgtgggtgagattattgtttttcggtttaaaagaaaagaaagtatgttgtgaatttt

SEQ ID NO: 35806 - DNA, 854 bp, Artificial Sequence
  chemically treated genomic DNA (Homo sapiens) CpG-island No: 35806
aaaattcacaacatactttcttttcttttaaaccgaaaaacaataatctcacccacacgataaaatcaaaaatctccgctcgcccaacctacgaacttaaactaaatccaaacgtctcccaaaatacaaatacgccgccgctaacctccccgactataaaaccgcctccaacgcctttccgcgcgcaaaaacgctcgaaattataaaatacgaaccccaaacgaaacaaaaaatccgaaacgaactacgacgaaactctcgaactaacgaactcgaaaactaaaacgccgtacgcgttaaatacccgcgaccgcaaaaaccaaaaccgctactcctccaaaccgaaaaaacgcgaccgtaaaacgtaaaacgcttcttacaaacgaaaaaacgataaattaaccgacaccgccgacgacctcaccattctaataaccgcgctaaactcctatcgcctaaaaacgaattacgccgcacgaaatcaactcccgccgactcccaactcaccttcgaaactcccacttaaacgcgcccgatacgacgtatacacaacgcgaaacgccgcacacgaaaacgtataattctccctaatcgcgcttttctcctcctttccatcccctcgctattcttacaaacctctattccttcgaccccctcccactacgaaccgcgacctaaactcgaatctccgcgtaaccgaccgccgccgctaaatcgctacctaaccctcccccgctcaaacgccgaacgctatacgatccgccctaacatctatccgtccaaccattaacgcatccatcaatatcaataaactacacattacaacgacaacccgccacgcacaacacgaacta

SEQ ID NO: 35807 - DNA, 854 bp, Artificial Sequence
  chemically treated genomic DNA (Homo sapiens) CpG-island No: 35807
aaagtttatagtatgttttttttttttttagatcgggagatagtgattttatttatacggtaagattaaaagttttcgttcgtttagtttgcgggtttgggttgggtttagacgttttttaggatgtagatgcgtcgtcgttggttttttcggttataaagtcgtttttagcgttttttcgcgcgtaggagcgttcggagttgtggggtacggattttaggcggggtagggagttcgaggcgggttgcggcggggttttcgggttggcggattcgggggttgaggcgtcgtgcgcgttgggtgttcgcggtcgtagaggttagaatcgttatttttttaggtcggggagacgcggtcgtggagcgtgaaacgttttttgtaagcgaggaaacggtgagttggtcgatatcgtcggcggttttattattttggtggtcgcgttgagtttttgtcgtttggaggcgggttgcgtcgtacggggttagttttcgtcggtttttagtttattttcgaagtttttatttaggcgcgttcggtgcggcgtgtgtatagcgcggggcgtcgtatacggaagcgtgtagttttttttggtcgcgtttttttttttttttttattttttcgttgtttttgtaaatttttgttttttcggtttttttttattgcgggtcgcggtttgaattcgggttttcgcgtagtcggtcgtcgtcgttgggtcgttgtttggttttttttcgtttaggcgtcgagcgttgtgcgattcgttttaatatttgttcgtttaattattggcgtatttattagtgttaatgggttgtatattgtagcgatagttcgttacgtataatacgggtta

SEQ ID NO: 35808 - DNA, 854 bp, Artificial Sequence
  chemically treated genomic DNA (Homo sapiens) CpG-island No: 35808
taacccgtattatacgtaacgaactatcgctacaatatacaacccattaacactaataaatacgccaataattaaacgaacaaatattaaaacgaatcgcacaacgctcgacgcctaaacgaaaaaaaaccaaacaacgacccaacgacgacgaccgactacgcgaaaacccgaattcaaaccgcgacccgcaataaaaaaaaaccgaaaaaacaaaaatttacaaaaacaacgaaaaaataaaaaaaaaaaaaaaaacgcgaccaaaaaaaactacacgcttccgtatacgacgccccgcgctatacacacgccgcaccgaacgcgcctaaataaaaacttcgaaaataaactaaaaaccgacgaaaactaaccccgtacgacgcaacccgcctccaaacgacaaaaactcaacgcgaccaccaaaataataaaaccgccgacgatatcgaccaactcaccgtttcctcgcttacaaaaaacgtttcacgctccacgaccgcgtctccccgacctaaaaaaataacgattctaacctctacgaccgcgaacacccaacgcgcacgacgcctcaacccccgaatccgccaacccgaaaaccccgccgcaacccgcctcgaactccctaccccgcctaaaatccgtaccccacaactccgaacgctcctacgcgcgaaaaaacgctaaaaacgactttataaccgaaaaaaccaacgacgacgcatctacatcctaaaaaacgtctaaacccaacccaaacccgcaaactaaacgaacgaaaacttttaatcttaccgtataaataaaatcactatctcccgatctaaaaaaaaaaaaaacatactataaacttt

SEQ ID NO: 35809 - DNA, 694 bp, Artificial Sequence
  chemically treated genomic DNA (Homo sapiens) CpG-island No: 35809
gcggggcgttcgttttcgtcgggattgtcggtttcggggtttgcgagagcgttagagttttagtcggcgcgttcgggcgtagggtcgtttcggggatagtgggttcggaggtcgttttcgcgttttagtagtcgtcgttcggtagcgttcggagtcggtttcggcgcggtcgttttattttcggtttgagagttggtttagggagacgtaatcgagttcgtagcgtatcgatgcgtcgtcgttcgcgtcgttcgggtttcggttttcgtttagtcgtcgtcgttcgggggtcgttcgtatgagtttcggtttattcgcgtttttatcgtcgttcgtaagtgagttcgcgtcgtttcgtcgtttacgtcgtttagttagtttttttttgtcgcggttagtcggtcgggtcggttcggagttttagcgatttcgattattaattaataattaatttttttagtttagtagtttcggtaggtcgggcgcgggatacggcgcggcggttttttaggttttcggggggagtttttggcgggggatgggtaggggagttcggtttttttttttcgttttcgtttcgttttaggatcggttcgcgtcgtggatggggggcgcggttcggttttcgggggcgaggggcggggtggagggattttgattattttaaagttaggagaggaaatttgaaggaatt

SEQ ID NO: 35810 - DNA, 694 bp, Artificial Sequence
  chemically treated genomic DNA (Homo sapiens) CpG-island No: 35810
aattccttcaaatttcctctcctaactttaaaataatcaaaatccctccaccccgcccctcgcccccgaaaaccgaaccgcgccccccatccacgacgcgaaccgatcctaaaacgaaacgaaaacgaaaaaaaaaaaccgaactcccctacccatcccccgccaaaaactccccccgaaaacctaaaaaaccgccgcgccgtatcccgcgcccgacctaccgaaactactaaactaaaaaaattaattattaattaataatcgaaatcgctaaaactccgaaccgacccgaccgactaaccgcgacaaaaaaaaactaactaaacgacgtaaacgacgaaacgacgcgaactcacttacgaacgacgataaaaacgcgaataaaccgaaactcatacgaacgacccccgaacgacgacgactaaacgaaaaccgaaacccgaacgacgcgaacgacgacgcatcgatacgctacgaactcgattacgtctccctaaaccaactctcaaaccgaaaataaaacgaccgcgccgaaaccgactccgaacgctaccgaacgacgactactaaaacgcgaaaacgacctccgaacccactatccccgaaacgaccctacgcccgaacgcgccgactaaaactctaacgctctcgcaaaccccgaaaccgacaatcccgacgaaaacgaacgccccgc

SEQ ID NO: 35811 - DNA, 694 bp, Artificial Sequence
  chemically treated genomic DNA (Homo sapiens) CpG-island No: 35811
ggtttttttaagtttttttttttgattttgggatgattagggtttttttatttcgtttttcgttttcgggagtcgggtcgcgttttttatttacggcgcgggtcgattttagggcgggacgggggcgggagaaggaaatcgggtttttttgtttatttttcgttaggggtttttttcgagagtttagggggtcgtcgcgtcgtgtttcgcgttcggtttgtcggggttgttggattagagggattgattattgattggtgatcggggtcgttgaggtttcgggtcggttcggtcgattggtcgcggtaagaaggagttggttgggcggcgtgggcggcggggcgacgcgggtttatttacgggcggcggtgagggcgcgggtgggtcggagtttatgcgggcgattttcgggcggcggcggttgagcgggagtcggagttcgagcggcgcgggcggcggcgtatcgatgcgttgcgggttcgattgcgtttttttgggttagtttttaggtcgggaatggggcggtcgcgtcggggtcggtttcgggcgttgtcgggcggcggttgttggagcgcgggggcggttttcgggtttattattttcgaggcggttttgcgttcgggcgcgtcggttggggttttggcgttttcgtaggtttcgaggtcgatagtttcggcgagggcgggcgtttcgt

SEQ ID NO: 35812 - DNA, 694 bp, Artificial Sequence
  chemically treated genomic DNA (Homo sapiens) CpG-island No: 35812
acgaaacgcccgccctcgccgaaactatcgacctcgaaacctacgaaaacgccaaaaccccaaccgacgcgcccgaacgcaaaaccgcctcgaaaataataaacccgaaaaccgcccccgcgctccaacaaccgccgcccgacaacgcccgaaaccgaccccgacgcgaccgccccattcccgacctaaaaactaacccaaaaaaacgcaatcgaacccgcaacgcatcgatacgccgccgcccgcgccgctcgaactccgactcccgctcaaccgccgccgcccgaaaatcgcccgcataaactccgacccacccgcgccctcaccgccgcccgtaaataaacccgcgtcgccccgccgcccacgccgcccaaccaactccttcttaccgcgaccaatcgaccgaaccgacccgaaacctcaacgaccccgatcaccaatcaataatcaatccctctaatccaacaaccccgacaaaccgaacgcgaaacacgacgcgacgaccccctaaactctcgaaaaaaacccctaacgaaaaataaacaaaaaaacccgatttccttctcccgcccccgtcccgccctaaaatcgacccgcgccgtaaataaaaaacgcgacccgactcccgaaaacgaaaaacgaaataaaaaaaccctaatcatcccaaaatcaaaaaaaaaaacttaaaaaaacc

SEQ ID NO: 35813 - DNA, 578 bp, Artificial Sequence
  chemically treated genomic DNA (Homo sapiens) CpG-island No: 35813
ggagtgcgagtcgggtggggtagttggggggtggttggggacgaacgttgggtgggaataggggtggggggtaacgagcgtttcgggtacgggttcgcgcggggcgattggcgtcgcgttttcgcgtgtgcgtacggggcggaggcggaggggcggtatttttttcgttggcggggcgggggttttacgcgggtttggggtcgggggcgggggcgcggcgttttcgcgggcgggcgattgatacgattattttttttttttttaagtttgtttgttgtcgacgtcgtcgttttagtcgcgttacgggtagaagattggatcgtcgagtttcgggtcgcggcggcggttgcgcgttttttcggatgtcgtgattttcggtttaggggcgggggtcggggtagtatcggttcgggtcgttttcgcgtttttttttttatcgttttgttcgtttttttttcgttttttagtttcgaatttcgcgtatttcgtttggggacggggcgggggggggtagggtcgtcgttttttttcgttttttttttttttggtttttggagcgatttgttaaattttttatt

SEQ ID NO: 35814 - DNA, 578 bp, Artificial Sequence
  chemically treated genomic DNA (Homo sapiens) CpG-island No: 35814
aataaaaaatttaacaaatcgctccaaaaaccaaaaaaaaaaaaaacgaaaaaaaacgacgaccctacccccccccgccccgtccccaaacgaaatacgcgaaattcgaaactaaaaaacgaaaaaaaaacgaacaaaacgataaaaaaaaaaacgcgaaaacgacccgaaccgatactaccccgacccccgcccctaaaccgaaaatcacgacatccgaaaaaacgcgcaaccgccgccgcgacccgaaactcgacgatccaatcttctacccgtaacgcgactaaaacgacgacgtcgacaacaaacaaacttaaaaaaaaaaaaaataatcgtatcaatcgcccgcccgcgaaaacgccgcgcccccgcccccgaccccaaacccgcgtaaaacccccgccccgccaacgaaaaaaataccgcccctccgcctccgccccgtacgcacacgcgaaaacgcgacgccaatcgccccgcgcgaacccgtacccgaaacgctcgttaccccccacccctattcccacccaacgttcgtccccaaccaccccccaactaccccacccgactcgcactcc

SEQ ID NO: 35815 - DNA, 578 bp, Artificial Sequence
  chemically treated genomic DNA (Homo sapiens) CpG-island No: 35815
aatgggaagtttgataaatcgttttagaggttagaggaggagggggcggggaggagcggcggttttgttttttttcgtttcgtttttagacgaggtgcgcggggttcggggttggggggcggggagagggcgggtagagcggtgggaggaggagcgcgggagcggttcggatcggtattgtttcggttttcgtttttaggtcgggggttacggtattcggggggacgcgtagtcgtcgtcgcggttcggggttcggcggtttagttttttgttcgtggcgcggttggagcggcggcgtcggtaataggtaagtttaaaggaaaaggagatgatcgtgttaatcgttcgttcgcgggggcgtcgcgttttcgttttcggttttaggttcgcgtgggattttcgtttcgttagcgaaaggggtgtcgttttttcgttttcgtttcgtgcgtatacgcgggggcgcggcgttagtcgtttcgcgcgagttcgtgttcggggcgttcgttattttttatttttatttttatttagcgttcgtttttagttattttttagttgttttattcggttcgtatttt

SEQ ID NO: 35816 - DNA, 578 bp, Artificial Sequence
  chemically treated genomic DNA (Homo sapiens) CpG-island No: 35816
aaaatacgaaccgaataaaacaactaaaaaataactaaaaacgaacgctaaataaaaataaaaataaaaaataacgaacgccccgaacacgaactcgcgcgaaacgactaacgccgcgcccccgcgtatacgcacgaaacgaaaacgaaaaaacgacacccctttcgctaacgaaacgaaaatcccacgcgaacctaaaaccgaaaacgaaaacgcgacgcccccgcgaacgaacgattaacacgatcatctccttttcctttaaacttacctattaccgacgccgccgctccaaccgcgccacgaacaaaaaactaaaccgccgaaccccgaaccgcgacgacgactacgcgtccccccgaataccgtaacccccgacctaaaaacgaaaaccgaaacaataccgatccgaaccgctcccgcgctcctcctcccaccgctctacccgccctctccccgccccccaaccccgaaccccgcgcacctcgtctaaaaacgaaacgaaaaaaaacaaaaccgccgctcctccccgccccctcctcctctaacctctaaaacgatttatcaaacttcccatt

SEQ ID NO: 35817 - DNA, 952 bp, Artificial Sequence
  chemically treated genomic DNA (Homo sapiens) CpG-island No: 35817
cgtattcggtattcggtgtttaatgtttgatgcgacgtttgtcgcgttttattaggtttataacgatataaatcgtaggttagataaggcgtttacgtcgtattcggtaacggtgtcgattgtttgatgcgacgtttgcgcgttttattaggtttataaattttcgtatttttcgtaggtcggataaggcgtttacgtcgtattcggtaatagtgttaattgtttgatgcgacgtttgcgcgttttattaggtttataaattttcgtattattcgtaggtcggataaggcgtttacgtcgtattcggtaacggtgtcgattgtttgatgcgacgtttgcgcgttttattaggtttataaattttcgtatttttcgtatgtcggataaggcgtttacgtcgtattcggtaatggtgtcgattgtttgatgcgacgtttgcgcgttttattaggtttataaattttcgtatttttcgtaggtcggataaggcgtttacgtcgtattcggaaattggtgtatgatgtttgatgcgacgttgtcgcgttttatcgtgtttataaatagttcgaatcgtagtcggataaggcgtttacgtcgtattcggtaattggtgtatgatgtttgatgcgacgttggcgcgttttattaggtttatattggtgtcggatcggtagatcggataaggcgtttacgtcgtattcggtaagtggttaaattcgtttaaatatcgtcgtaatattttgatttagatcgatatatatcgtcgttagattaaattgaacgtttttgcgttttattagatttagtagcgtggtgttgatacgcgtatcggaataatttagcggatgatttagcgcgatcgcgttatcgttgaggttgattttttcgttaatttgtttaattagttttagatttttaatatatggtaggatttgcgcggtaaaggtttcgt

SEQ ID NO: 35818 - DNA, 952 bp, Artificial Sequence
  chemically treated genomic DNA (Homo sapiens) CpG-island No: 35818
acgaaacctttaccgcgcaaatcctaccatatattaaaaatctaaaactaattaaacaaattaacgaaaaaatcaacctcaacgataacgcgatcgcgctaaatcatccgctaaattattccgatacgcgtatcaacaccacgctactaaatctaataaaacgcaaaaacgttcaatttaatctaacgacgatatatatcgatctaaatcaaaatattacgacgatatttaaacgaatttaaccacttaccgaatacgacgtaaacgccttatccgatctaccgatccgacaccaatataaacctaataaaacgcgccaacgtcgcatcaaacatcatacaccaattaccgaatacgacgtaaacgccttatccgactacgattcgaactatttataaacacgataaaacgcgacaacgtcgcatcaaacatcatacaccaatttccgaatacgacgtaaacgccttatccgacctacgaaaaatacgaaaatttataaacctaataaaacgcgcaaacgtcgcatcaaacaatcgacaccattaccgaatacgacgtaaacgccttatccgacatacgaaaaatacgaaaatttataaacctaataaaacgcgcaaacgtcgcatcaaacaatcgacaccgttaccgaatacgacgtaaacgccttatccgacctacgaataatacgaaaatttataaacctaataaaacgcgcaaacgtcgcatcaaacaattaacactattaccgaatacgacgtaaacgccttatccgacctacgaaaaatacgaaaatttataaacctaataaaacgcgcaaacgtcgcatcaaacaatcgacaccgttaccgaatacgacgtaaacgccttatctaacctacgatttatatcgttataaacctaataaaacgcgacaaacgtcgcatcaaacattaaacaccgaataccgaatacg

SEQ ID NO: 35819 - DNA, 952 bp, Artificial Sequence
  chemically treated genomic DNA (Homo sapiens) CpG-island No: 35819
acgaagtttttgtcgcgtagattttgttatgtattaaagatttgggattaattgagtagattgacgagaagattaattttaacggtggcgcgatcgcgttgggttattcgttgggttgtttcggtgcgcgtattagtattacgttgttgaatttgatggaacgtaaagacgtttagtttggtttggcgacgatgtgtatcggtttgggttagggtattgcgacggtgtttgagcgggtttaattatttgtcggatgcggcgtgaacgttttattcggtttatcgattcggtattaatgtaggtttgataagacgcgttagcgtcgtattaggtattatgtattaattgtcggatgcggcgtaaacgttttattcggttacggttcggattatttgtaggtacgataagacgcgatagcgtcgtattaggtattatgtattaattttcggatgcggcgtaaacgttttattcggtttacggagggtgcgggaatttgtaggtttgataagacgcgtaagcgtcgtattaggtagtcggtattattgtcggatgcggcgtaaacgttttattcggtatacggagggtgcgggaatttgtaggtttgataagacgcgtaagcgtcgtattaggtagtcggtatcgttgtcggatgcggcgtaaacgttttattcggtttacggatggtgcgggaatttgtaggtttgataagacgcgtaagcgtcgtattaggtagttggtattgttgtcggatgcggcgtaaacgttttattcggtttacggagggtgcgggaatttgtaggtttgataagacgcgtaagcgtcgtattaggtagtcggtatcgttgtcggatgcggcgtaaacgttttatttgatttacggtttgtatcgttgtaggtttgataagacgcggtaagcgtcgtattaggtattgagtatcgaatgtcggatgcg

SEQ ID NO: 35820 - DNA, 952 bp, Artificial Sequence
  chemically treated genomic DNA (Homo sapiens) CpG-island No: 35820
cgcatccgacattcgatactcaatacctaatacgacgcttaccgcgtcttatcaaacctacaacgatacaaaccgtaaatcaaataaaacgtttacgccgcatccgacaacgataccgactacctaatacgacgcttacgcgtcttatcaaacctacaaattcccgcaccctccgtaaaccgaataaaacgtttacgccgcatccgacaacaataccaactacctaatacgacgcttacgcgtcttatcaaacctacaaattcccgcaccatccgtaaaccgaataaaacgtttacgccgcatccgacaacgataccgactacctaatacgacgcttacgcgtcttatcaaacctacaaattcccgcaccctccgtataccgaataaaacgtttacgccgcatccgacaataataccgactacctaatacgacgcttacgcgtcttatcaaacctacaaattcccgcaccctccgtaaaccgaataaaacgtttacgccgcatccgaaaattaatacataatacctaatacgacgctatcgcgtcttatcgtacctacaaataatccgaaccgtaaccgaataaaacgtttacgccgcatccgacaattaatacataatacctaatacgacgctaacgcgtcttatcaaacctacattaataccgaatcgataaaccgaataaaacgttcacgccgcatccgacaaataattaaacccgctcaaacaccgtcgcaataccctaacccaaaccgatacacatcgtcgccaaaccaaactaaacgtctttacgttccatcaaattcaacaacgtaatactaatacgcgcaccgaaacaacccaacgaataacccaacgcgatcgcgccaccgttaaaattaatcttctcgtcaatctactcaattaatcccaaatctttaatacataacaaaatctacgcgacaaaaacttcgt

SEQ ID NO: 35821 - DNA, 995 bp, Artificial Sequence
  chemically treated genomic DNA (Homo sapiens) CpG-island No: 35821
tttggcgacggttttgttggtaagcgtattgttatttttttggtatcgtcgttatttgcgttcgcgttagtttttataagatgaaatgaagcgtaaagagaagttggtggcgttgttgtattagcgcgttaattagcgcgtagcgttcggcgtgttgtttattacgtttttgtatttagttgtagtcgagcgtgtcgttagttaggcgtacggcggcgcgggttagcgtggcgtcgtcggtaaaaaaacgttcgtcggtgtcgtttattcgcgtttgaatttgtattaggttagttttagcggcgcggattattttatagtcggcggtgatgtttagcgcgtttaggcgtgttgttagtttagtcggttggttgtgcgttagtacggatatttagtgttggcgggtcgcggtatttgcgtgtatttagtgttttatagtgaatttaattatgtcggcgcgcgttaggttgacggagtatttcgtcgggttgtttttatcgttacggtggttaagggtgcgtacgtatagtagcggcgatatattcgggattttaagacgttggtattttttggtttgggcgcggcgggcgttgattcgcgtttggttgcggcgtagcgtaatttcggtttgttcgcgtagaaaatcgtgtagcgagtcgttgtcgaagcgttgtagcgtcggttagagggtgaggttcgcgaagtagtggtcgattaaatagagcgcgacgtcgttgatacgacgtagggtgcgtaggtggatgacgttttttttttcggtaatttttagtgcgttagcgacgtggtcggacgcggggcgtaatatcgaaagtagtttttcgttggtgggatggttgttttgatttagtagattttggttaaaacgcgtttgggcgttaagtcgggttatcgaacgggcgtattagtattagtacgtcgacgttttgacggcgttgttttttagtttttttttttttagttgttttaagggcggg

SEQ ID NO: 35822 - DNA, 995 bp, Artificial Sequence
  chemically treated genomic DNA (Homo sapiens) CpG-island No: 35822
cccgcccttaaaacaactaaaaaaaaaaaaactaaaaaacaacgccgtcaaaacgtcgacgtactaatactaatacgcccgttcgataacccgacttaacgcccaaacgcgttttaaccaaaatctactaaatcaaaacaaccatcccaccaacgaaaaactactttcgatattacgccccgcgtccgaccacgtcgctaacgcactaaaaattaccgaaaaaaaaaacgtcatccacctacgcaccctacgtcgtatcaacgacgtcgcgctctatttaatcgaccactacttcgcgaacctcaccctctaaccgacgctacaacgcttcgacaacgactcgctacacgattttctacgcgaacaaaccgaaattacgctacgccgcaaccaaacgcgaatcaacgcccgccgcgcccaaaccaaaaaataccaacgtcttaaaatcccgaatatatcgccgctactatacgtacgcacccttaaccaccgtaacgataaaaacaacccgacgaaatactccgtcaacctaacgcgcgccgacataattaaattcactataaaacactaaatacacgcaaataccgcgacccgccaacactaaatatccgtactaacgcacaaccaaccgactaaactaacaacacgcctaaacgcgctaaacatcaccgccgactataaaataatccgcgccgctaaaactaacctaatacaaattcaaacgcgaataaacgacaccgacgaacgtttttttaccgacgacgccacgctaacccgcgccgccgtacgcctaactaacgacacgctcgactacaactaaatacaaaaacgtaataaacaacacgccgaacgctacgcgctaattaacgcgctaatacaacaacgccaccaacttctctttacgcttcatttcatcttataaaaactaacgcgaacgcaaataacgacgataccaaaaaaataacaatacgcttaccaacaaaaccgtcgccaaa

SEQ ID NO: 35823 - DNA, 995 bp, Artificial Sequence
  chemically treated genomic DNA (Homo sapiens) CpG-island No: 35823
ttcgtttttgggataattggggggaaaaagattggggaatagcgtcgttagggcgtcggcgtgttggtgttgatgcgttcgttcgataattcggtttaacgtttaggcgcgttttagttagaatttgttggattagggtagttattttattagcgaaaaattgttttcggtattgcgtttcgcgttcggttacgtcgttgacgtattggggattatcgagggggagaacgttatttatttgcgtattttgcgtcgtgttaacggcgtcgcgttttgtttaatcgattattatttcgcggattttattttttggtcgacgttgtaacgtttcgatagcggttcgttgtacgattttttgcgcgagtaaatcggaattgcgttgcgtcgtagttagacgcggattagcgttcgtcgcgtttaggttaaagagtgttagcgttttgaaatttcgaatatgtcgtcgttgttgtgcgtgcgtatttttaattatcgtgacggtgaaagtagttcggcggagtatttcgttagtttgacgcgcgtcgatatgattgaatttattatggagtattgaatgtacgtagatatcgcgattcgttagtattggatgttcgtgttggcgtatagttaatcggttgaattggtagtacgtttgaacgcgttaaatattatcgtcgattatgaggtgattcgcgtcgttgaaattggtttggtatagatttaggcgcggatgggcggtatcggcgaacgtttttttgtcggcgacgttacgttgattcgcgtcgtcgtgcgtttgattgacggtacgttcggttatagttgggtgtaggggcgtgataaatagtacgtcgaacgttgcgcgttgattgacgcgttgatgtagtagcgttattagtttttttttgcgttttattttattttgtagaagttggcgcgagcgtagatagcggcgatattagaagaatgataatacgtttgttagtaagatcgtcgttagg

SEQ ID NO: 35824 - DNA, 995 bp, Artificial Sequence
  chemically treated genomic DNA (Homo sapiens) CpG-island No: 35824
cctaacgacgatcttactaacaaacgtattatcattcttctaatatcgccgctatctacgctcgcgccaacttctacaaaataaaataaaacgcaaaaaaaaactaataacgctactacatcaacgcgtcaatcaacgcgcaacgttcgacgtactatttatcacgcccctacacccaactataaccgaacgtaccgtcaatcaaacgcacgacgacgcgaatcaacgtaacgtcgccgacaaaaaaacgttcgccgataccgcccatccgcgcctaaatctataccaaaccaatttcaacgacgcgaatcacctcataatcgacgataatatttaacgcgttcaaacgtactaccaattcaaccgattaactatacgccaacacgaacatccaatactaacgaatcgcgatatctacgtacattcaatactccataataaattcaatcatatcgacgcgcgtcaaactaacgaaatactccgccgaactactttcaccgtcacgataattaaaaatacgcacgcacaacaacgacgacatattcgaaatttcaaaacgctaacactctttaacctaaacgcgacgaacgctaatccgcgtctaactacgacgcaacgcaattccgatttactcgcgcaaaaaatcgtacaacgaaccgctatcgaaacgttacaacgtcgaccaaaaaataaaatccgcgaaataataatcgattaaacaaaacgcgacgccgttaacacgacgcaaaatacgcaaataaataacgttctccccctcgataatccccaatacgtcaacgacgtaaccgaacgcgaaacgcaataccgaaaacaatttttcgctaataaaataactaccctaatccaacaaattctaactaaaacgcgcctaaacgttaaaccgaattatcgaacgaacgcatcaacaccaacacgccgacgccctaacgacgctattccccaatctttttccccccaattatcccaaaaacgaa

SEQ ID NO: 35825 - DNA, 975 bp, Artificial Sequence
  chemically treated genomic DNA (Homo sapiens) CpG-island No: 35825
gtatcgaatggggcgtggtgtattagtatttattcgacggtttgcgtcgttaggtgtcggtaggcggtaatatcggcgagcggttgatggcgatcggggtacgttattacggcgatattcgtgttatcgcgtagaagtggttggaagaggtggagattttcgttaatcggatcgacgatttgtcgattatttttttcggcggtatgtagtagcgtttgtagattgttcgtaatttggtgacgtattcgaagttggtgtttatggatgaatcgatcggcgggttggatgtgtcggtgtaggttcgtttgttcgatttgttgcgcggtttggtggtggagttgaatttcgcggtggtgattgttatttatgatttaggcgtcgttcgtttgttggcggatcgtttgttggtgatgaagtaggggtaagtggtggagagtgggttaatcgatcgcgtgttcgacgattcgtattattcgtatatatagttgttggtgttatcggttttgtagaattgagtcggtgtcggatgcggcgtaaacgttttattcggtttataaatgcgtttttcgtaggtcggataagacgcgttagcgtcgtattcggtaattagtattcggtaattattattaggtattttttatttttagtattttatgcgtttttgttataatattttcggcggtaaagttaaagaacgggaatagtttattcgtcggagtagatttttcgtaattcgttatttcgataattgttttttttagattaatatatttgtattagtaatcggtaatatttgtttttatcgttacgcgagtcgtaacgttagaaggtaatatcgattttcgatattttttattttgggcgtcgaaaatatcggtcgagggtagggaaattacgcgtatattgcgatttttttttgttaatttttttgtcgtttgtagggtaatttttatttttgaatcggtggtaattaga

SEQ ID NO: 35826 - DNA, 975 bp, Artificial Sequence
  chemically treated genomic DNA (Homo sapiens) CpG-island No: 35826
tctaattaccaccgattcaaaaataaaaattaccctacaaacgacaaaaaaattaacaaaaaaaaatcgcaatatacgcgtaatttccctaccctcgaccgatattttcgacgcccaaaataaaaaatatcgaaaatcgatattaccttctaacgttacgactcgcgtaacgataaaaacaaatattaccgattactaatacaaatatattaatctaaaaaaaacaattatcgaaataacgaattacgaaaaatctactccgacgaataaactattcccgttctttaactttaccgccgaaaatattataacaaaaacgcataaaatactaaaaataaaaaatacctaataataattaccgaatactaattaccgaatacgacgctaacgcgtcttatccgacctacgaaaaacgcatttataaaccgaataaaacgtttacgccgcatccgacaccgactcaattctacaaaaccgataacaccaacaactatatatacgaataatacgaatcgtcgaacacgcgatcgattaacccactctccaccacttacccctacttcatcaccaacaaacgatccgccaacaaacgaacgacgcctaaatcataaataacaatcaccaccgcgaaattcaactccaccaccaaaccgcgcaacaaatcgaacaaacgaacctacaccgacacatccaacccgccgatcgattcatccataaacaccaacttcgaatacgtcaccaaattacgaacaatctacaaacgctactacataccgccgaaaaaaataatcgacaaatcgtcgatccgattaacgaaaatctccacctcttccaaccacttctacgcgataacacgaatatcgccgtaataacgtaccccgatcgccatcaaccgctcgccgatattaccgcctaccgacacctaacgacgcaaaccgtcgaataaatactaatacaccacgccccattcgatac

SEQ ID NO: 35827 - DNA, 975 bp, Artificial Sequence
  chemically treated genomic DNA (Homo sapiens) CpG-island No: 35827
tttgattgttatcggtttagagatggaaattattttgtaagcggtagagaaattagtaggagaaggtcgtaatgtacgcgtagtttttttgttttcgatcgatattttcgacgtttaggatgaggaatatcgggagtcggtgttgttttttaacgttgcggttcgcgtggcggtggaagtaggtattgtcgattattggtataagtatgttggtttgaaaggggtaattgtcgggatgacgggttacggggaatttgtttcggcggataagttgttttcgttttttggttttatcgtcgagaatattgtggtaaaagcgtataaggtgttgggagtgaaaggtgtttgatggtgattgtcggatgttgattgtcggatgcgacgttgacgcgttttattcgatttacggggagcgtatttgtaggtcggataaggcgtttacgtcgtattcggtatcggtttaattttgtaaaatcgatgatattagtagttgtgtatacggatgatgcgggtcgtcgagtacgcggtcggttaatttattttttattatttgtttttgttttattattagtaaacggttcgttagtaggcgggcgacgtttaaattatgggtgataattattatcgcgaggtttagttttattattaggtcgcgtagtaggtcgagtaggcgggtttgtatcgatatatttagttcgtcggtcggtttatttataaatattagtttcggatgcgttattaggttgcgggtaatttgtaaacgttgttgtatatcgtcggaaaaggtggtcggtaggtcgtcgattcggttggcgggaatttttattttttttagttatttttgcgcggtggtacgaatatcgtcgtaatgacgtgtttcggtcgttattagtcgttcgtcgatattgtcgtttgtcgatatttggcggcgtaggtcgtcgagtggatgttgatgtattacgttttattcggtat

SEQ ID NO: 35828 - DNA, 975 bp, Artificial Sequence
  chemically treated genomic DNA (Homo sapiens) CpG-island No: 35828
ataccgaataaaacgtaatacatcaacatccactcgacgacctacgccgccaaatatcgacaaacgacaatatcgacgaacgactaataacgaccgaaacacgtcattacgacgatattcgtaccaccgcgcaaaaataactaaaaaaaataaaaattcccgccaaccgaatcgacgacctaccgaccaccttttccgacgatatacaacaacgtttacaaattacccgcaacctaataacgcatccgaaactaatatttataaataaaccgaccgacgaactaaatatatcgatacaaacccgcctactcgacctactacgcgacctaataataaaactaaacctcgcgataataattatcacccataatttaaacgtcgcccgcctactaacgaaccgtttactaataataaaacaaaaacaaataataaaaaataaattaaccgaccgcgtactcgacgacccgcatcatccgtatacacaactactaatatcatcgattttacaaaattaaaccgataccgaatacgacgtaaacgccttatccgacctacaaatacgctccccgtaaatcgaataaaacgcgtcaacgtcgcatccgacaatcaacatccgacaatcaccatcaaacacctttcactcccaacaccttatacgcttttaccacaatattctcgacgataaaaccaaaaaacgaaaacaacttatccgccgaaacaaattccccgtaacccgtcatcccgacaattacccctttcaaaccaacatacttataccaataatcgacaatacctacttccaccgccacgcgaaccgcaacgttaaaaaacaacaccgactcccgatattcctcatcctaaacgtcgaaaatatcgatcgaaaacaaaaaaactacgcgtacattacgaccttctcctactaatttctctaccgcttacaaaataatttccatctctaaaccgataacaatcaaa

SEQ ID NO: 35829 - DNA, 1047 bp, Artificial Sequence
  chemically treated genomic DNA (Homo sapiens) CpG-island No: 35829
atttgtcgggttgtgaaaaagcggtgtaggtaaaagtgaaagttttgtttgatgtttagttcgaagtggtttatttattggcgaagtggaaacgttagattttagggtaatacgattttagcgcgggcgaagggttgtatacgtatatgaaagtttttcgtttcgatgaagatcgttttttttcgttgtattcggtttatgttgattagtgggattgggaacgcgtaatgggcgacggtgagcgtttaattttcgattttgaaaagtacggtagaggcgatttgggcgggaattaaagtaatcgaagttgcggttagcgaagagtttggtttggtatcgtttttgtcggattagatttatttcgtatatagttaggagttattgtttcgttattcggattttgatgttaaagggcgtgagcgggcgatagcgaaagattttggcgcggtattttttgtcgggattggcggtaagttgagcgatggttatcgttacgacgtgcgcgtatcggattatgatgattggagtatttcgttagagttgggttatgcgggtttgaacggcgatattttggtgtggaattcggtattggaagatgcgtttgagtttttttttatggggattcgtgtagatgtcgatacgttgaagtattaattggcgttgatcggtgacgaagatcgtttggagttggagtggtattaggcgttgttgcgcggtgaaatgtcgtagattatcggcggcggtatcggttagtttcgtttgattatgttgttgttgtaattgtcgtatatcggttaggtttagtgtggagtatggttagttgttgttcgcgagagcgttttttttttgttgtaataatttatcgtcggtagcgtttgagtaggcggtttcgttattcggtattaagcggtcgatttgatcgaaaatgggtttgtgtcggttggtcgttgcgattggtcggtttaaaggttgttttttcgggggttttttttatttcgcgttgggagcggagaataaaatcggttatgtcggtttgagcgtagagaa

SEQ ID NO: 35830 - DNA, 1047 bp, Artificial Sequence
  chemically treated genomic DNA (Homo sapiens) CpG-island No: 35830
ttctctacgctcaaaccgacataaccgattttattctccgctcccaacgcgaaataaaaaaaacccccgaaaaaacaacctttaaaccgaccaatcgcaacgaccaaccgacacaaacccattttcgatcaaatcgaccgcttaataccgaataacgaaaccgcctactcaaacgctaccgacgataaattattacaacaaaaaaaaaacgctctcgcgaacaacaactaaccatactccacactaaacctaaccgatatacgacaattacaacaacaacataatcaaacgaaactaaccgataccgccgccgataatctacgacatttcaccgcgcaacaacgcctaataccactccaactccaaacgatcttcgtcaccgatcaacgccaattaatacttcaacgtatcgacatctacacgaatccccataaaaaaaaactcaaacgcatcttccaataccgaattccacaccaaaatatcgccgttcaaacccgcataacccaactctaacgaaatactccaatcatcataatccgatacgcgcacgtcgtaacgataaccatcgctcaacttaccgccaatcccgacaaaaaataccgcgccaaaatctttcgctatcgcccgctcacgccctttaacatcaaaatccgaataacgaaacaataactcctaactatatacgaaataaatctaatccgacaaaaacgataccaaaccaaactcttcgctaaccgcaacttcgattactttaattcccgcccaaatcgcctctaccgtacttttcaaaatcgaaaattaaacgctcaccgtcgcccattacgcgttcccaatcccactaatcaacataaaccgaatacaacgaaaaaaaacgatcttcatcgaaacgaaaaactttcatatacgtatacaacccttcgcccgcgctaaaatcgtattaccctaaaatctaacgtttccacttcgccaataaataaaccacttcgaactaaacatcaaacaaaactttcacttttacctacaccgctttttcacaacccgacaaat

SEQ ID NO: 35831 - DNA, 1047 bp, Artificial Sequence
  chemically treated genomic DNA (Homo sapiens) CpG-island No: 35831
ttttttacgtttagatcgatatgatcgattttatttttcgtttttaacgcgggataagagaagttttcggaaaaataatttttaaatcggttaatcgtaacggttaatcggtataagtttattttcgattaaatcggtcgtttgatatcggatggcgaagtcgtttgtttagacgttgtcggcgataaattattatagtagagaagggacgttttcgcgaatagtagttggttatattttatattgaatttggtcgatatgcggtagttgtagtagtagtatagttaaacgagattggtcgatatcgtcgtcgatggtttgcggtattttatcgcgtagtagcgtttgatgttattttagttttaggcgattttcgttatcggttagcgttagttgatgttttagcgtgtcggtatttatacggatttttatggaggaaagtttaaacgtattttttagtatcgggttttatattagaatatcgtcgtttagattcgtatggtttagttttgacggggtgttttagttattataattcggtgcgcgtacgtcgtggcgatgattatcgtttagtttgtcgttaatttcgataaggaatatcgcgttaagatttttcgttatcgttcgtttacgttttttggtattaagattcggataacgagatagtaatttttggttgtgtacgaagtggatttgattcggtaggaacggtgttaggttaaatttttcgttaatcgtagtttcggttgttttaattttcgtttagatcgtttttatcgtgttttttagagtcgagaattggacgtttatcgtcgtttattacgcgtttttagttttattggttaatatagatcgagtgtaacggagaaagacggtttttatcggggcgaagggtttttatgtgcgtgtatagtttttcgttcgcgttgaagtcgtgttgttttaaggtttgacgtttttatttcgttagtgaatgaattatttcgaattgggtattaggtagagtttttatttttatttgtatcgtttttttatagttcgataagt

SEQ ID NO: 35832 - DNA, 1047 bp, Artificial Sequence
  chemically treated genomic DNA (Homo sapiens) CpG-island No: 35832
acttatcgaactataaaaaaacgatacaaataaaaataaaaactctacctaatacccaattcgaaataattcattcactaacgaaataaaaacgtcaaaccttaaaacaacacgacttcaacgcgaacgaaaaactatacacgcacataaaaacccttcgccccgataaaaaccgtctttctccgttacactcgatctatattaaccaataaaactaaaaacgcgtaataaacgacgataaacgtccaattctcgactctaaaaaacacgataaaaacgatctaaacgaaaattaaaacaaccgaaactacgattaacgaaaaatttaacctaacaccgttcctaccgaatcaaatccacttcgtacacaaccaaaaattactatctcgttatccgaatcttaataccaaaaaacgtaaacgaacgataacgaaaaatcttaacgcgatattccttatcgaaattaacgacaaactaaacgataatcatcgccacgacgtacgcgcaccgaattataataactaaaacaccccgtcaaaactaaaccatacgaatctaaacgacgatattctaatataaaacccgatactaaaaaatacgtttaaactttcctccataaaaatccgtataaataccgacacgctaaaacatcaactaacgctaaccgataacgaaaatcgcctaaaactaaaataacatcaaacgctactacgcgataaaataccgcaaaccatcgacgacgatatcgaccaatctcgtttaactatactactactacaactaccgcatatcgaccaaattcaatataaaatataaccaactactattcgcgaaaacgtcccttctctactataataatttatcgccgacaacgtctaaacaaacgacttcgccatccgatatcaaacgaccgatttaatcgaaaataaacttataccgattaaccgttacgattaaccgatttaaaaattatttttccgaaaacttctcttatcccgcgttaaaaacgaaaaataaaatcgatcatatcgatctaaacgtaaaaaa

SEQ ID NO: 35833 - DNA, 518 bp, Artificial Sequence
  chemically treated genomic DNA (Homo sapiens) CpG-island No: 35833
atttatcggtagttacgcgtcggttgtttagtttttaggttggcgtattggcgggcgggtaaattgttttataagtagtaaaacgtagtgtcgatggcgagttgttgttagttattcgtaatcgtttaagtagcgttgtgtcgttgtcgtttgatgtttggtaaatgttgagcgcgtcgttacgttagtcgggtattgtggttttgcgggaatatttacgttagcgttttttcgtttgtatacggttttttaattaggtcgataatttatttattttgtcggtcgttgagtgtatttcgttcggttgggatagtagtcgttagacgttggatgcgtaggttattagcggcgaaggggaagataatgtttgacgttattattattagttttagttagcgtattttatgtcgttgaacgtatggcggcgtttttgtaataaatagacgatttcgtgtgtttggtttttggttttgttagttttgttgaagggtaattgatattggaattacgggtgatga

SEQ ID NO: 35834 - DNA, 518 bp, Artificial Sequence
  chemically treated genomic DNA (Homo sapiens) CpG-island No: 35834
tcatcacccgtaattccaatatcaattacccttcaacaaaactaacaaaaccaaaaaccaaacacacgaaatcgtctatttattacaaaaacgccgccatacgttcaacgacataaaatacgctaactaaaactaataataataacgtcaaacattatcttccccttcgccgctaataacctacgcatccaacgtctaacgactactatcccaaccgaacgaaatacactcaacgaccgacaaaataaataaattatcgacctaattaaaaaaccgtatacaaacgaaaaaacgctaacgtaaatattcccgcaaaaccacaatacccgactaacgtaacgacgcgctcaacatttaccaaacatcaaacgacaacgacacaacgctacttaaacgattacgaataactaacaacaactcgccatcgacactacgttttactacttataaaacaatttacccgcccgccaatacgccaacctaaaaactaaacaaccgacgcgtaactaccgataaat

SEQ ID NO: 35835 - DNA, 518 bp, Artificial Sequence
  chemically treated genomic DNA (Homo sapiens) CpG-island No: 35835
ttattattcgtggttttagtgttaattgttttttaataaaattgataaagttagaaattagatatacggggtcgtttgtttgttgtaaaagcgtcgttatgcgtttaacggtataaggtgcgttggttgaggttggtaatgataacgttagatattattttttttttcgtcgttaatgatttgcgtatttagcgtttggcggttgttgttttaatcgagcgaaatatatttagcgatcggtagaataaataagttatcgatttgattaagaggtcgtatgtaggcggggggacgttggcgtaaatattttcgtaaagttataatgttcggttggcgtaacggcgcgtttaatatttgttaggtattaggcgatagcggtataacgttgtttaagcggttgcgggtagttaatagtagttcgttatcggtattgcgttttgttgtttgtgaaataatttgttcgttcgttagtgcgttagtttgaaaattaaatagtcgacgcgtagttgtcggtgagt

SEQ ID NO: 35836 - DNA, 518 bp, Artificial Sequence
  chemically treated genomic DNA (Homo sapiens) CpG-island No: 35836
actcaccgacaactacgcgtcgactatttaattttcaaactaacgcactaacgaacgaacaaattatttcacaaacaacaaaacgcaataccgataacgaactactattaactacccgcaaccgcttaaacaacgttataccgctatcgcctaatacctaacaaatattaaacgcgccgttacgccaaccgaacattataactttacgaaaatatttacgccaacgtccccccgcctacatacgacctcttaatcaaatcgataacttatttattctaccgatcgctaaatatatttcgctcgattaaaacaacaaccgccaaacgctaaatacgcaaatcattaacgacgaaaaaaaaaataatatctaacgttatcattaccaacctcaaccaacgcaccttataccgttaaacgcataacgacgcttttacaacaaacaaacgaccccgtatatctaatttctaactttatcaattttattaaaaaacaattaacactaaaaccacgaataataa

SEQ ID NO: 35837 - DNA, 502 bp, Artificial Sequence
  chemically treated genomic DNA (Homo sapiens) CpG-island No: 35837
ttttttcggtgttgatttggcgaatttggtgaacgaagcggtattgttcgttgttcgtggtaataaacgcgttgtgtcgatggttgagttcgagaaagcgaaagataaaattatgatgggtgcggaacgtcgttttatggtgatgacggaagcgtagaaagaatcgacggtttattacgaagcgggttatgcgattatcggtcgtttggtgtcggaatacgattcggtgtataaagtgacgattattttacgcggtcgtgcgttgggtgtgattttttttttgtttgagggcgacgtaattagcgttagtcgttagaaattggaaagttagatttttacgttgtacggtggtcgtttggtagaagagattatttacgggtcggaatatgtatttatcggtgcgtttaacgatattaaagttgcgattaatttggtacgtaatatggtgatttagtggggtttttttgagaaattgggtttattgttgtacgcggaagaagaa

SEQ ID NO: 35838 - DNA, 502 bp, Artificial Sequence
  chemically treated genomic DNA (Homo sapiens) CpG-island No: 35838
ttcttcttccgcgtacaacaataaacccaatttctcaaaaaaaccccactaaatcaccatattacgtaccaaattaatcgcaactttaatatcgttaaacgcaccgataaatacatattccgacccgtaaataatctcttctaccaaacgaccaccgtacaacgtaaaaatctaactttccaatttctaacgactaacgctaattacgtcgccctcaaacaaaaaaaaaatcacacccaacgcacgaccgcgtaaaataatcgtcactttatacaccgaatcgtattccgacaccaaacgaccgataatcgcataacccgcttcgtaataaaccgtcgattctttctacgcttccgtcatcaccataaaacgacgttccgcacccatcataattttatctttcgctttctcgaactcaaccatcgacacaacgcgtttattaccacgaacaacgaacaataccgcttcgttcaccaaattcgccaaatcaacaccgaaaaaa

SEQ ID NO: 35839 - DNA, 502 bp, Artificial Sequence
  chemically treated genomic DNA (Homo sapiens) CpG-island No: 35839
tttttttttcgcgtatagtagtggatttaattttttagagaagttttattgagttattatgttacgtgttaggttggtcgtaattttaatatcgttggacgtatcggtagatatatgtttcggttcgtagatgattttttttgttagacgattatcgtatagcgtagaaatttggttttttagtttttgacggttggcgttgattgcgtcgtttttaggtaagaagaaagttatatttagcgtacgatcgcgtgggataatcgttattttgtgtatcggatcgtgtttcggtattaggcgatcgataatcgtatgattcgtttcgtggtaagtcgtcgattttttttgcgttttcgttattattatggagcgacgtttcgtatttattatgattttgtttttcgttttttcgaatttaattatcgatataacgcgtttgttgttacgagtagcgaatagtgtcgtttcgtttattaggttcgttaggttagtatcggagaaa

SEQ ID NO: 35840 - DNA, 502 bp, Artificial Sequence
  chemically treated genomic DNA (Homo sapiens) CpG-island No: 35840
tttctccgatactaacctaacgaacctaataaacgaaacgacactattcgctactcgtaacaacaaacgcgttatatcgataattaaattcgaaaaaacgaaaaacaaaatcataataaatacgaaacgtcgctccataataataacgaaaacgcaaaaaaaatcgacgacttaccacgaaacgaatcatacgattatcgatcgcctaataccgaaacacgatccgatacacaaaataacgattatcccacgcgatcgtacgctaaatataactttcttcttacctaaaaacgacgcaatcaacgccaaccgtcaaaaactaaaaaaccaaatttctacgctatacgataatcgtctaacaaaaaaaatcatctacgaaccgaaacatatatctaccgatacgtccaacgatattaaaattacgaccaacctaacacgtaacataataactcaataaaacttctctaaaaaattaaatccactactatacgcgaaaaaaaaa

SEQ ID NO: 35841 - DNA, 573 bp, Artificial Sequence
  chemically treated genomic DNA (Homo sapiens) CpG-island No: 35841
tggagttgcgtgttaggcggggttgtgcggagtagttgagcgtagagcggagtattaggtatttagcgggtcggattttgggcggtattcgagcgggtcgggtagtagtgggcgttcgcgatttttttttgtttaacgcgtttttttttcgggttcggtttttttcgttttttttttttgttttcgttttttttttcgttttttttttttttcgggattgagtattaaaacgttcgtttgtaaggttttttgcgttttggtagttaggagtcgtcgttacgatcgtcgggttttagtgggtgtttgcgtttttttttcgttcgtttgtttcgggttatttagaaatttgttttattcgtcgcgggtgttcggtagtgttgtttatggtttagtttaggagtttatttagggcgtcggacgggttggatagaggcgcggtttaggtgagtgcggcgcgcgcggggtgggagagtggtaggacgtaggtgtagagggtttcgaggtgtttttgtttggcgttttggatttcgggtaagtgtagaatttaagaagaatcgaggttggagtaggtgg

SEQ ID NO: 35842 - DNA, 573 bp, Artificial Sequence
  chemically treated genomic DNA (Homo sapiens) CpG-island No: 35842
ccacctactccaacctcgattcttcttaaattctacacttacccgaaatccaaaacgccaaacaaaaacacctcgaaaccctctacacctacgtcctaccactctcccaccccgcgcgcgccgcactcacctaaaccgcgcctctatccaacccgtccgacgccctaaataaactcctaaactaaaccataaacaacactaccgaacacccgcgacgaataaaacaaatttctaaataacccgaaacaaacgaacgaaaaaaaaacgcaaacacccactaaaacccgacgatcgtaacgacgactcctaactaccaaaacgcaaaaaaccttacaaacgaacgttttaatactcaatcccgaaaaaaaaaaaaaacgaaaaaaaaaacgaaaacaaaaaaaaaaaacgaaaaaaaccgaacccgaaaaaaaaacgcgttaaacaaaaaaaaatcgcgaacgcccactactacccgacccgctcgaataccgcccaaaatccgacccgctaaatacctaatactccgctctacgctcaactactccgcacaaccccgcctaacacgcaactcca

SEQ ID NO: 35843 - DNA, 573 bp, Artificial Sequence
  chemically treated genomic DNA (Homo sapiens) CpG-island No: 35843
ttatttgttttagtttcgattttttttaggttttgtatttgttcgaagtttagaacgttagataaaggtatttcggagttttttatatttgcgttttgttatttttttatttcgcgcgcgtcgtatttatttgagtcgcgtttttgtttagttcgttcggcgttttaaataggtttttgggttgggttatgggtagtattgtcgagtattcgcggcgggtagagtaagtttttggatggttcggggtaggcgggcggggagaaggcgtaggtatttattgagattcggcggtcgtggcggcgatttttggttgttagggcgtagaggattttgtaggcgggcgttttggtgtttaatttcgaggagggggaggagcgggaggaggagcgggagtaaaaggaggggacggaggaggtcgggttcggagggagagcgcgttgggtagaggaggatcgcgagcgtttattgttgttcggttcgttcgggtgtcgtttagagttcggttcgttaggtgtttggtgtttcgttttgcgtttagttgtttcgtatagtttcgtttggtacgtagtttta

SEQ ID NO: 35844 - DNA, 573 bp, Artificial Sequence
  chemically treated genomic DNA (Homo sapiens) CpG-island No: 35844
taaaactacgtaccaaacgaaactatacgaaacaactaaacgcaaaacgaaacaccaaacacctaacgaaccgaactctaaacgacacccgaacgaaccgaacaacaataaacgctcgcgatcctcctctacccaacgcgctctccctccgaacccgacctcctccgtcccctccttttactcccgctcctcctcccgctcctccccctcctcgaaattaaacaccaaaacgcccgcctacaaaatcctctacgccctaacaaccaaaaatcgccgccacgaccgccgaatctcaataaatacctacgccttctccccgcccgcctaccccgaaccatccaaaaacttactctacccgccgcgaatactcgacaatactacccataacccaacccaaaaacctatttaaaacgccgaacgaactaaacaaaaacgcgactcaaataaatacgacgcgcgcgaaataaaaaaataacaaaacgcaaatataaaaaactccgaaatacctttatctaacgttctaaacttcgaacaaatacaaaacctaaaaaaaatcgaaactaaaacaaataa

SEQ ID NO: 35845 - DNA, 819 bp, Artificial Sequence
  chemically treated genomic DNA (Homo sapiens) CpG-island No: 35845
ttttcggtcgttacgatttttaagggttagagttcggtcgtttatttttttttagttttagtttcgtgtcgcgtcggcgacggaagcggaatttatcgttttacgatattcgatggttttcgagagttttgggttcgtttattacgtacggagaaagtttttattttcgtaagatttacgtcgtcgggagtcgttacgatgtttcggtcggggggttaggagggtaaaagcgtagcggttcgggagtaatggggcggcggattgtagcgtcgttatgtcgaggttgaggggcgttgggggtatttgaggagtcgagcggtgggggtggggttgcgcgtcgggtttgtttcgattcgtataaagagatcgcgtttttttcgttttagttttataagagttttatcgtacgttcggggcgtcggttatttaaaagatcgttttcggtttttttatagattcgataagatgttaagagattcggtttggacgtttattagttttaattacggggattagatttttatttgagtcgggtttcggttaatatcgaagttattttaaattcgttagttttaggcgttaatttttttttttttttttacgtcgttttttttttttatatttttcggaggaacggcgtttattggttgacgttttgcgtgcgcgtttttttgatcgtttaatacgtttggttttttcgttacgaaaggggaaatagagcgcgtttaagggttgttttggtttcgtttaataatgagcggggttatatgttttgcgtttgttttgaaggaagggtttttttttgggtgggaaggaaag

SEQ ID NO: 35846 - DNA, 819 bp, Artificial Sequence
  chemically treated genomic DNA (Homo sapiens) CpG-island No: 35846
ctttccttcccacccaaaaaaaaacccttccttcaaaacaaacgcaaaacatataaccccgctcattattaaacgaaaccaaaacaacccttaaacgcgctctatttcccctttcgtaacgaaaaaaccaaacgtattaaacgatcaaaaaaacgcgcacgcaaaacgtcaaccaataaacgccgttcctccgaaaaatataaaaaaaaaaaacgacgtaaaaaaaaaaaaaaaaattaacgcctaaaactaacgaatttaaaataacttcgatattaaccgaaacccgactcaaataaaaatctaatccccgtaattaaaactaataaacgtccaaaccgaatctcttaacatcttatcgaatctataaaaaaaccgaaaacgatcttttaaataaccgacgccccgaacgtacgataaaactcttataaaactaaaacgaaaaaaacgcgatctctttatacgaatcgaaacaaacccgacgcgcaaccccacccccaccgctcgactcctcaaatacccccaacgcccctcaacctcgacataacgacgctacaatccgccgccccattactcccgaaccgctacgcttttaccctcctaaccccccgaccgaaacatcgtaacgactcccgacgacgtaaatcttacgaaaataaaaactttctccgtacgtaataaacgaacccaaaactctcgaaaaccatcgaatatcgtaaaacgataaattccgcttccgtcgccgacgcgacacgaaactaaaactaaaaaaaaataaacgaccgaactctaacccttaaaaatcgtaacgaccgaaaa

SEQ ID NO: 35847 - DNA, 819 bp, Artificial Sequence
  chemically treated genomic DNA (Homo sapiens) CpG-island No: 35847
tttttttttttatttaaaggaaagttttttttttagagtaagcgtaagatatatagtttcgtttattgttaagcgaggttaaggtaatttttaggcgcgttttattttttttttcgtagcgaaagggttaggcgtattgagcggttaggggagcgcgtacgtagaacgttagttagtaagcgtcgttttttcgggagatgtggaggaggggggcggcgtggaggaagagggggaagttggcgtttaaagttgacgggtttgaaatggtttcgatgttagtcgggattcgatttaggtgaaggtttggttttcgtagttggagttagtgggcgtttaagtcgggttttttaatattttgtcgaatttgtggaagggtcgggagcgattttttgggtagtcggcgtttcgggcgtacggtggggtttttgtgggattgggacgggagggacgcggtttttttgtgcgggtcggagtaggttcggcgcgtagttttatttttatcgttcggttttttaggtgtttttagcgttttttagtttcggtatggcgacgttgtagttcgtcgttttattgttttcgagtcgttgcgtttttatttttttggtttttcggtcgggatatcgtggcggttttcggcggcgtgggttttgcgggaatagaggtttttttcgtgcgtggtaaacgagtttaaggttttcgggagttatcgagtgtcgtggggcggtgggtttcgttttcgtcgtcggcgcggtacggagttgggattggaggaagatggacggtcgagttttggtttttgagggtcgtggcggtcgagga

SEQ ID NO: 35848 - DNA, 819 bp, Artificial Sequence
  chemically treated genomic DNA (Homo sapiens) CpG-island No: 35848
tcctcgaccgccacgaccctcaaaaaccaaaactcgaccgtccatcttcctccaatcccaactccgtaccgcgccgacgacgaaaacgaaacccaccgccccacgacactcgataactcccgaaaaccttaaactcgtttaccacgcacgaaaaaaacctctattcccgcaaaacccacgccgccgaaaaccgccacgatatcccgaccgaaaaaccaaaaaaataaaaacgcaacgactcgaaaacaataaaacgacgaactacaacgtcgccataccgaaactaaaaaacgctaaaaacacctaaaaaaccgaacgataaaaataaaactacgcgccgaacctactccgacccgcacaaaaaaaccgcgtccctcccgtcccaatcccacaaaaaccccaccgtacgcccgaaacgccgactacccaaaaaatcgctcccgacccttccacaaattcgacaaaatattaaaaaacccgacttaaacgcccactaactccaactacgaaaaccaaaccttcacctaaatcgaatcccgactaacatcgaaaccatttcaaacccgtcaactttaaacgccaacttccccctcttcctccacgccgcccccctcctccacatctcccgaaaaaacgacgcttactaactaacgttctacgtacgcgctcccctaaccgctcaatacgcctaaccctttcgctacgaaaaaaaaaataaaacgcgcctaaaaattaccttaacctcgcttaacaataaacgaaactatatatcttacgcttactctaaaaaaaaaactttcctttaaataaaaaaaaaaa

SEQ ID NO: 35849 - DNA, 682 bp, Artificial Sequence
  chemically treated genomic DNA (Homo sapiens) CpG-island No: 35849
cgttttcgtggcgggcgcgcgcggcgttcgttgttttcgtcgttttttgttcgtcgcgggtcgtttgtcggtcggcgcggtttttcgtcgcgttcgtttcgttcggcgttttcggttgtcgtattttttttcggttggtagaggtttttttttttcgtttcgtcgcgtttggcgtttttttttttttttttcgcgcggcggtagggcgtcggtttcgatttcgttgttaggagacgcgcggcggttcgggtgtcggtcgtcgcgtcgcggcggggaacgttggtgcgttttttttttggttcgtcgcgcggggggggcgcgcgttgtatgtggtcgcgttcggttggcgatggcggtttggattcgtgtcgatttgtatcgtttttgtgttcgcgtttcgcgttcgttggttagtttcgttcgtttttgttgtcgttttttacgtcggcgtcgtcgttgttcgcgtttgttttgttgagtcgttgtttttttgtttggtgggtacgtgcgtagggtttgtcgcggattgacgttggcgggacgttggttcgtgattgggcgttgtgtagagcgtcgtaagggtaacgttagcgtttacgtagtagattagtgttggaagagttttttgtagagaagtagaagaggaggttagggatggttagaatggagagcgcgtttatgt

SEQ ID NO: 35850 - DNA, 682 bp, Artificial Sequence
  chemically treated genomic DNA (Homo sapiens) CpG-island No: 35850
acataaacgcgctctccattctaaccatccctaacctcctcttctacttctctacaaaaaactcttccaacactaatctactacgtaaacgctaacgttacccttacgacgctctacacaacgcccaatcacgaaccaacgtcccgccaacgtcaatccgcgacaaaccctacgcacgtacccaccaaacaaaaaaacaacgactcaacaaaacaaacgcgaacaacgacgacgccgacgtaaaaaacgacaacaaaaacgaacgaaactaaccaacgaacgcgaaacgcgaacacaaaaacgatacaaatcgacacgaatccaaaccgccatcgccaaccgaacgcgaccacatacaacgcgcgccccccccgcgcgacgaaccaaaaaaaaaacgcaccaacgttccccgccgcgacgcgacgaccgacacccgaaccgccgcgcgtctcctaacaacgaaatcgaaaccgacgccctaccgccgcgcgaaaaaaaaaaaaaaaaacgccaaacgcgacgaaacgaaaaaaaaaaacctctaccaaccgaaaaaaaatacgacaaccgaaaacgccgaacgaaacgaacgcgacgaaaaaccgcgccgaccgacaaacgacccgcgacgaacaaaaaacgacgaaaacaacgaacgccgcgcgcgcccgccacgaaaacg

SEQ ID NO: 35851 - DNA, 682 bp, Artificial Sequence
  chemically treated genomic DNA (Homo sapiens) CpG-island No: 35851
atataggcgcgttttttattttgattatttttggtttttttttttgtttttttgtagaggatttttttagtattaatttgttgcgtgaacgttggcgttgtttttgcggcgttttatataacgtttagttacgagttaacgtttcgttagcgttaattcgcggtaagttttacgtacgtgtttattaagtaggagggtagcggtttagtagggtaagcgcggataacggcggcgtcggcgtgagaggcggtagtaggagcgagcgggattggttagcgagcgcggagcgcgggtataggggcggtgtaggtcggtacggatttaggtcgttatcgttagtcgggcgcggttatatgtagcgcgcgtttttttcgcgcgacgggttagagaagaggcgtattagcgtttttcgtcgcggcgcgacggtcggtattcgagtcgtcgcgcgttttttagtagcgaggtcggaatcgacgttttgtcgtcgcgcggagggggggaagggaggcgttaggcgcggcgaggcgggggggagagatttttgttagtcggaggggagtacgatagtcggaggcgtcgagcgggacgggcgcggcgaggggtcgcgtcgatcggtaggcggttcgcggcgggtaggagacgacgggagtagcgagcgtcgcgcgcgttcgttacgaggacg

SEQ ID NO: 35852 - DNA, 682 bp, Artificial Sequence
  chemically treated genomic DNA (Homo sapiens) CpG-island No: 35852
cgtcctcgtaacgaacgcgcgcgacgctcgctactcccgtcgtctcctacccgccgcgaaccgcctaccgatcgacgcgacccctcgccgcgcccgtcccgctcgacgcctccgactatcgtactcccctccgactaacaaaaatctctcccccccgcctcgccgcgcctaacgcctcccttccccccctccgcgcgacgacaaaacgtcgattccgacctcgctactaaaaaacgcgcgacgactcgaataccgaccgtcgcgccgcgacgaaaaacgctaatacgcctcttctctaacccgtcgcgcgaaaaaaacgcgcgctacatataaccgcgcccgactaacgataacgacctaaatccgtaccgacctacaccgcccctatacccgcgctccgcgctcgctaaccaatcccgctcgctcctactaccgcctctcacgccgacgccgccgttatccgcgcttaccctactaaaccgctaccctcctacttaataaacacgtacgtaaaacttaccgcgaattaacgctaacgaaacgttaactcgtaactaaacgttatataaaacgccgcaaaaacaacgccaacgttcacgcaacaaattaatactaaaaaaatcctctacaaaaaaacaaaaaaaaaaaccaaaaataatcaaaataaaaaacgcgcctatat

SEQ ID NO: 35853 - DNA, 573 bp, Artificial Sequence
  chemically treated genomic DNA (Homo sapiens) CpG-island No: 35853
gggcgtcgtgcgtattgtattttttttggcggattattcgttgggtcggtaggcgcgcgtatttaggtgttattttttagcgtcgtgcgcggataggtaggcgcgtgtttcggcgcgtcgtttcgtatttatttacgcgcggtttttttgtatttcggttagtattcgtagcgcgttgggcgagtcggatcggaagttgaagaagtgaagcgtcgcgcgcgtcgtttgttgtaggagtttgcgcgggattttagtattttgaggttgtttagggtcgtcggggttttcggatttcgcgggcgtcgttatcggggcgagtaatagtagtagcgcgagtagcggggcggtggggcgcgggtttttgggttcggattagggagtaggtagtcgttgtcggcggggttgtatggacgtaggaaagttggttcggtattcgatagatacgggttcggagcgggtagtgtcggcgttcgcggaaataaggtcgtggtggggtttttttttttcgtttttagggcgaaggtttgtagcgaagttcgggtttttatggggtttttttttttttaacgtttt

SEQ ID NO: 35854 - DNA, 573 bp, Artificial Sequence
  chemically treated genomic DNA (Homo sapiens) CpG-island No: 35854
aaaacgttaaaaaaaaaaaaaccccataaaaacccgaacttcgctacaaaccttcgccctaaaaacgaaaaaaaaaaaccccaccacgaccttatttccgcgaacgccgacactacccgctccgaacccgtatctatcgaataccgaaccaactttcctacgtccatacaaccccgccgacaacgactacctactccctaatccgaacccaaaaacccgcgccccaccgccccgctactcgcgctactactattactcgccccgataacgacgcccgcgaaatccgaaaaccccgacgaccctaaacaacctcaaaatactaaaatcccgcgcaaactcctacaacaaacgacgcgcgcgacgcttcacttcttcaacttccgatccgactcgcccaacgcgctacgaatactaaccgaaatacaaaaaaaccgcgcgtaaataaatacgaaacgacgcgccgaaacacgcgcctacctatccgcgcacgacgctaaaaaataacacctaaatacgcgcgcctaccgacccaacgaataatccgccaaaaaaaatacaatacgcacgacgccc

SEQ ID NO: 35855 - DNA, 573 bp, Artificial Sequence
  chemically treated genomic DNA (Homo sapiens) CpG-island No: 35855
gaaacgttgaaaaaggaggggttttatggggattcgggtttcgttatagattttcgttttgggggcggaggggaggggttttattacggttttattttcgcgagcgtcggtattgttcgtttcgagttcgtgtttgtcgggtgtcgagttaatttttttgcgtttatgtagtttcgtcggtaacggttgtttgttttttggttcgggtttaggggttcgcgttttatcgtttcgttgttcgcgttgttgttgttgttcgtttcggtggcggcgttcgcggggttcggggatttcgacgattttgggtagttttaggatgttggggtttcgcgtaggtttttgtagtaggcggcgcgcgcggcgttttatttttttaattttcggttcggttcgtttagcgcgttacgagtgttggtcgaggtgtaggagggtcgcgcgtgggtgagtgcggagcgacgcgtcggggtacgcgtttgtttgttcgcgtacggcgttgggaggtgatatttgggtacgcgcgtttgtcggtttaacggatggttcgttagggaaggtgtagtgcgtacgacgttt

SEQ ID NO: 35856 - DNA, 573 bp, Artificial Sequence
  chemically treated genomic DNA (Homo sapiens) CpG-island No: 35856
aaacgtcgtacgcactacaccttccctaacgaaccatccgttaaaccgacaaacgcgcgtacccaaatatcacctcccaacgccgtacgcgaacaaacaaacgcgtaccccgacgcgtcgctccgcactcacccacgcgcgaccctcctacacctcgaccaacactcgtaacgcgctaaacgaaccgaaccgaaaattaaaaaaataaaacgccgcgcgcgccgcctactacaaaaacctacgcgaaaccccaacatcctaaaactacccaaaatcgtcgaaatccccgaaccccgcgaacgccgccaccgaaacgaacaacaacaacaacgcgaacaacgaaacgataaaacgcgaacccctaaacccgaaccaaaaaacaaacaaccgttaccgacgaaactacataaacgcaaaaaaattaactcgacacccgacaaacacgaactcgaaacgaacaataccgacgctcgcgaaaataaaaccgtaataaaacccctcccctccgcccccaaaacgaaaatctataacgaaacccgaatccccataaaacccctcctttttcaacgtttc

SEQ ID NO: 35857 - DNA, 1108 bp, Artificial Sequence
  chemically treated genomic DNA (Homo sapiens) CpG-island No: 35857
ttcgttttcgtattttatttcgtttttgcgggaggttcggcgtatgaatcgcgattatttttgcgttttcgcggagtcgggtagaagagacgcgcgcgttgttttagtagtttcggttttcgtcgttcgtatttgagatttgtatcgtttggaagcggggtacgtaggttaggaagtcggcgacgttttcgtagttttcgggaaaggtgattaggcggttgttaagtattcgtaggttggggtttacgaatacgcgtagggggaagggttttatttggcggagcgcgcgttggcggggcgggtattttcgatatagcgtttcggggagttttagcgttagtatttgtcgcggtatttttagttgcggcgcgtttaggtttacgtagcgtcgtcgtcgtattatttggattagtcgttgcgttagtcgttgtagttcgggttcgtttagttgcgttcgttttatcggggtcgttacgtcgcgtagtatcgggttttcgatttggtatacgtgcgagaacggcggttcgggaggatttagtattagacgttttaggtggcgttaataggagcgtcgtagcgtcgggttttcgacgtcgttcggggcggtcgtggagttgtaagttcggatatcgacggttgtcgtttcgttttacggtacggtcgtttatagtggttaaagatttagcgcgttttatagtcgggttatggcggtttttttaatagtgattcggttcgtttttttcggtcgtagcgcggggtacgtcgggaagcgtcgtcggttagtatatagcgaagtcgcgattggattttcgtttttttgtttagattggtagtgagtatcgttttttttcgtttttttttcgggagcgttttttcgtttttcgaattcgtttcggattttttagggcgaggtagttttggttatttcgcgtcgggaattttacgtatcgcgttttggaggtaggggacgtcggttagggttttacgttgggcggttcggtttgcgttttcgttcgtttttttttcgggtaggttgggttcgcgggttttaggcgtggtttttcggcgggaggttttggtgttggagttgtgagttcgggttttagcg

SEQ ID NO: 35858 - DNA, 1108 bp, Artificial Sequence
  chemically treated genomic DNA (Homo sapiens) CpG-island No: 35858
cgctaaaacccgaactcacaactccaacaccaaaacctcccgccgaaaaaccacgcctaaaacccgcgaacccaacctacccgaaaaaaaaacgaacgaaaacgcaaaccgaaccgcccaacgtaaaaccctaaccgacgtcccctacctccaaaacgcgatacgtaaaattcccgacgcgaaataaccaaaactacctcgccctaaaaaatccgaaacgaattcgaaaaacgaaaaaacgctcccgaaaaaaaaacgaaaaaaaacgatactcactaccaatctaaacaaaaaaacgaaaatccaatcgcgacttcgctatatactaaccgacgacgcttcccgacgtaccccgcgctacgaccgaaaaaaacgaaccgaatcactattaaaaaaaccgccataacccgactataaaacgcgctaaatctttaaccactataaacgaccgtaccgtaaaacgaaacgacaaccgtcgatatccgaacttacaactccacgaccgccccgaacgacgtcgaaaacccgacgctacgacgctcctattaacgccacctaaaacgtctaatactaaatcctcccgaaccgccgttctcgcacgtataccaaatcgaaaacccgatactacgcgacgtaacgaccccgataaaacgaacgcaactaaacgaacccgaactacaacgactaacgcaacgactaatccaaataatacgacgacgacgctacgtaaacctaaacgcgccgcaactaaaaataccgcgacaaatactaacgctaaaactccccgaaacgctatatcgaaaatacccgccccgccaacgcgcgctccgccaaataaaacccttccccctacgcgtattcgtaaaccccaacctacgaatacttaacaaccgcctaatcacctttcccgaaaactacgaaaacgtcgccgacttcctaacctacgtaccccgcttccaaacgatacaaatctcaaatacgaacgacgaaaaccgaaactactaaaacaacgcgcgcgtctcttctacccgactccgcgaaaacgcaaaaataatcgcgattcatacgccgaacctcccgcaaaaacgaaataaaatacgaaaacgaa

SEQ ID NO: 35859 - DNA, 1108 bp, Artificial Sequence
  chemically treated genomic DNA (Homo sapiens) CpG-island No: 35859
cgttggggttcgagtttatagttttagtattagagtttttcgtcgaggagttacgtttggagttcgcgggtttagtttgttcggagggagggcgagcggagacgtaggtcgaatcgtttagcgtggggttttagtcggcgttttttgtttttagaacgcggtgcgtgaggttttcggcgcggggtggttaggattgtttcgttttggaaggttcggggcgggttcgggaggcgggaaggcgttttcgggaggagagcggaagggggcggtgtttattgttagtttaagtaggaaggcggggatttagtcgcggtttcgttgtgtgttggtcgacggcgtttttcggcgtgtttcgcgttgcggtcggaaggggcgggtcgggttattgttaagggggtcgttatggttcggttgtggggcgcgttgagtttttggttattgtgggcggtcgtgtcgtggggcggggcggtagtcgtcggtgttcgggtttgtagttttacggtcgtttcggacggcgtcgagggttcggcgttgcggcgtttttattggcgttatttgaggcgtttggtgttgggttttttcgaatcgtcgttttcgtacgtgtgttaagtcggggattcggtgttgcgcggcgtggcggtttcggtggagcgggcgtagttaggcgggttcgagttgtagcggttgacgtaacggttggtttaggtgatgcggcggcggcgttgcgtgggtttaagcgcgtcgtagttgggggtgtcgcggtaggtgttggcgttggagtttttcgaggcgttgtgtcgggagtgttcgtttcgttagcgcgcgtttcgttaaatggagtttttttttttgcgcgtgttcgtgaattttagtttgcgagtgtttgatagtcgtttggttatttttttcgagggttgcgagagcgtcgtcggttttttggtttgcgtgtttcgtttttaggcggtgtagattttaggtgcgggcggcggggatcggggttgttggagtagcgcgcgcgttttttttgttcgatttcgcgagagcgtagaagtggtcgcggtttatacgtcggatttttcgtaggagcgaagtgggatgcgggagcgga

SEQ ID NO: 35860 - DNA, 1108 bp, Artificial Sequence
  chemically treated genomic DNA (Homo sapiens) CpG-island No: 35860
tccgctcccgcatcccacttcgctcctacgaaaaatccgacgtataaaccgcgaccacttctacgctctcgcgaaatcgaacaaaaaaaacgcgcgcgctactccaacaaccccgatccccgccgcccgcacctaaaatctacaccgcctaaaaacgaaacacgcaaaccaaaaaaccgacgacgctctcgcaaccctcgaaaaaaataaccaaacgactatcaaacactcgcaaactaaaattcacgaacacgcgcaaaaaaaaaaactccatttaacgaaacgcgcgctaacgaaacgaacactcccgacacaacgcctcgaaaaactccaacgccaacacctaccgcgacacccccaactacgacgcgcttaaacccacgcaacgccgccgccgcatcacctaaaccaaccgttacgtcaaccgctacaactcgaacccgcctaactacgcccgctccaccgaaaccgccacgccgcgcaacaccgaatccccgacttaacacacgtacgaaaacgacgattcgaaaaaacccaacaccaaacgcctcaaataacgccaataaaaacgccgcaacgccgaaccctcgacgccgtccgaaacgaccgtaaaactacaaacccgaacaccgacgactaccgccccgccccacgacacgaccgcccacaataaccaaaaactcaacgcgccccacaaccgaaccataacgacccccttaacaataacccgacccgccccttccgaccgcaacgcgaaacacgccgaaaaacgccgtcgaccaacacacaacgaaaccgcgactaaatccccgccttcctacttaaactaacaataaacaccgcccccttccgctctcctcccgaaaacgccttcccgcctcccgaacccgccccgaaccttccaaaacgaaacaatcctaaccaccccgcgccgaaaacctcacgcaccgcgttctaaaaacaaaaaacgccgactaaaaccccacgctaaacgattcgacctacgtctccgctcgccctccctccgaacaaactaaacccgcgaactccaaacgtaactcctcgacgaaaaactctaatactaaaactataaactcgaaccccaacg

SEQ ID NO: 35861 - DNA, 526 bp, Artificial Sequence
  chemically treated genomic DNA (Homo sapiens) CpG-island No: 35861
  unsure (372)
ggtttgggcggtgtggattttaagttttagtgaggtattgcggcggtatatcgggaattacggcgtttgagaagggggtcgggtttttcgagttttttttttttttagaagttcgcgggcggttcggaatcgtttttttttttttattggtcgcgcggagtcgggacggtcggcgtttcgtttttcggtttcgggcgttcgtgttgtatttatcggtcgttttatgttcgatttaacgtcgtgtttcgtgtcgggatgggcggtcggagcggcgcgcgcgttattcgcgtttcgattcgcgcgtgagtgtagtgcgggtagttgtcgacgtgtagtttgcgttggttattttcgtaatggtcgggttttttngttatttatttgtgtgttcgcgtgttttgcgtgtgggcgttacgaagtttttggtttcggggcgttcggtagtgagtagtaggtagcgcgcgcgaggttacggttggtatatggaggttagtttaatttgttcgtgtgttttaagtttttattt

SEQ ID NO: 35862 - DNA, 526 bp, Artificial Sequence
  chemically treated genomic DNA (Homo sapiens) CpG-island No: 35862
  unsure (155)
aaataaaaacttaaaacacacgaacaaattaaactaacctccatataccaaccgtaacctcgcgcgcgctacctactactcactaccgaacgccccgaaaccaaaaacttcgtaacgcccacacgcaaaacacgcgaacacacaaataaataacnaaaaaacccgaccattacgaaaataaccaacgcaaactacacgtcgacaactacccgcactacactcacgcgcgaatcgaaacgcgaataacgcgcgcgccgctccgaccgcccatcccgacacgaaacacgacgttaaatcgaacataaaacgaccgataaatacaacacgaacgcccgaaaccgaaaaacgaaacgccgaccgtcccgactccgcgcgaccaataaaaaaaaaaaaacgattccgaaccgcccgcgaacttctaaaaaaaaaaaaaactcgaaaaacccgacccccttctcaaacgccgtaattcccgatataccgccgcaatacctcactaaaacttaaaatccacaccgcccaaacc

SEQ ID NO: 35863 - DNA, 526 bp, Artificial Sequence
  chemically treated genomic DNA (Homo sapiens) CpG-island No: 35863
  unsure (155)
aagtggaaatttgaagtatacgagtagattggattagtttttatatattagtcgtggtttcgcgcgcgttgtttgttgtttattgtcgggcgtttcgagattaggggtttcgtggcgtttatacgtagggtacgcgagtatataggtgaatagtngggaagttcgattattgcgagagtggttagcgtaagttgtacgtcggtaattgttcgtattgtatttacgcgcgagtcgagacgcgaatagcgcgcgcgtcgtttcggtcgtttatttcggtacggagtacgacgttagatcggatatgagacgatcgatgggtatagtacgagcgttcggagtcggaaagcggggcgtcgatcgtttcggtttcgcgcggttaatgagagaaagaaagcgatttcgagtcgttcgcgggtttttgggagggaaaggaattcggagggttcggttttttttttagacgtcgtagttttcgatgtgtcgtcgtaatgttttattggggtttgaagtttatatcgtttaggtt

SEQ ID NO: 35864 - DNA, 526 bp, Artificial Sequence
  chemically treated genomic DNA (Homo sapiens) CpG-island No: 35864
  unsure (372)
aacctaaacgatataaacttcaaaccccaataaaacattacgacgacacatcgaaaactacgacgtctaaaaaaaaaaccgaaccctccgaattcctttccctcccaaaaacccgcgaacgactcgaaatcgctttctttctctcattaaccgcgcgaaaccgaaacgatcgacgccccgctttccgactccgaacgctcgtactatacccatcgatcgtctcatatccgatctaacgtcgtactccgtaccgaaataaacgaccgaaacgacgcgcgcgctattcgcgtctcgactcgcgcgtaaatacaatacgaacaattaccgacgtacaacttacgctaaccactctcgcaataatcgaacttcccnactattcacctatatactcgcgtaccctacgtataaacgccacgaaacccctaatctcgaaacgcccgacaataaacaacaaacaacgcgcgcgaaaccacgactaatatataaaaactaatccaatctactcgtatacttcaaatttccactt

SEQ ID NO: 35865 - DNA, 903 bp, Artificial Sequence
  chemically treated genomic DNA (Homo sapiens) CpG-island No: 35865
aaaagtcgggtcgagtaaaaagtcgcggcggcggcggggggtaaaaagtcgcggtaggtagaaagtcgcggaggcggggggtaaaaagttacggcggcgggggtgaaaaagtcgcggcggtgggtgggggggtaaaaagtcgtagcgataaaaagtcgcggcgggggggaaaaagtcgcggtagcgggggggggggcggggataaaaagttaggtcgggtaaaaagtcgtagtagcggggggtaaaagtcgtagcgggtagaaaggcgcggcggcggggtaaaaagtcgaggtcggtaaaaagtcgcggcggtagggggaaaaagtcgcggcggcgggggtgtaaaaagtcgcggtgggtaaataatcgcggtatcgggggcgttaaaaagtcgcggagggtaaaaagtcgcgtcggcggggggggtaaaaagtcgcggcgggtaaataatcgcggtatcggaggtaggggttaaaaagtcgcgtcggcggaggagcgaaaagtcggggcgggtaaaaagtcgcgagggcggttgaggggcggggaatcgcggcggtaggggggtaaaaagtcgcggcgggtataaattcgaggcggcggggaaaaggttacggcgttagggggtaaaaagtcgtcgcggtaaaaagttatcgcggcgggggtgaaaaagtcgcggcggtcggggggagtaaaaagtcgcggcggtaaaaagttacggtagtgggggtgaaaaagtcgcggcggtgggggggtaaaaagtcgggtcgagtaaaaagtcgcggcggcgagggggtaaaaagtcgcggcgacgcggggtaaaatagtggagatggggtagaaggtcggtatagtttggttttgttggagtgtgatatgataggaaatgtgtagttaaagataaaa

SEQ ID NO: 35866 - DNA, 903 bp, Artificial Sequence
  chemically treated genomic DNA (Homo sapiens) CpG-island No: 35866
ttttatctttaactacacatttcctatcatatcacactccaacaaaaccaaactataccgaccttctaccccatctccactattttaccccgcgtcgccgcgactttttaccccctcgccgccgcgactttttactcgacccgactttttacccccccaccgccgcgactttttcacccccactaccgtaactttttaccgccgcgactttttactccccccgaccgccgcgactttttcacccccgccgcgataactttttaccgcgacgactttttaccccctaacgccgtaaccttttccccgccgcctcgaatttatacccgccgcgactttttacccccctaccgccgcgattccccgcccctcaaccgccctcgcgactttttacccgccccgacttttcgctcctccgccgacgcgactttttaacccctacctccgataccgcgattatttacccgccgcgactttttaccccccccgccgacgcgactttttaccctccgcgactttttaacgcccccgataccgcgattatttacccaccgcgactttttacacccccgccgccgcgactttttccccctaccgccgcgactttttaccgacctcgactttttaccccgccgccgcgcctttctacccgctacgacttttaccccccgctactacgactttttacccgacctaactttttatccccgcccccccccccgctaccgcgactttttcccccccgccgcgactttttatcgctacgactttttacccccccacccaccgccgcgactttttcacccccgccgccgtaactttttaccccccgcctccgcgactttctacctaccgcgactttttaccccccgccgccgccgcgactttttactcgacccgactttt

SEQ ID NO: 35867 - DNA, 903 bp, Artificial Sequence
  chemically treated genomic DNA (Homo sapiens) CpG-island No: 35867
ttttgtttttggttgtatattttttattatattatattttagtaaagttaagttgtgtcggttttttattttatttttattattttgtttcgcgtcgtcgcggttttttgttttttcgtcgtcgcggttttttgttcgattcggttttttgtttttttatcgtcgcggtttttttatttttattgtcgtggttttttgtcgtcgcggttttttgtttttttcgatcgtcgcggtttttttattttcgtcgcggtggttttttgtcgcggcggttttttgttttttgacgtcgtggtttttttttcgtcgtttcgggtttatgttcgtcgcggttttttgtttttttgtcgtcgcggtttttcgttttttaatcgttttcgcggttttttgttcgtttcggtttttcgttttttcgtcgacgcggttttttgatttttgttttcggtgtcgcggttatttgttcgtcgcggttttttgtttttttcgtcgacgcggttttttgtttttcgcgattttttggcgttttcggtgtcgcggttatttgtttatcgcggttttttgtattttcgtcgtcgcggttttttttttttgtcgtcgcggttttttgtcggtttcggttttttgtttcgtcgtcgcgtttttttgttcgttgcggtttttatttttcgttgttgcggttttttgttcgatttggttttttgttttcgttttttttttcgttgtcgcggttttttttttttcgtcgcggttttttgtcgttgcggttttttgtttttttatttatcgtcgcggtttttttattttcgtcgtcgtggttttttgtttttcgttttcgcggttttttgtttgtcgcggttttttatttttcgtcgtcgtcgcggttttttgttcgattcggttttt

SEQ ID NO: 35868 - DNA, 903 bp, Artificial Sequence
  chemically treated genomic DNA (Homo sapiens) CpG-island No: 35868
aaaaaccgaatcgaacaaaaaaccgcgacgacgacgaaaaataaaaaaccgcgacaaacaaaaaaccgcgaaaacgaaaaacaaaaaaccacgacgacgaaaataaaaaaaccgcgacgataaataaaaaaacaaaaaaccgcaacgacaaaaaaccgcgacgaaaaaaaaaaaaccgcgacaacgaaaaaaaaaacgaaaacaaaaaaccaaatcgaacaaaaaaccgcaacaacgaaaaataaaaaccgcaacgaacaaaaaaacgcgacgacgaaacaaaaaaccgaaaccgacaaaaaaccgcgacgacaaaaaaaaaaaaccgcgacgacgaaaatacaaaaaaccgcgataaacaaataaccgcgacaccgaaaacgccaaaaaatcgcgaaaaacaaaaaaccgcgtcgacgaaaaaaacaaaaaaccgcgacgaacaaataaccgcgacaccgaaaacaaaaatcaaaaaaccgcgtcgacgaaaaaacgaaaaaccgaaacgaacaaaaaaccgcgaaaacgattaaaaaacgaaaaaccgcgacgacaaaaaaacaaaaaaccgcgacgaacataaacccgaaacgacgaaaaaaaaaccacgacgtcaaaaaacaaaaaaccgccgcgacaaaaaaccaccgcgacgaaaataaaaaaaccgcgacgatcgaaaaaaacaaaaaaccgcgacgacaaaaaaccacgacaataaaaataaaaaaaccgcgacgataaaaaaacaaaaaaccgaatcgaacaaaaaaccgcgacgacgaaaaaacaaaaaaccgcgacgacgcgaaacaaaataataaaaataaaataaaaaaccgacacaacttaactttactaaaatataatataataaaaaatatacaaccaaaaacaaaa

SEQ ID NO: 35869 - DNA, 1375 bp, Artificial Sequence
  chemically treated genomic DNA (Homo sapiens) CpG-island No: 35869
cgtaggttgttaacggagatgtcgatgagtttttggagttgttcgtattgttgtagtgttcggttggtcgcggtttttgtattttttttcgcgatagtcgcgttattttcgttatcgttttttttttttttttttaacgcggtcgagcgtagcgttgttttatgtaggttgtagcggtttaggagtagagttcggggcgttagcgtttaggtaaggaacgttcgaattaggagagttggataaggagcgtttttcggcgttgttttagttaggacgtcggtagagttggtagtcgagtttgtcgatttcgtttttagattcgcggcggtgggggtaaaaagtcgcggtgatgggggtaataagtcgcggtggcgggggtaaaagtcgcggcggcggaggtaaaaagtcgtaaaaagtcgtagcgtcgggggtaaaaagtcgcgacggcgggggtaaaaagtcgcggtggcgggggtaagaagtcgcggtggcgggggtaaaaagtaggggcgggaaaaatttgcggcggtgggggaaaaaagtttcggtggcggggattaaaagttttaaaaagtcgcggcgttgggtgttaaaagtcgtaaaaagtcgcggcggagggggttaaaagtcgcggcggtaaaaagttacgatagcggggatataaagtcgtaaaaatttttagaggtaggggtagaaagtcgtcgttgtgggggtaaaaagtcgcggcgaggggggtaagaagtcgcggcggtaaaaattcgcggcggggggtttaaaaagcggttggggtgataaaaagttacggtggcggaggtaggaagtcgcgtagggggtaaggagtcgcggttgcgggggtaaaacgtcgcggtggtagggataaatagtagtaaaaagtcgcggcgtaaaaagttcgggcggtgggggtaagaagtcgcggtaggaaaaattcgcggcggtaaaaagtcgtaaaaagtcgcggcgtcgggggttaaaagttataaaaagtcgcggcggaaaaagtcgcggtggcgggggtaaaaagttgcggtagtagggggaaaaaagtcgtcgcggcggggggagaaagacgtaaaaagtcgcggtagtaaaaagtcgcggcggcgagggtaaagagttttaaaaagttacggcggtaggggttaaatttcgcgaggtcgggggtagaaagtcgcggtggtaggggtagaaagtcgcggtggcgggggtagaaagtaacggcggcgggggtaaaaagtcgtaaaaattcgtagtggcgggggtaaaaatttatggcggtaaaaagtcgcgtttgcgggtgtaaaatagtggaaatggggtagaaggttagtatagtttggtatttttgaagtgtgat

SEQ ID NO: 35870 - DNA, 1375 bp, Artificial Sequence
  chemically treated genomic DNA (Homo sapiens) CpG-island No: 35870
atcacacttcaaaaataccaaactatactaaccttctaccccatttccactattttacacccgcaaacgcgactttttaccgccataaatttttacccccgccactacgaatttttacgactttttacccccgccgccgttactttctacccccgccaccgcgactttctacccctaccaccgcgactttctacccccgacctcgcgaaatttaacccctaccgccgtaactttttaaaactctttaccctcgccgccgcgactttttactaccgcgactttttacgtctttctccccccgccgcgacgacttttttccccctactaccgcaactttttacccccgccaccgcgactttttccgccgcgactttttataacttttaacccccgacgccgcgactttttacgactttttaccgccgcgaatttttcctaccgcgacttcttacccccaccgcccgaactttttacgccgcgactttttactactatttatccctaccaccgcgacgttttacccccgcaaccgcgactccttaccccctacgcgacttcctacctccgccaccgtaactttttatcaccccaaccgctttttaaaccccccgccgcgaatttttaccgccgcgacttcttacccccctcgccgcgactttttacccccacaacgacgactttctacccctacctctaaaaatttttacgactttatatccccgctatcgtaactttttaccgccgcgacttttaaccccctccgccgcgactttttacgacttttaacacccaacgccgcgactttttaaaacttttaatccccgccaccgaaacttttttcccccaccgccgcaaatttttcccgcccctactttttacccccgccaccgcgacttcttacccccgccaccgcgactttttacccccgccgtcgcgactttttacccccgacgctacgactttttacgactttttacctccgccgccgcgacttttacccccgccaccgcgacttattacccccatcaccgcgactttttacccccaccgccgcgaatctaaaaacgaaatcgacaaactcgactaccaactctaccgacgtcctaactaaaacaacgccgaaaaacgctccttatccaactctcctaattcgaacgttccttacctaaacgctaacgccccgaactctactcctaaaccgctacaacctacataaaacaacgctacgctcgaccgcgttaaaaaaaaaaaaaaaaaacgataacgaaaataacgcgactatcgcgaaaaaaaatacaaaaaccgcgaccaaccgaacactacaacaatacgaacaactccaaaaactcatcgacatctccgttaacaacctacg

SEQ ID NO: 35871 - DNA, 1375 bp, Artificial Sequence
  chemically treated genomic DNA (Homo sapiens) CpG-island No: 35871
attatattttaggaatgttaagttgtgttggttttttattttatttttattgttttgtattcgtagacgcggttttttgtcgttatggatttttgttttcgttattgcgggtttttgcgattttttgttttcgtcgtcgttgttttttgttttcgttatcgcggttttttgtttttgttatcgcggttttttgttttcggtttcgcggaatttagtttttgtcgtcgtggttttttggggttttttgttttcgtcgtcgcggttttttgttgtcgcggttttttgcgttttttttttttcgtcgcggcggtttttttttttttgttgtcgtagttttttgttttcgttatcgcgatttttttcgtcgcggttttttatggtttttggttttcggcgtcgcggttttttgcggttttttgtcgtcgcgggttttttttgtcgcggttttttgtttttatcgttcgggttttttgcgtcgcggttttttgttgttatttgtttttgttatcgcggcgttttgttttcgtagtcgcggttttttgttttttacgcggttttttgttttcgttatcgtggttttttattattttagtcgttttttgaatttttcgtcgcgggtttttgtcgtcgcggttttttgtttttttcgtcgcggttttttatttttatagcggcggttttttgtttttgtttttgagggtttttgcggttttatgttttcgttgtcgtggttttttgtcgtcgcggtttttggtttttttcgtcgcggttttttgcggtttttggtatttaacgtcgcggttttttggggtttttggttttcgttatcggggttttttttttttatcgtcgtaggtttttttcgtttttgttttttgttttcgttatcgcggttttttattttcgttatcgcgattttttgttttcgtcgtcgcggttttttgttttcgacgttgcggttttttacggttttttgttttcgtcgtcgcggtttttgttttcgttatcgcggtttgttgtttttattatcgcggttttttgtttttatcgtcgcgggtttgagggcgggatcggtagattcggttgttagttttatcggcgttttggttaaggtagcgtcgaggggcgttttttgtttagtttttttggttcgggcgttttttgtttagacgttggcgtttcgggttttgtttttgggtcgttgtagtttgtatagagtagcgttgcgttcggtcgcgttgggagagaagaaggagggcggtggcgggggtgacgcggttatcgcggagggaggtgtaggggtcgcggttagtcggatattgtagtagtgcgggtagttttagaagtttatcggtattttcgttggtagtttgcg

SEQ ID NO: 35872 - DNA, 1375 bp, Artificial Sequence
  chemically treated genomic DNA (Homo sapiens) CpG-island No: 35872
cgcaaactaccaacgaaaataccgataaacttctaaaactacccgcactactacaatatccgactaaccgcgacccctacacctccctccgcgataaccgcgtcacccccgccaccgccctccttcttctctcccaacgcgaccgaacgcaacgctactctatacaaactacaacgacccaaaaacaaaacccgaaacgccaacgtctaaacaaaaaacgcccgaaccaaaaaaactaaacaaaaaacgcccctcgacgctaccttaaccaaaacgccgataaaactaacaaccgaatctaccgatcccgccctcaaacccgcgacgataaaaacaaaaaaccgcgataataaaaacaacaaaccgcgataacgaaaacaaaaaccgcgacgacgaaaacaaaaaaccgtaaaaaaccgcaacgtcgaaaacaaaaaaccgcgacgacgaaaacaaaaaatcgcgataacgaaaataaaaaaccgcgataacgaaaacaaaaaacaaaaacgaaaaaaacctacgacgataaaaaaaaaaaaccccgataacgaaaaccaaaaaccccaaaaaaccgcgacgttaaataccaaaaaccgcaaaaaaccgcgacgaaaaaaaccaaaaaccgcgacgacaaaaaaccacgacaacgaaaacataaaaccgcaaaaaccctcaaaaacaaaaacaaaaaaccgccgctataaaaataaaaaaccgcgacgaaaaaaacaaaaaaccgcgacgacaaaaacccgcgacgaaaaattcaaaaaacgactaaaataataaaaaaccacgataacgaaaacaaaaaaccgcgtaaaaaacaaaaaaccgcgactacgaaaacaaaacgccgcgataacaaaaacaaataacaacaaaaaaccgcgacgcaaaaaacccgaacgataaaaacaaaaaaccgcgacaaaaaaaacccgcgacgacaaaaaaccgcaaaaaaccgcgacgccgaaaaccaaaaaccataaaaaaccgcgacgaaaaaaatcgcgataacgaaaacaaaaaactacgacaacaaaaaaaaaaaaaccgccgcgacgaaaaaaaaaaaacgcaaaaaaccgcgacaacaaaaaaccgcgacgacgaaaacaaaaaaccccaaaaaaccacgacgacaaaaactaaattccgcgaaaccgaaaacaaaaaaccgcgataacaaaaacaaaaaaccgcgataacgaaaacaaaaaacaacgacgacgaaaacaaaaaatcgcaaaaacccgcaataacgaaaacaaaaatccataacgacaaaaaaccgcgtctacgaatacaaaacaataaaaataaaataaaaaaccaacacaacttaacattcctaaaatataat

SEQ ID NO: 35873 - DNA, 869 bp, Artificial Sequence
  chemically treated genomic DNA (Homo sapiens) CpG-island No: 35873
tattttcgtagaatattggtatgtagtttggagtattttatagcggttatatgaggcgcgagggtaaagttacggtttcgtacgttcgtagaataggagtacgtgttgtttgtagtattttaacggtatttaggtaaaggttcgcgggtgagattattgtttttcgttttaatagtatagcggtacgtgtcgtttggagtattttacggtagttaacgcgaaggcgttagggtgaaattacgtttttttatttcgatagaatagcggtacgtgttgtcggcgtattttgtggtagttacgcgaaggttcgaggtcgcgagcgtgtgtttagttagggtcggttgcgggtattcggttttgcgttttatttcgttgtggtttggttgttgattcgtaggtacgtttacggttattttattatggcgaggatggcggtattgtggcggaagatgagagataatttttagagtaaggagtttcgggaatacgtgagtagtatttatttttggggtttcgcgtttagttggggtttttcgttggttgtttttaaagatatgaaggcgtcgtcggagattattagtggtcgtatgataatagcgtttattttgtattcggcgatttttatgcgtttcgtttatcgcgtatagtttcgaaatttgttgttgatggcgtgttattgtattaacgtgatggcgtagagtgtgtaggttagtcgttatttattttattattacggcggcggcggcgtcgaggttaaagttcgcgatttttcggttatcgtcgtcgttgttattagttcgggtttttagttttcgaaataagttttttaagaattgagagggtttgattttatttttgtaggttataag

SEQ ID NO: 35874 - DNA, 869 bp, Artificial Sequence
  chemically treated genomic DNA (Homo sapiens) CpG-island No: 35874
cttataacctacaaaaataaaatcaaaccctctcaattcttaaaaaacttatttcgaaaactaaaaacccgaactaataacaacgacgacgataaccgaaaaatcgcgaactttaacctcgacgccgccgccgccgtaataataaaataaataacgactaacctacacactctacgccatcacgttaatacaataacacgccatcaacaacaaatttcgaaactatacgcgataaacgaaacgcataaaaatcgccgaatacaaaataaacgctattatcatacgaccactaataatctccgacgacgccttcatatctttaaaaacaaccaacgaaaaaccccaactaaacgcgaaaccccaaaaataaatactactcacgtattcccgaaactccttactctaaaaattatctctcatcttccgccacaataccgccatcctcgccataataaaataaccgtaaacgtacctacgaatcaacaaccaaaccacaacgaaataaaacgcaaaaccgaatacccgcaaccgaccctaactaaacacacgctcgcgacctcgaaccttcgcgtaactaccacaaaatacgccgacaacacgtaccgctattctatcgaaataaaaaaacgtaatttcaccctaacgccttcgcgttaactaccgtaaaatactccaaacgacacgtaccgctatactattaaaacgaaaaacaataatctcacccgcgaacctttacctaaataccgttaaaatactacaaacaacacgtactcctattctacgaacgtacgaaaccgtaactttaccctcgcgcctcatataaccgctataaaatactccaaactacataccaatattctacgaaaata

SEQ ID NO: 35875 - DNA, 869 bp, Artificial Sequence
  chemically treated genomic DNA (Homo sapiens) CpG-island No: 35875
tttgtgatttgtagagatgagattaggtttttttagtttttaagaagtttgtttcgggggttgggaattcgggttggtggtagcggcggcggtagtcggagggtcgcgggttttagtttcggcgtcgtcgtcgtcgtagtagtagagtaggtagcgattggtttgtatattttgcgttattacgttggtatagtggtacgttattagtagtaggtttcgaggttgtacgcggtaggcgaagcgtatgaagatcgtcgagtataagatgagcgttgttgttatgcggttattgatgattttcggcgacgtttttatgtttttaaaggtagttagcggaaggttttagttgaacgcgggattttagaagtgagtgttgtttacgtattttcggaattttttgttttggaagttattttttatttttcgttatagtatcgttattttcgttatgatggaatagtcgtaggcgtgtttacggattaatagttagattataacgaaatagagcgtaaagtcgagtattcgtagtcgattttgattgggtatacgttcgcgatttcgagttttcgcgtggttgttataaagtgcgtcgatagtacgtgtcgttgttttgtcggaatgaaagggcgtggttttattttggcgttttcgcgttgattatcgtaaagtgttttagacggtacgtgtcgttgtgttattggggcgaaaggtagtggttttattcgcgggtttttgtttgaatgtcgttaaagtgttgtagatagtacgtgtttttgttttgcgggcgtgcgaggtcgtggttttgttttcgcgttttatgtaatcgttgtaaagtgttttagattatatgttaatgttttgcgggaatg

SEQ ID NO: 35876 - DNA, 869 bp, Artificial Sequence
  chemically treated genomic DNA (Homo sapiens) CpG-island No: 35876
cattcccgcaaaacattaacatataatctaaaacactttacaacgattacataaaacgcgaaaacaaaaccacgacctcgcacgcccgcaaaacaaaaacacgtactatctacaacactttaacgacattcaaacaaaaacccgcgaataaaaccactacctttcgccccaataacacaacgacacgtaccgtctaaaacactttacgataatcaacgcgaaaacgccaaaataaaaccacgccctttcattccgacaaaacaacgacacgtactatcgacgcactttataacaaccacgcgaaaactcgaaatcgcgaacgtatacccaatcaaaatcgactacgaatactcgactttacgctctatttcgttataatctaactattaatccgtaaacacgcctacgactattccatcataacgaaaataacgatactataacgaaaaataaaaaataacttccaaaacaaaaaattccgaaaatacgtaaacaacactcacttctaaaatcccgcgttcaactaaaaccttccgctaactacctttaaaaacataaaaacgtcgccgaaaatcatcaataaccgcataacaacaacgctcatcttatactcgacgatcttcatacgcttcgcctaccgcgtacaacctcgaaacctactactaataacgtaccactataccaacgtaataacgcaaaatatacaaaccaatcgctacctactctactactacgacgacgacgacgccgaaactaaaacccgcgaccctccgactaccgccgccgctaccaccaacccgaattcccaacccccgaaacaaacttcttaaaaactaaaaaaacctaatctcatctctacaaatcacaaa

SEQ ID NO: 35877 - DNA, 1521 bp, Artificial Sequence
  chemically treated genomic DNA (Homo sapiens) CpG-island No: 35877
ttttcggtttacgggtcgaaaattttggcgattgggacgcggttaggcgggtcgggggcgaggggcgttgattagaagcgggcggagtttagggttcgggtcggtagtttgatttttcgtgggtcggttttgttgggtgggtattttcgcggggcgtcgaggtataatatgagggttttttcgttgatatcgaggggttttgagggttgtaagaaatgtaggttcggcggttgttttcgagagcgggacgcgcgttcgcgcggtgggcgggaattttaaggggacgcggaggcgggcgcgcgtttcgtaggggagggggcggagagcgcgagaaggagggaggaggcgttttcgtgcgggagttcggttgatcgcgttagatttagatagagtatcgcggttttggttgtaataggcggtgggttcggttcgggggcggaggcggcgaaagggcggggagcgcgaggaggagcgatttggttttatcgttgtcgtttttttttcgtcgtatggacgagcgttttagttttttgcgttcgtcgtcgtcgtttttagttcgttatcgcgtttattttttttagcgtttagcgagtagcggcggtgtttatacgttggtgaattacggttacgcggagttcgtcgtaggtcgcgagttgtcgttcgatatgatcgtggtgttcggggattatttgttggagtcggaggtggtcgatggtggaggggtttcgttttaaggcggttgtggcggcggcggttgcgatcgttacgagtcgttgtcgtttttattgtcggtcgcgggcgagtaggattgttgcggggagcgcgtggttattaatattttcgggttgcgtttcgagacgtagttgaagattttttgttagtttttcgagacgttgttgggcgattttaagcggcgtatgaggtatttcgattcgtttcgtaacgagtattttttcgatcgtaatcggtttagtttcgacgttattttttattattattagttcgggggtcgtattcgtcggtcggttaacgtgtttatcgatatttttttcgaggagattcgtttttattagttgggcgaggaggttatggagaagtttcgcgaggacgagggttttttgcgggaggaggagcggtttttgtttcgtcgcgatttttagcgttaggtgtggttgtttttcgagtatttcgagagtttcgggtcggttcggggtatcgttatcgtgttcgtgttggttatttttatttttattgttattttttgtttggagacgttgtcggagtttcgcgacgagaaggattatttcgtttcgacgtcgtaggatttattcgaagtagtcggtaatagtacgtcggggtttcgcgtaggagtttttagttttttcgatttttttttcgtggtggagacgttgtgtattatttggttttttttcgaattgttggtgcggtttttcgtttgttttagtaaagttattttttcgcgaaatattatgaatttgatcgatattgtggttattattt

SEQ ID NO: 35878 - DNA, 1521 bp, Artificial Sequence
  chemically treated genomic DNA (Homo sapiens) CpG-island No: 35878
aaataataaccacaatatcgatcaaattcataatatttcgcgaaaaaataactttactaaaacaaacgaaaaaccgcaccaacaattcgaaaaaaaaccaaataatacacaacgtctccaccacgaaaaaaaaatcgaaaaaactaaaaactcctacgcgaaaccccgacgtactattaccgactacttcgaataaatcctacgacgtcgaaacgaaataatccttctcgtcgcgaaactccgacaacgtctccaaacaaaaaataacaataaaaataaaaataaccaacacgaacacgataacgataccccgaaccgacccgaaactctcgaaatactcgaaaaacaaccacacctaacgctaaaaatcgcgacgaaacaaaaaccgctcctcctcccgcaaaaaaccctcgtcctcgcgaaacttctccataacctcctcgcccaactaataaaaacgaatctcctcgaaaaaaatatcgataaacacgttaaccgaccgacgaatacgacccccgaactaataataataaaaaataacgtcgaaactaaaccgattacgatcgaaaaaatactcgttacgaaacgaatcgaaatacctcatacgccgcttaaaatcgcccaacaacgtctcgaaaaactaacaaaaaatcttcaactacgtctcgaaacgcaacccgaaaatattaataaccacgcgctccccgcaacaatcctactcgcccgcgaccgacaataaaaacgacaacgactcgtaacgatcgcaaccgccgccgccacaaccgccttaaaacgaaacccctccaccatcgaccacctccgactccaacaaataatccccgaacaccacgatcatatcgaacgacaactcgcgacctacgacgaactccgcgtaaccgtaattcaccaacgtataaacaccgccgctactcgctaaacgctaaaaaaaataaacgcgataacgaactaaaaacgacgacgacgaacgcaaaaaactaaaacgctcgtccatacgacgaaaaaaaaacgacaacgataaaaccaaatcgctcctcctcgcgctccccgccctttcgccgcctccgcccccgaaccgaacccaccgcctattacaaccaaaaccgcgatactctatctaaatctaacgcgatcaaccgaactcccgcacgaaaacgcctcctccctccttctcgcgctctccgccccctcccctacgaaacgcgcgcccgcctccgcgtccccttaaaattcccgcccaccgcgcgaacgcgcgtcccgctctcgaaaacaaccgccgaacctacatttcttacaaccctcaaaacccctcgatatcaacgaaaaaaccctcatattatacctcgacgccccgcgaaaatacccacccaacaaaaccgacccacgaaaaatcaaactaccgacccgaaccctaaactccgcccgcttctaatcaacgcccctcgcccccgacccgcctaaccgcgtcccaatcgccaaaattttcgacccgtaaaccgaaaa

SEQ ID NO: 35879 - DNA, 1521 bp, Artificial Sequence
  chemically treated genomic DNA (Homo sapiens) CpG-island No: 35879
gaatgatggttataatgtcgattaggtttatgatgtttcgcgagaaggtggttttgttaggataagcgaagaatcgtattagtagttcgaaggagaattagatgatgtatagcgtttttattacgaagaagggatcggagaagttggaggtttttgcgcgggatttcgacgtgttgttgtcggttgtttcgaatgagttttgcgacgtcgaggcggggtagtttttttcgtcgcggaatttcggtagcgtttttaggtagaagatgataatggagatgaggatgattagtacggatacgatggcgatgtttcgggtcggttcggagttttcggggtattcgaagagtagttatatttggcgttggaagtcgcggcggggtaagggtcgttttttttttcgtaggaagttttcgttttcgcggaatttttttatggttttttcgtttagttggtagaagcggattttttcggagaaaatgtcgatgggtacgttgatcggtcggcggatgcggttttcggattgatagtagtagaggatggcgtcgaagttgggtcggttgcggtcgaagaagtattcgttgcggagcgggtcgaagtattttatgcgtcgtttggggtcgtttagtagcgtttcggggaattggtaaagggtttttagttgcgtttcgaagcgtagttcggagatgttgatgattacgcgtttttcgtagtagttttgttcgttcgcggtcggtagtgagggcggtagcggttcgtagcggtcgtagtcgtcgtcgttatagtcgttttgaggcggggtttttttattatcggttattttcggttttagtaggtggttttcgggtattacggttatgtcgggcggtagttcgcggtttgcggcgggtttcgcgtagtcgtggtttattagcgtgtgggtatcgtcgttgttcgttgggcgttgaggagggtgggcgcggtggcgggttgagggcggcggcggcgagcgtagaaggttgaggcgttcgtttatgcggcggggaagaggcggtagcggtgaggttaggtcgttttttttcgcgtttttcgttttttcgtcgttttcgttttcgagtcgagtttatcgtttgttgtagttaaagtcgcgatgttttgtttgggtttggcgcggttagtcgggttttcgtacggggacgttttttttttttttttcgcgtttttcgtttttttttttgcggggcgcgcgttcgttttcgcgtttttttaggattttcgtttatcgcgcgggcgcgcgtttcgttttcgggggtagtcgtcgggtttgtattttttgtagtttttaaggtttttcggtgttagcgaaagagtttttatgttgtatttcggcgtttcgcgggaatgtttatttagtagagtcggtttacggggagttaggttgtcggttcgggttttaggtttcgttcgtttttggttagcgtttttcgttttcggttcgtttggtcgcgttttagtcgttagggttttcggttcgtgggtcgggag

SEQ ID NO: 35880 - DNA, 1521 bp, Artificial Sequence
  chemically treated genomic DNA (Homo sapiens) CpG-island No: 35880
ctcccgacccacgaaccgaaaaccctaacgactaaaacgcgaccaaacgaaccgaaaacgaaaaacgctaaccaaaaacgaacgaaacctaaaacccgaaccgacaacctaactccccgtaaaccgactctactaaataaacattcccgcgaaacgccgaaatacaacataaaaactctttcgctaacaccgaaaaaccttaaaaactacaaaaaatacaaacccgacgactacccccgaaaacgaaacgcgcgcccgcgcgataaacgaaaatcctaaaaaaacgcgaaaacgaacgcgcgccccgcaaaaaaaaaaacgaaaaacgcgaaaaaaaaaaaaaaaacgtccccgtacgaaaacccgactaaccgcgccaaacccaaacaaaacatcgcgactttaactacaacaaacgataaactcgactcgaaaacgaaaacgacgaaaaaacgaaaaacgcgaaaaaaaacgacctaacctcaccgctaccgcctcttccccgccgcataaacgaacgcctcaaccttctacgctcgccgccgccgccctcaacccgccaccgcgcccaccctcctcaacgcccaacgaacaacgacgatacccacacgctaataaaccacgactacgcgaaacccgccgcaaaccgcgaactaccgcccgacataaccgtaatacccgaaaaccacctactaaaaccgaaaataaccgataataaaaaaaccccgcctcaaaacgactataacgacgacgactacgaccgctacgaaccgctaccgccctcactaccgaccgcgaacgaacaaaactactacgaaaaacgcgtaatcatcaacatctccgaactacgcttcgaaacgcaactaaaaaccctttaccaattccccgaaacgctactaaacgaccccaaacgacgcataaaatacttcgacccgctccgcaacgaatacttcttcgaccgcaaccgacccaacttcgacgccatcctctactactatcaatccgaaaaccgcatccgccgaccgatcaacgtacccatcgacattttctccgaaaaaatccgcttctaccaactaaacgaaaaaaccataaaaaaattccgcgaaaacgaaaacttcctacgaaaaaaaaaacgacccttaccccgccgcgacttccaacgccaaatataactactcttcgaataccccgaaaactccgaaccgacccgaaacatcgccatcgtatccgtactaatcatcctcatctccattatcatcttctacctaaaaacgctaccgaaattccgcgacgaaaaaaactaccccgcctcgacgtcgcaaaactcattcgaaacaaccgacaacaacacgtcgaaatcccgcgcaaaaacctccaacttctccgatcccttcttcgtaataaaaacgctatacatcatctaattctccttcgaactactaatacgattcttcgcttatcctaacaaaaccaccttctcgcgaaacatcataaacctaatcgacattataaccatcattc

SEQ ID NO: 35881 - DNA, 691 bp, Artificial Sequence
  chemically treated genomic DNA (Homo sapiens) CpG-island No: 35881
tatagtttcggagcgtcgcggtgaggttcggtttacgggtcgtttttcggtggattttattattggatataaagggaggaggttttttcggtttgtggcgtttttttttcgacggcggttgtatttcggagggagttcggcgttatttcggatgtcgttgcggtattttaagttttcgcgggtcgtcgattgtttagattttttatttttggttttattttttttgttcgggatagagtagttacgtttattcgttattttttttttttcgtttttggatagcggagtagttaaatttcgtcggatttatttagttcggacggcgcgcgttcgtttatgtaaataaatatattttaagttttaaggggcggttatcgttgtcgtcgcgtatttttgttacggtttatgttcgcgcgcgtagaagtgttcgtttatttcgcggacggggcgtggttaagttttagggacgcgtcgcgtttttattaatgtcggattcgggtagcggcggcgcgttcgacgtggcgcgcgcgattttttcgttttgtttttttttttcgggtttcgtcggtttgcgcgcgttcgggagtttgaattttttcggatttggagtaatatcgtagtggaaggcgttgtgggttgaggtcgtcgtttattttttttaggggaattatggagttggtagttgaaagat

SEQ ID NO: 35882 - DNA, 691 bp, Artificial Sequence
  chemically treated genomic DNA (Homo sapiens) CpG-island No: 35882
atctttcaactaccaactccataattcccctaaaaaaaataaacgacgacctcaacccacaacgccttccactacgatattactccaaatccgaaaaaattcaaactcccgaacgcgcgcaaaccgacgaaacccgaaaaaaaaaaacaaaacgaaaaaatcgcgcgcgccacgtcgaacgcgccgccgctacccgaatccgacattaataaaaacgcgacgcgtccctaaaacttaaccacgccccgtccgcgaaataaacgaacacttctacgcgcgcgaacataaaccgtaacaaaaatacgcgacgacaacgataaccgccccttaaaacttaaaatatatttatttacataaacgaacgcgcgccgtccgaactaaataaatccgacgaaatttaactactccgctatccaaaaacgaaaaaaaaaaaataacgaataaacgtaactactctatcccgaacaaaaaaaataaaaccaaaaataaaaaatctaaacaatcgacgacccgcgaaaacttaaaataccgcaacgacatccgaaataacgccgaactccctccgaaatacaaccgccgtcgaaaaaaaaacgccacaaaccgaaaaaacctcctccctttatatccaataataaaatccaccgaaaaacgacccgtaaaccgaacctcaccgcgacgctccgaaactata

SEQ ID NO: 35883 - DNA, 691 bp, Artificial Sequence
  chemically treated genomic DNA (Homo sapiens) CpG-island No: 35883
gttttttagttgttagttttatagtttttttaggagaggtgggcggcgattttaatttatagcgttttttattgcgatattgttttaaattcgaggaaatttaaattttcgggcgcgcgtaggtcgacgggattcgaggaggaggggtaggacgaaggggtcgcgcgcgttacgtcgggcgcgtcgtcgttgttcgagttcggtattggtgggaacgcggcgcgtttttgaggtttagttacgtttcgttcgcggggtaggcgggtatttttacgcgcgcgggtatgagtcgtggtaggagtgcgcggcggtagcggtggtcgttttttggggtttggggtgtgtttatttgtataagcgggcgcgcgtcgttcgggttgggtggattcggcgggatttgattgtttcgttgtttagaggcggagaagaagaggtagcgagtggacgtgattgttttatttcgggtaaaagggatagaattagaggtggggagtttgggtagtcggcgattcgcgaagatttgaggtgtcgtagcggtattcggagtagcgtcgggtttttttcggggtgtagtcgtcgtcgggggaagggcgttataggtcgggaagattttttttttttgtgtttagtagtggggtttatcggagggcggttcgtgggtcgggttttatcgcggcgtttcgggattgtg

SEQ ID NO: 35884 - DNA, 691 bp, Artificial Sequence
  chemically treated genomic DNA (Homo sapiens) CpG-island No: 35884
cacaatcccgaaacgccgcgataaaacccgacccacgaaccgccctccgataaaccccactactaaacacaaaaaaaaaaaatcttcccgacctataacgcccttcccccgacgacgactacaccccgaaaaaaacccgacgctactccgaataccgctacgacacctcaaatcttcgcgaatcgccgactacccaaactccccacctctaattctatcccttttacccgaaataaaacaatcacgtccactcgctacctcttcttctccgcctctaaacaacgaaacaatcaaatcccgccgaatccacccaacccgaacgacgcgcgcccgcttatacaaataaacacaccccaaaccccaaaaaacgaccaccgctaccgccgcgcactcctaccacgactcatacccgcgcgcgtaaaaatacccgcctaccccgcgaacgaaacgtaactaaacctcaaaaacgcgccgcgttcccaccaataccgaactcgaacaacgacgacgcgcccgacgtaacgcgcgcgaccccttcgtcctacccctcctcctcgaatcccgtcgacctacgcgcgcccgaaaatttaaatttcctcgaatttaaaacaatatcgcaataaaaaacgctataaattaaaatcgccgcccacctctcctaaaaaaactataaaactaacaactaaaaaac

SEQ ID NO: 35885 - DNA, 640 bp, Artificial Sequence
  chemically treated genomic DNA (Homo sapiens) CpG-island No: 35885
  unsure (211..212, 450..451, 453..454, 588..)
aagatggcggcgatggcgtttggaggtagtggtagtggtggcggcgtgaatttattttttagtgattcggatgaggacgatgacgaggtagttgtaatagaggaacggcgggtagtatttcggttgggcgtcggaagtggtttagattttggttttgcgggttcgttgtcgttataggatttcgtggttttaggaagtagtgcgcggttannttttggggaggcgtcggcggttgtagtggttttggggggtatcggggagatttcggttcgattattaattgatgcgatcgttgtttagttgttgcgcgattaatatttgttgatcgttttggagttgtatatcgagttgttagagagtggtcgggagttgtttcggttgcgcgattatttttttaatttaggtaatttcgagaggtaaagtggaatttcgtcggggatgggggcgttnnnnntttttggagtagtcggcgttgggggcgttggaggtcgggaatcgagtatagcgtcgggcgggggatagtttagtaagtggacgtagtttgttatatttcggtagggtatttgggattgtacggagttattgtannggagagggggtatttttgcgtgggtttcgatagggatattttaaggaacga

SEQ ID NO: 35886 - DNA, 640 bp, Artificial Sequence
  chemically treated genomic DNA (Homo sapiens) CpG-island No: 35886
  unsure (52..53, 187..188, 190..191, 429..)
tcgttccttaaaatatccctatcgaaacccacgcaaaaataccccctctccnntacaataactccgtacaatcccaaataccctaccgaaatataacaaactacgtccacttactaaactatcccccgcccgacgctatactcgattcccgacctccaacgcccccaacgccgactactccaaaaannnnnaacgcccccatccccgacgaaattccactttacctctcgaaattacctaaattaaaaaaataatcgcgcaaccgaaacaactcccgaccactctctaacaactcgatatacaactccaaaacgatcaacaaatattaatcgcgcaacaactaaacaacgatcgcatcaattaataatcgaaccgaaatctccccgataccccccaaaaccactacaaccgccgacgcctccccaaaanntaaccgcgcactacttcctaaaaccacgaaatcctataacgacaacgaacccgcaaaaccaaaatctaaaccacttccgacgcccaaccgaaatactacccgccgttcctctattacaactacctcgtcatcgtcctcatccgaatcactaaaaaataaattcacgccgccaccactaccactacctccaaacgccatcgccgccatctt

SEQ ID NO: 35887 - DNA, 640 bp, Artificial Sequence
  chemically treated genomic DNA (Homo sapiens) CpG-island No: 35887
  unsure (52..53, 187..188, 190..191, 429..)
tcgttttttaaaatgtttttatcgggatttacgtagaaatattttttttttnntatagtaatttcgtataattttaaatattttgtcggagtgtgataggttgcgtttatttattgagttgtttttcgttcgacgttgtattcggttttcgatttttagcgtttttaacgtcggttgttttagggannnnnggcgtttttattttcggcggggttttattttgtttttcgaagttgtttggattggagaagtagtcgcgtagtcgaggtagttttcggttattttttaatagttcggtatgtagttttagggcggttagtaagtattgatcgcgtaatagttgagtagcgatcgtattaattgataatcgggtcggggttttttcggtgttttttagggttattgtagtcgtcgacgtttttttagggnntggtcgcgtattgttttttaaggttacgggattttgtggcgatagcgagttcgtagagttaggatttaggttattttcggcgtttagtcgaagtattgttcgtcgtttttttgttgtagttatttcgttatcgtttttattcgaattattgagaaatggatttacgtcgttattattgttattatttttaggcgttatcgtcgttatttt

SEQ ID NO: 35888 - DNA, 640 bp, Artificial Sequence
  chemically treated genomic DNA (Homo sapiens) CpG-island No: 35888
  unsure (211..212, 450..451, 453..454, 588..)
aaaataacgacgataacgcctaaaaataataacaataataacgacgtaaatccatttctcaataattcgaataaaaacgataacgaaataactacaacaaaaaaacgacgaacaatacttcgactaaacgccgaaaataacctaaatcctaactctacgaactcgctatcgccacaaaatcccgtaaccttaaaaaacaatacgcgaccannccctaaaaaaacgtcgacgactacaataaccctaaaaaacaccgaaaaaaccccgacccgattatcaattaatacgatcgctactcaactattacgcgatcaatacttactaaccgccctaaaactacataccgaactattaaaaaataaccgaaaactacctcgactacgcgactacttctccaatccaaacaacttcgaaaaacaaaataaaaccccgccgaaaataaaaacgccnnnnntccctaaaacaaccgacgttaaaaacgctaaaaatcgaaaaccgaatacaacgtcgaacgaaaaacaactcaataaataaacgcaacctatcacactccgacaaaatatttaaaattatacgaaattactatannaaaaaaaaaatatttctacgtaaatcccgataaaaacattttaaaaaacga

SEQ ID NO: 35889 - DNA, 596 bp, Artificial Sequence
  chemically treated genomic DNA (Homo sapiens) CpG-island No: 35889
gagtttcgacggtttcgcgtcgtttatttcggggttcgtgggtcggttgggggggtatttgggtcgtcgtggttgtagtcgtcggggatcggggtagcgtagagttcgcgtaaggtttcgcggcgttttgggtcggggatgtgcggtttagttaattggggttacgtgttgggcggtcggggtcgcggttcggacgagtacgagaagcgttatagcggcgtttttttttcgtagttgcgtgtttagatgcgcgatttggtacggggtatgttcgtttttggttacgataattatatggtttacgtttttttttaggacgagtttaattttatttattgtcgcggtcgtgggttcgatcgcggggattcgtgagtagttttcgtcgttcggggtcgtgcgtttacgcgttttttttcgtttttcgcgtcggggtgtagttttttgtttttcggggttttcgagggcgttagggtcgttagggtttcgggtagcgttttcgcgttttgtatcgtgtgagtttttgtgaagaatttcgagtttgagggtgcggggtgggtcggtggttttttttttttgattttttcggaatttttaaa

SEQ ID NO: 35890 - DNA, 596 bp, Artificial Sequence
  chemically treated genomic DNA (Homo sapiens) CpG-island No: 35890
tttaaaaattccgaaaaaatcaaaaaaaaaaaaccaccgacccaccccgcaccctcaaactcgaaattcttcacaaaaactcacacgatacaaaacgcgaaaacgctacccgaaaccctaacgaccctaacgccctcgaaaaccccgaaaaacaaaaaactacaccccgacgcgaaaaacgaaaaaaaacgcgtaaacgcacgaccccgaacgacgaaaactactcacgaatccccgcgatcgaacccacgaccgcgacaataaataaaattaaactcgtcctaaaaaaaaacgtaaaccatataattatcgtaaccaaaaacgaacataccccgtaccaaatcgcgcatctaaacacgcaactacgaaaaaaaaacgccgctataacgcttctcgtactcgtccgaaccgcgaccccgaccgcccaacacgtaaccccaattaactaaaccgcacatccccgacccaaaacgccgcgaaaccttacgcgaactctacgctaccccgatccccgacgactacaaccacgacgacccaaatacccccccaaccgacccacgaaccccgaaataaacgacgcgaaaccgtcgaaactc

SEQ ID NO: 35891 - DNA, 596 bp, Artificial Sequence
  chemically treated genomic DNA (Homo sapiens) CpG-island No: 35891
tttggagatttcgggagaattaggagaggaaggttatcggtttatttcgtatttttaagttcggggttttttatagggatttatacggtatagggcgcgggagcgttgttcgggattttaacggttttggcgttttcgggggtttcggaggatagagggttgtatttcggcgcggagggcggaaggaagcgcgtgggcgtacggtttcgggcggcgggggttatttacgggttttcgcggtcgggtttacggtcgcggtagtggatggggttgagttcgttttgggggaaggcgtgagttatgtagttgtcgtagttaaagacgaatatgtttcgtgttaggtcgcgtatttgggtacgtagttgcggagggaaggcgtcgttgtagcgtttttcgtattcgttcgggtcgcggtttcggtcgtttagtacgtagttttagttggttgggtcgtatattttcggtttaggacgtcgcggagttttgcgcgggttttgcgttgtttcggttttcggcggttgtagttacgacggtttagatatttttttagtcggtttacgggtttcgaggtgggcgacgcggggtcgtcggggttt

SEQ ID NO: 35892 - DNA, 596 bp, Artificial Sequence
  chemically treated genomic DNA (Homo sapiens) CpG-island No: 35892
aaaccccgacgaccccgcgtcgcccacctcgaaacccgtaaaccgactaaaaaaatatctaaaccgtcgtaactacaaccgccgaaaaccgaaacaacgcaaaacccgcgcaaaactccgcgacgtcctaaaccgaaaatatacgacccaaccaactaaaactacgtactaaacgaccgaaaccgcgacccgaacgaatacgaaaaacgctacaacgacgccttccctccgcaactacgtacccaaatacgcgacctaacacgaaacatattcgtctttaactacgacaactacataactcacgccttcccccaaaacgaactcaaccccatccactaccgcgaccgtaaacccgaccgcgaaaacccgtaaataacccccgccgcccgaaaccgtacgcccacgcgcttccttccgccctccgcgccgaaatacaaccctctatcctccgaaacccccgaaaacgccaaaaccgttaaaatcccgaacaacgctcccgcgccctataccgtataaatccctataaaaaaccccgaacttaaaaatacgaaataaaccgataaccttcctctcctaattctcccgaaatctccaaa

SEQ ID NO: 35893 - DNA, 1078 bp, Artificial Sequence
  chemically treated genomic DNA (Homo sapiens) CpG-island No: 35893
cgtgcgcgttttcgttttttcgcgtgcgtacgtcgttgtgttgttgtagttaattaggtcgcgaggtcgtcgcggtcgttagggttcgcgcgtacgttttagatcggagtcggggtgggggttatgggtgaatgggagagtgagcggggttgggcgcggtagcgcgagtcgtatgaatgagataaacgtgcgtcgcgcgagacgtcgcgcgagttcggattagggagttaatgggaacgttggaagggttcgagattcggtattgagggtaacggcgcgcgtcggtttcgagacgagcgacgtttggcgggagcgcgcggtagcggggcgggcgtggagcgtgcgggggtcgcgcgttgtttttttgaggtaggacggtattgtcgggaggcggcggtgataacgacggcggtggtgacgggtatcgggttcgcgggtgagtgcggaggatatcggtttttgcggaatcggaagtgtcgtattagcgaggtgggaggggagggtgatttttagggaagggggatcgaagacggggagggtattaaggttttatttttttttcgggtcgggttttttaatcgcggcgggatttatgggttttggaaacggacgacgagtagaggtcggggatttacgatcgttagggttcggaacgggttagagacggttatttagttcgagatcgcggttttcggtgtttggcgtttagtcgtcgtttttttcgttttcggttttgcgttttcgggttttgcggttttcgtagttcgtttttttaatttcggtgggtttggtcgtcgtggatttttttttttcggttttagcggtcgttagttttgttttaacgggtgatttttttttttttagtttcgtggtggggatcgggtgttgttttttttttatcgttttgcggttcgagtttttcgttttattttgttgatatttattttggtttaagttttattttgttatttgtttttttttattcgttcgttttttttttttatcgttattagtcgagtgttttatgcgtttagtattttgtattttttaaagtggagttcgaatgcgtttgttaata

SEQ ID NO: 35894 - DNA, 1078 bp, Artificial Sequence
  chemically treated genomic DNA (Homo sapiens) CpG-island No: 35894
tattaacaaacgcattcgaactccactttaaaaaatacaaaatactaaacgcataaaacactcgactaataacgataaaaaaaaaaaacgaacgaataaaaaaaaacaaataacaaaataaaacttaaaccaaaataaatatcaacaaaataaaacgaaaaactcgaaccgcaaaacgataaaaaaaaaacaacacccgatccccaccacgaaactaaaaaaaaaaaaatcacccgttaaaacaaaactaacgaccgctaaaaccgaaaaaaaaaaatccacgacgaccaaacccaccgaaattaaaaaaacgaactacgaaaaccgcaaaacccgaaaacgcaaaaccgaaaacgaaaaaaacgacgactaaacgccaaacaccgaaaaccgcgatctcgaactaaataaccgtctctaacccgttccgaaccctaacgatcgtaaatccccgacctctactcgtcgtccgtttccaaaacccataaatcccgccgcgattaaaaaacccgacccgaaaaaaaaataaaaccttaataccctccccgtcttcgatcccccttccctaaaaatcaccctcccctcccacctcgctaatacgacacttccgattccgcaaaaaccgatatcctccgcactcacccgcgaacccgatacccgtcaccaccgccgtcgttatcaccgccgcctcccgacaataccgtcctacctcaaaaaaacaacgcgcgacccccgcacgctccacgcccgccccgctaccgcgcgctcccgccaaacgtcgctcgtctcgaaaccgacgcgcgccgttaccctcaataccgaatctcgaacccttccaacgttcccattaactccctaatccgaactcgcgcgacgtctcgcgcgacgcacgtttatctcattcatacgactcgcgctaccgcgcccaaccccgctcactctcccattcacccataacccccaccccgactccgatctaaaacgtacgcgcgaaccctaacgaccgcgacgacctcgcgacctaattaactacaacaacacaacgacgtacgcacgcgaaaaaacgaaaacgcgcacg

SEQ ID NO: 35895 - DNA, 1078 bp, Artificial Sequence
  chemically treated genomic DNA (Homo sapiens) CpG-island No: 35895
tattgataaacgtattcgggttttattttaaaaagtataaagtattaaacgtatggagtattcggttggtggcggtaggaggaggaagcggacgggtgagagagaataggtaataggatgaagtttgagttaaaataagtattagtagagtggagcgagggattcgaatcgtagagcggtaaaagggaaatagtattcggtttttattacgggattggggaaaggagaattattcgttggggtagggttgacgatcgttgaaatcgaaaagaaggaatttacggcggttaggtttatcgaggttgagagagcgggttgcggggatcgtagagttcgagggcgtagggtcgggggcggaaggggcggcggttgggcgttaggtatcggggatcgcggtttcgagttgagtggtcgtttttaattcgtttcgagttttggcggtcgtggattttcggtttttattcgtcgttcgtttttaaggtttatgggtttcgtcgcggttggaagattcggttcggaggagaaatagggttttaatatttttttcgttttcggttttttttttttagaggttattttttttttttatttcgttggtacggtattttcggtttcgtagggatcggtgtttttcgtatttattcgcgagttcggtgttcgttattatcgtcgtcgttgttatcgtcgtttttcggtagtgtcgttttgttttagagaagtagcgcgcggttttcgtacgttttacgttcgtttcgttgtcgcgcgttttcgttaggcgtcgttcgtttcggagtcggcgcgcgtcgttgtttttagtgtcgggtttcgaatttttttagcgtttttattggttttttagttcgggttcgcgcgacgtttcgcgcggcgtacgtttgttttatttatgcggttcgcgttgtcgcgtttaatttcgtttatttttttatttatttatagtttttatttcgatttcgatttggggcgtgcgcgcgaattttggcgatcgcggcgatttcgcggtttgattggttgtagtaatataacgacgtacgtacgcgagaagacgagagcgcgtacg

SEQ ID NO: 35896 - DNA, 1078 bp, Artificial Sequence
  chemically treated genomic DNA (Homo sapiens) CpG-island No: 35896
cgtacgcgctctcgtcttctcgcgtacgtacgtcgttatattactacaaccaatcaaaccgcgaaatcgccgcgatcgccaaaattcgcgcgcacgccccaaatcgaaatcgaaataaaaactataaataaataaaaaaataaacgaaattaaacgcgacaacgcgaaccgcataaataaaacaaacgtacgccgcgcgaaacgtcgcgcgaacccgaactaaaaaaccaataaaaacgctaaaaaaattcgaaacccgacactaaaaacaacgacgcgcgccgactccgaaacgaacgacgcctaacgaaaacgcgcgacaacgaaacgaacgtaaaacgtacgaaaaccgcgcgctacttctctaaaacaaaacgacactaccgaaaaacgacgataacaacgacgacgataataacgaacaccgaactcgcgaataaatacgaaaaacaccgatccctacgaaaccgaaaataccgtaccaacgaaataaaaaaaaaaaataacctctaaaaaaaaaaaaccgaaaacgaaaaaaatattaaaaccctatttctcctccgaaccgaatcttccaaccgcgacgaaacccataaaccttaaaaacgaacgacgaataaaaaccgaaaatccacgaccgccaaaactcgaaacgaattaaaaacgaccactcaactcgaaaccgcgatccccgatacctaacgcccaaccgccgccccttccgcccccgaccctacgccctcgaactctacgatccccgcaacccgctctctcaacctcgataaacctaaccgccgtaaattccttcttttcgatttcaacgatcgtcaaccctaccccaacgaataattctcctttccccaatcccgtaataaaaaccgaatactatttcccttttaccgctctacgattcgaatccctcgctccactctactaatacttattttaactcaaacttcatcctattacctattctctctcacccgtccgcttcctcctcctaccgccaccaaccgaatactccatacgtttaatactttatactttttaaaataaaacccgaatacgtttatcaata

SEQ ID NO: 35897 - DNA, 874 bp, Artificial Sequence
  chemically treated genomic DNA (Homo sapiens) CpG-island No: 35897
acgttgtagttcgcgtcgaacgtcgggtagtataaaggattttcgattgtcggggagcggtgttcggagggtataggtttacgttattttttacgtagtttcggagatggagcgttgggtttatggagggaaggcggtaggttcggcggtttcggtagtttgttggggtaggggtttaaggcggtagttcgatagtggaggtcgttgagaattgttacggagttgcgtttgtatagcgagtattttttatttatttagggcgagtgtgtatttggggcggcgtgtagggggttgataaagatcggagagttttcggtgcggtcgtcggcggagcgaagattggaattcgtatgagcgttttttagcgtttttgagcgttcgtcgtcggtgtacggcgtatttcgcgggaggtagggattagtaaagtcgtgcgtttcgaggttcgttttcgttttcgtataaagatcgtgagtttcgggttcgagtttttcgcgcggggatcgggcggttgttcggcgggtcgtttttcgacggttttttggtttcgtcggagcgggtgcggggaggtttacgtagcgacggttggaggaggggtgggcggggttgtcgggggtggggttttcggggcgggtcggggcgcgttgtgttcgcggtcgaaattcggttttgttggaggttaacggttgttatatattcgggttcgatattatggcgattatgcgattgtttaaggtaatcgcgtataggatgattttttttttttggtttttttcgtttttcgtatttttttttttttttatttttttcgcggtttttcgagtatatttatttatttgtttgggtattagggttggttgaatttttgtttttttcg

SEQ ID NO: 35898 - DNA, 874 bp, Artificial Sequence
  chemically treated genomic DNA (Homo sapiens) CpG-island No: 35898
cgaaaaaaacaaaaattcaaccaaccctaatacccaaacaaataaataaatatactcgaaaaaccgcgaaaaaaataaaaaaaaaaaaaaatacgaaaaacgaaaaaaaccaaaaaaaaaaaatcatcctatacgcgattaccttaaacaatcgcataatcgccataatatcgaacccgaatatataacaaccgttaacctccaacaaaaccgaatttcgaccgcgaacacaacgcgccccgacccgccccgaaaaccccacccccgacaaccccgcccacccctcctccaaccgtcgctacgtaaacctccccgcacccgctccgacgaaaccaaaaaaccgtcgaaaaacgacccgccgaacaaccgcccgatccccgcgcgaaaaactcgaacccgaaactcacgatctttatacgaaaacgaaaacgaacctcgaaacgcacgactttactaatccctacctcccgcgaaatacgccgtacaccgacgacgaacgctcaaaaacgctaaaaaacgctcatacgaattccaatcttcgctccgccgacgaccgcaccgaaaactctccgatctttatcaaccccctacacgccgccccaaatacacactcgccctaaataaataaaaaatactcgctatacaaacgcaactccgtaacaattctcaacgacctccactatcgaactaccgccttaaacccctaccccaacaaactaccgaaaccgccgaacctaccgccttccctccataaacccaacgctccatctccgaaactacgtaaaaaataacgtaaacctataccctccgaacaccgctccccgacaatcgaaaatcctttatactacccgacgttcgacgcgaactacaacgt

SEQ ID NO: 35899 - DNA, 874 bp, Artificial Sequence
  chemically treated genomic DNA (Homo sapiens) CpG-island No: 35899
cggggaggatagggatttagttagttttggtgtttagataaataaataaatgtgttcggagagtcgcggaggggatggagggaggagggaatgcgggaggcgaggggagttaagagaaaggggttattttatacgcggttattttgaatagtcgtatggtcgttatgatgtcgggttcgagtgtgtggtaatcgttggtttttagtaggatcgagtttcgatcgcggatatagcgcgtttcggttcgtttcggggattttattttcggtagtttcgtttattttttttttagtcgtcgttgcgtgggttttttcgtattcgtttcggcgaggttaggaggtcgtcgaaggacgattcgtcggataatcgttcgattttcgcgcggaaggttcggattcgggatttacggtttttgtgcggagacgggggcgggtttcggggcgtacggttttgttgatttttgtttttcgcggggtgcgtcgtgtatcggcggcgagcgtttaggggcgttggggggcgtttatacgggttttagttttcgtttcgtcggcggtcgtatcgggagtttttcggtttttgttagttttttgtacgtcgttttaaatatatattcgttttgaataaataagggatgttcgttgtatagacgtagtttcgtgatagtttttagcggtttttattatcggattgtcgttttgagtttttgttttagtaagttgtcggagtcgtcgagtttgtcgttttttttttatgggtttagcgttttattttcgaaattgcgtgggggatggcgtagatttgtgtttttcgagtatcgtttttcggtagtcggggattttttgtgttgttcggcgttcggcgcgggttgtaacgt

SEQ ID NO: 35900 - DNA, 874 bp, Artificial Sequence
  chemically treated genomic DNA (Homo sapiens) CpG-island No: 35900
acgttacaacccgcgccgaacgccgaacaacacaaaaaatccccgactaccgaaaaacgatactcgaaaaacacaaatctacgccatcccccacgcaatttcgaaaataaaacgctaaacccataaaaaaaaaacgacaaactcgacgactccgacaacttactaaaacaaaaactcaaaacgacaatccgataataaaaaccgctaaaaactatcacgaaactacgtctatacaacgaacatcccttatttattcaaaacgaatatatatttaaaacgacgtacaaaaaactaacaaaaaccgaaaaactcccgatacgaccgccgacgaaacgaaaactaaaacccgtataaacgccccccaacgcccctaaacgctcgccgccgatacacgacgcaccccgcgaaaaacaaaaatcaacaaaaccgtacgccccgaaacccgcccccgtctccgcacaaaaaccgtaaatcccgaatccgaaccttccgcgcgaaaatcgaacgattatccgacgaatcgtccttcgacgacctcctaacctcgccgaaacgaatacgaaaaaacccacgcaacgacgactaaaaaaaaaataaacgaaactaccgaaaataaaatccccgaaacgaaccgaaacgcgctatatccgcgatcgaaactcgatcctactaaaaaccaacgattaccacacactcgaacccgacatcataacgaccatacgactattcaaaataaccgcgtataaaataacccctttctcttaactcccctcgcctcccgcattccctcctccctccatcccctccgcgactctccgaacacatttatttatttatctaaacaccaaaactaactaaatccctatcctccccg

SEQ ID NO: 35901 - DNA, 536 bp, Artificial Sequence
  chemically treated genomic DNA (Homo sapiens) CpG-island No: 35901
  unsure (1, 31, 35)
nacggtttcgtagttagattatatatttttntttntttttttttcgttattagcggcggttcgttcgttcggcggtgttttagcgttcgtcgtcgcgtcgggtttagtaatggcggttattcgtgttttttcgcgttgacggatttttttttttttttttcgaattttattttagtatttttttcggcgcgcgtagttatatattcgatcgggggcggagcggcggcgcggcggcgtagtttggacggtgacggcgcgcgcggcgaattcgcgttgttttttttataatttttcgttttcgtttttttatttcgcgacgtttttcgcgtcgcgtattcggtacggtttcgtttttgttttcgtttttcgggagtttgggaaggcgcgagttatttagtcggagggagggggacgagcgcgcggggtcgcgttttcgttcgcgttttcgttttttttttttttttgttttttttttttttttatttttttattggtttttatttttttttttttttttttcgttttttttattattg

SEQ ID NO: 35902 - DNA, 536 bp, Artificial Sequence
  chemically treated genomic DNA (Homo sapiens) CpG-island No: 35902
  unsure (502, 506, 536)
caataataaaaaaaacgaaaaaaaaaaaaaaaaaaataaaaaccaataaaaaaataaaaaaaaaaaaaaaacaaaaaaaaaaaaaaaacgaaaacgcgaacgaaaacgcgaccccgcgcgctcgtccccctccctccgactaaataactcgcgccttcccaaactcccgaaaaacgaaaacaaaaacgaaaccgtaccgaatacgcgacgcgaaaaacgtcgcgaaataaaaaaacgaaaacgaaaaattataaaaaaaacaacgcgaattcgccgcgcgcgccgtcaccgtccaaactacgccgccgcgccgccgctccgcccccgatcgaatatataactacgcgcgccgaaaaaaatactaaaataaaattcgaaaaaaaaaaaaaaaaatccgtcaacgcgaaaaaacacgaataaccgccattactaaacccgacgcgacgacgaacgctaaaacaccgccgaacgaacgaaccgccgctaataacgaaaaaaaaanaaanaaaaatatataatctaactacgaaaccgtn

SEQ ID NO: 35903 - DNA, 536 bp, Artificial Sequence
  chemically treated genomic DNA (Homo sapiens) CpG-island No: 35903
  unsure (502, 506, 536)
taatggtgggagaggcggaggaagaagggggaggggtagaagttaatgggggagtggaggggagggagaagtagaggggaggagggagcggggacgcgagcgaggacgcggtttcgcgcgttcgttttttttttttcgattggatagttcgcgtttttttaggttttcgggagacgagggtaggggcggggtcgtgtcgggtgcgcggcgcgggaggcgtcgcgaggtgaaggggcggggacgggggattgtggggagggtagcgcgggttcgtcgcgcgcgtcgttatcgtttaggttgcgtcgtcgcgtcgtcgtttcgttttcggtcgggtgtgtggttgcgcgcgtcgggagagatgttgaggtaaagttcgggagagagggagagaaattcgttagcgcgagggagtacgagtggtcgttattattgagttcggcgcggcggcgggcgttggggtatcgtcggacggacgggtcgtcgttggtggcgaggagggagngagngagggtgtgtgatttggttgcgggatcgtn

SEQ ID NO: 35904 - DNA, 536 bp, Artificial Sequence
  chemically treated genomic DNA (Homo sapiens) CpG-island No: 35904
  unsure (1, 31, 35)
nacgatcccgcaaccaaatcacacaccctcnctcnctccctcctcgccaccaacgacgacccgtccgtccgacgataccccaacgcccgccgccgcgccgaactcaataataacgaccactcgtactccctcgcgctaacgaatttctctccctctctcccgaactttacctcaacatctctcccgacgcgcgcaaccacacacccgaccgaaaacgaaacgacgacgcgacgacgcaacctaaacgataacgacgcgcgcgacgaacccgcgctaccctccccacaatcccccgtccccgccccttcacctcgcgacgcctcccgcgccgcgcacccgacacgaccccgcccctaccctcgtctcccgaaaacctaaaaaaacgcgaactatccaatcgaaaaaaaaaaaacgaacgcgcgaaaccgcgtcctcgctcgcgtccccgctccctcctcccctctacttctccctcccctccactcccccattaacttctacccctcccccttcttcctccgcctctcccaccatta

SEQ ID NO: 35905 - DNA, 687 bp, Artificial Sequence
  chemically treated genomic DNA (Homo sapiens) CpG-island No: 35905
  unsure (667, 672, 675, 680..681, 683..)
aatcgagattgtgttttcgcgaatttgtattcgtttcgtgtattttttttaggtggaattcgttaatagtagtaattcggttaacggatatcgttattttttttttcgacggattattcgagattcgagtaagtgaggcggcgggcgagagcggacgtttggcggggtcggcgattttcggttagtattaggttttcgtcgattttggtttcgttatttgtggagaaagtattttttttttcggtttttttgttttttacgtcgaacgtatttttaacgttgtagttgttgttcgttcggtttgcgaaaatcgagcgtagcgttaggtttttttcggcggtcgcggggttttagtttttttaattggttataatcggtagcggcgatcgagcggggtagttagtcgtaggagggttttcgttcgggagggggtaggtaggtttggaggagcggggttcgtaaggttttatttaataacgtcggtttttttcgttttttttttaacggtagcggtttcggcggtggcggcggtacgatatttttggggacgttttcgtcgtcgtcgtttttttttttatttttcgttcgtttttttttttcggcgcgtttatcgagcggcgtttttttttattacgtacgtatttataaatataaaatatatttattnatttnttnttttnnnnnttt

SEQ ID NO: 35906 - DNA, 687 bp, Artificial Sequence
  chemically treated genomic DNA (Homo sapiens) CpG-island No: 35906
  unsure (4..5, 7..8, 13, 16, 21)
aaannnnnaaaanaanaaatnaataaatatattttatatttataaatacgtacgtaataaaaaaaaacgccgctcgataaacgcgccgaaaaaaaaaaacgaacgaaaaataaaaaaaaaaacgacgacgacgaaaacgtccccaaaaatatcgtaccgccgccaccgccgaaaccgctaccgttaaaaaaaaaacgaaaaaaaccgacgttattaaataaaaccttacgaaccccgctcctccaaacctacctaccccctcccgaacgaaaaccctcctacgactaactaccccgctcgatcgccgctaccgattataaccaattaaaaaaactaaaaccccgcgaccgccgaaaaaaacctaacgctacgctcgattttcgcaaaccgaacgaacaacaactacaacgttaaaaatacgttcgacgtaaaaaacaaaaaaaccgaaaaaaaaaatactttctccacaaataacgaaaccaaaatcgacgaaaacctaatactaaccgaaaatcgccgaccccgccaaacgtccgctctcgcccgccgcctcacttactcgaatctcgaataatccgtcgaaaaaaaaaataacgatatccgttaaccgaattactactattaacgaattccacctaaaaaaaatacacgaaacgaatacaaattcgcgaaaacacaatctcgatt

SEQ ID NO: 35907 - DNA, 687 bp, Artificial Sequence
  chemically treated genomic DNA (Homo sapiens) CpG-island No: 35907
  unsure (4..5, 7..8, 13, 16, 21)
gagnnnnnggggnagngggtnggtgggtgtgttttatatttataaatacgtgcgtggtgaagagaagcgtcgttcggtgagcgcgtcgaggaagagaggcgagcggagagtggaggaggaggcggcggcggcgggagcgtttttaggaatgtcgtgtcgtcgttatcgtcggggtcgttgtcgttgaggaggagacggaggagatcgacgttgttaggtaggattttgcggatttcgtttttttaagtttgtttgttttttttcggacggggatttttttgcggttagttgtttcgttcggtcgtcgttgtcggttgtaattagttgaaggggttggggtttcgcggtcgtcgaggggagtttggcgttgcgttcggttttcgtaggtcgggcgggtagtagttgtagcgttagggatacgttcggcgtgaagggtagagaggtcgggggagggggtgttttttttataggtgacggggttagggtcggcggaggtttgatgttggtcggggatcgtcggtttcgttaggcgttcgttttcgttcgtcgttttatttgttcgagtttcgggtggttcgtcgagaggggaggtggcggtgttcgttggtcgggttgttgttgttaacgagttttatttggaaagggtatacggggcgggtgtagattcgcggaaatatagtttcggtt

SEQ ID NO: 35908 - DNA, 687 bp, Artificial Sequence
  chemically treated genomic DNA (Homo sapiens) CpG-island No: 35908
  unsure (667, 672, 675, 680..681, 683..)
aaccgaaactatatttccgcgaatctacacccgccccgtataccctttccaaataaaactcgttaacaacaacaacccgaccaacgaacaccgccacctcccctctcgacgaaccacccgaaactcgaacaaataaaacgacgaacgaaaacgaacgcctaacgaaaccgacgatccccgaccaacatcaaacctccgccgaccctaaccccgtcacctataaaaaaaacaccccctcccccgacctctctacccttcacgccgaacgtatccctaacgctacaactactacccgcccgacctacgaaaaccgaacgcaacgccaaactcccctcgacgaccgcgaaaccccaaccccttcaactaattacaaccgacaacgacgaccgaacgaaacaactaaccgcaaaaaaatccccgtccgaaaaaaaacaaacaaacttaaaaaaacgaaatccgcaaaatcctacctaacaacgtcgatctcctccgtctcctcctcaacgacaacgaccccgacgataacgacgacacgacattcctaaaaacgctcccgccgccgccgcctcctcctccactctccgctcgcctctcttcctcgacgcgctcaccgaacgacgcttctcttcaccacgcacgtatttataaatataaaacacacccaccnacccnctnccccnnnnnctc

SEQ ID NO: 35909 - DNA, 1175 bp, Artificial Sequence
  chemically treated genomic DNA (Homo sapiens) CpG-island No: 35909
gaaattcggtttttgcgtttatcgggagcgttatattttggtagttgatcggcggttgtcgtcgggggtaaggttatcgtttcgttttcgcggttggtttgcgattcggttatttgtagggtttggtaggcgttcgaatttatttttttttcgcggttcgtttcgggtcgggttttgtcgtttttcgcgatttttcgcgattcgcggcgagttttacggtttttatcgtttttcgttggtcggttttcgtttcgtttttcgggcgtttcgcggcgttagtatcgttttcgttgtcgtttattcgggtcgggatagttttgcgtcggagagatagtgtagcgcgagagggtcgggagaggacgtcggagggaaaggaagggggagcgcgtttagtatcgtttgggttttttttattcgtttaggaggggaaatacgagagtcgggagtataatagtttcgtacgttcgtcgtcgtcgcgcgttcgtcgtcgttttagttttaggggagattattacgtttcgtgttcgcgtacgtcgcgtcgtttttttcggcgttttcgtttcgtttgtttttcgtagtttcgtttatgtgtttttttgcggttgtttttttttggtttttatttcgttcgtacgtttgcgttttggttggtcgcgcgggttaatggtagcgcgtttttattatataagcgcgagggggcgggttttggttgatataaattttaggggacgtcgttttttgtttttaggcgtttttttttttcggcgcgttcggttcgggcggtttttttatttagttttgggagttacgtgatttcggttttggttggtgatcgggtcgcggcgtgttttataagtcgttcgttcgtttatttattcgggcggcggtcgggttttaggcgttgcgatttttttttcgttttttttaggttgacgcgttcgtttcggcgtcgtttttttcggtatcgattgaggcgttggttcgggagcggatcgcggggtcgcggtggttgagttatattttcggagtttcgttatttaggatatcgcggtttcggtttttagcgagttcggcggatttagcggttttgaacgcggacgtatagtttttgtttttttatagtcgttttttattttatttttatggaaattttaggtgtttttttaagttggggg

SEQ ID NO: 35910 - DNA, 1175 bp, Artificial Sequence
  chemically treated genomic DNA (Homo sapiens) CpG-island No: 35910
cccccaacttaaaaaaacacctaaaatttccataaaaataaaataaaaaacgactataaaaaaacaaaaactatacgtccgcgttcaaaaccgctaaatccgccgaactcgctaaaaaccgaaaccgcgatatcctaaataacgaaactccgaaaatataactcaaccaccgcgaccccgcgatccgctcccgaaccaacgcctcaatcgataccgaaaaaaacgacgccgaaacgaacgcgtcaacctaaaaaaaacgaaaaaaaaatcgcaacgcctaaaacccgaccgccgcccgaataaataaacgaacgaacgacttataaaacacgccgcgacccgatcaccaaccaaaaccgaaatcacgtaactcccaaaactaaataaaaaaaccgcccgaaccgaacgcgccgaaaaaaaaaaacgcctaaaaacaaaaaacgacgtcccctaaaatttatatcaaccaaaacccgccccctcgcgcttatataataaaaacgcgctaccattaacccgcgcgaccaaccaaaacgcaaacgtacgaacgaaataaaaaccaaaaaaaaacaaccgcaaaaaaacacataaacgaaactacgaaaaacaaacgaaacgaaaacgccgaaaaaaacgacgcgacgtacgcgaacacgaaacgtaataatctcccctaaaactaaaacgacgacgaacgcgcgacgacgacgaacgtacgaaactattatactcccgactctcgtatttcccctcctaaacgaataaaaaaaacccaaacgatactaaacgcgctcccccttcctttccctccgacgtcctctcccgaccctctcgcgctacactatctctccgacgcaaaactatcccgacccgaataaacgacaacgaaaacgatactaacgccgcgaaacgcccgaaaaacgaaacgaaaaccgaccaacgaaaaacgataaaaaccgtaaaactcgccgcgaatcgcgaaaaatcgcgaaaaacgacaaaacccgacccgaaacgaaccgcgaaaaaaaaataaattcgaacgcctaccaaaccctacaaataaccgaatcgcaaaccaaccgcgaaaacgaaacgataaccttacccccgacgacaaccgccgatcaactaccaaaatataacgctcccgataaacgcaaaaaccgaatttc

SEQ ID NO: 35911 - DNA, 1175 bp, Artificial Sequence
  chemically treated genomic DNA (Homo sapiens) CpG-island No: 35911
tttttagtttgggaaaatatttggggtttttatgggagtgaggtaaagggcggttgtgaaagaataaaggttgtgcgttcgcgtttagagtcgttgggttcgtcgggttcgttgggggtcggggtcgcggtgttttgggtggcggggtttcgggaatgtgatttagttatcgcggtttcgcgattcgttttcgggttagcgttttagtcggtgtcgaggagggcggcgtcgagacgggcgcgttagtttgggaggagcgggaaaagggtcgtagcgtttgaggttcggtcgtcgttcgagtggatgagcgagcgagcgatttgtgaaatacgtcgcggttcggttattaattaggatcgggattacgtggtttttagggttgggtgaagaagtcgttcggatcgagcgcgtcggagaggaggggcgtttggggatagaaggcgacgttttttgaagtttgtgttagttagggttcgttttttcgcgtttatgtaataggggcgcgttgttattggttcgcgcgattagttagggcgtaggcgtgcgagcggggtgggggttagaaggaggtagtcgtagaaaggtatatgggcggggttgcgaggagtaggcggggcgggggcgtcgaggagagcggcgcggcgtgcgcgggtacgaggcgtagtggttttttttaaggttgaggcggcggcgggcgcgcggcggcggcgggcgtgcgaggttgttgtgttttcggttttcgtgtttttttttttgagcgggtggaggaggtttaagcggtgttgggcgcgtttttttttttttttttttcggcgttttttttcggttttttcgcgttgtattgttttttcgacgtaagattgtttcggttcgggtgagcggtagcgggggcggtgttgacgtcgcgggacgttcgggaaacggggcgggggtcggttagcggggggcggtggggatcgtgggattcgtcgcgggtcgcgaggggtcgcggggggcggtagggttcggttcggggcgggtcgcgggaaggggatgagttcgggcgtttgttaggttttgtaggtggtcgggtcgtaggttagtcgcggaagcggagcggtaattttattttcggcgatagtcgtcggttagttgttagagtgtggcgttttcggtggacgtaggggtcgggtttt

SEQ ID NO: 35912 - DNA, 1175 bp, Artificial Sequence
  chemically treated genomic DNA (Homo sapiens) CpG-island No: 35912
aaaacccgacccctacgtccaccgaaaacgccacactctaacaactaaccgacgactatcgccgaaaataaaattaccgctccgcttccgcgactaacctacgacccgaccacctacaaaacctaacaaacgcccgaactcatccccttcccgcgacccgccccgaaccgaaccctaccgccccccgcgacccctcgcgacccgcgacgaatcccacgatccccaccgccccccgctaaccgacccccgccccgtttcccgaacgtcccgcgacgtcaacaccgcccccgctaccgctcacccgaaccgaaacaatcttacgtcgaaaaaacaatacaacgcgaaaaaaccgaaaaaaaacgccgaaaaaaaaaaaaaaaaaaacgcgcccaacaccgcttaaacctcctccacccgctcaaaaaaaaaaacacgaaaaccgaaaacacaacaacctcgcacgcccgccgccgccgcgcgcccgccgccgcctcaaccttaaaaaaaaccactacgcctcgtacccgcgcacgccgcgccgctctcctcgacgcccccgccccgcctactcctcgcaaccccgcccatatacctttctacgactacctccttctaacccccaccccgctcgcacgcctacgccctaactaatcgcgcgaaccaataacaacgcgcccctattacataaacgcgaaaaaacgaaccctaactaacacaaacttcaaaaaacgtcgccttctatccccaaacgcccctcctctccgacgcgctcgatccgaacgacttcttcacccaaccctaaaaaccacgtaatcccgatcctaattaataaccgaaccgcgacgtatttcacaaatcgctcgctcgctcatccactcgaacgacgaccgaacctcaaacgctacgacccttttcccgctcctcccaaactaacgcgcccgtctcgacgccgccctcctcgacaccgactaaaacgctaacccgaaaacgaatcgcgaaaccgcgataactaaatcacattcccgaaaccccgccacccaaaacaccgcgaccccgacccccaacgaacccgacgaacccaacgactctaaacgcgaacgcacaacctttattctttcacaaccgccctttacctcactcccataaaaaccccaaatattttcccaaactaaaaa

SEQ ID NO: 35913 - DNA, 595 bp, Artificial Sequence
  chemically treated genomic DNA (Homo sapiens) CpG-island No: 35913
cgtcgttcggtattttttaatcgagggttgattcgttatgattattatacgtttcgcgtgggtttatacgttgtcggtagtattgttgttgatggtttttttcgatattttcgttttattggcgatggatatttatttttttgtcgttttagcgatgttcggtattttgaatacgacgttcgttatgatttaatttacgttgagtttttatatggtgatgttcggcgtgggttaggtgatttttggttcgtttttagatagaatcgggcgacggttaattttatttgcgggcgtaacggttttcgttattgcgtttttggagtagtttggtttttaattgtatcggtttttgtcgtttttcgtttattttaagtagtgggcgcgtcggttatgttggtggcgacgttcgcgacggttcgcgacgtttatgttaatcgttttgagggtgtcgttatttacggtttttttagttcgatgttggcgttcgtgtttgcgttcgggtttatcgtcggagtattgatcggcgagtttttgggatggtaggcgatatttattaattttggttatatttggtatgttcgtatttttttaaatt

SEQ ID NO: 35914 - DNA, 595 bp, Artificial Sequence
  chemically treated genomic DNA (Homo sapiens) CpG-island No: 35914
aatttaaaaaaatacgaacataccaaatataaccaaaattaataaatatcgcctaccatcccaaaaactcgccgatcaatactccgacgataaacccgaacgcaaacacgaacgccaacatcgaactaaaaaaaccgtaaataacgacaccctcaaaacgattaacataaacgtcgcgaaccgtcgcgaacgtcgccaccaacataaccgacgcgcccactacttaaaataaacgaaaaacgacaaaaaccgatacaattaaaaaccaaactactccaaaaacgcaataacgaaaaccgttacgcccgcaaataaaattaaccgtcgcccgattctatctaaaaacgaaccaaaaatcacctaacccacgccgaacatcaccatataaaaactcaacgtaaattaaatcataacgaacgtcgtattcaaaataccgaacatcgctaaaacgacaaaaaaataaatatccatcgccaataaaacgaaaatatcgaaaaaaaccatcaacaacaatactaccgacaacgtataaacccacgcgaaacgtataataatcataacgaatcaaccctcgattaaaaaataccgaacgacg

SEQ ID NO: 35915 - DNA, 595 bp, Artificial Sequence
  chemically treated genomic DNA (Homo sapiens) CpG-island No: 35915
aatttaagggagtgcgagtatattaagtatagttaaagttaatgaatatcgtttgttattttaagaattcgtcgattaatgtttcggcgataggttcgagcgtaggtacgaacgttagtatcgaattgaaaaggtcgtagatgacgatatttttaggacggttggtataaacgtcgcgaatcgtcgcgaacgtcgttattagtatggtcgacgcgtttattgtttgaagtagacggaaagcgataaaggtcggtgtagttgaagattaagttgttttagagacgtaatgacgaaagtcgttgcgttcgtaagtagaattggtcgtcgttcgattttgtttgagagcggattaaaaattatttggtttacgtcgagtattattatatagaggtttaacgtgagttggattatagcgggcgtcgtgtttaggatgtcgggtatcgttggaacgatagggagataaatatttatcgttagtgaagcgaggatgtcgaaaggagttattagtagtagtgttgtcggtagcgtataggtttacgcggggcgtgtggtggttatgacgaattaattttcgattaaggaatatcgggcgacg

SEQ ID NO: 35916 - DNA, 595 bp, Artificial Sequence
  chemically treated genomic DNA (Homo sapiens) CpG-island No: 35916
cgtcgcccgatattccttaatcgaaaattaattcgtcataaccaccacacgccccgcgtaaacctatacgctaccgacaacactactactaataactcctttcgacatcctcgcttcactaacgataaatatttatctccctatcgttccaacgatacccgacatcctaaacacgacgcccgctataatccaactcacgttaaacctctatataataatactcgacgtaaaccaaataatttttaatccgctctcaaacaaaatcgaacgacgaccaattctacttacgaacgcaacgactttcgtcattacgtctctaaaacaacttaatcttcaactacaccgacctttatcgctttccgtctacttcaaacaataaacgcgtcgaccatactaataacgacgttcgcgacgattcgcgacgtttataccaaccgtcctaaaaatatcgtcatctacgaccttttcaattcgatactaacgttcgtacctacgctcgaacctatcgccgaaacattaatcgacgaattcttaaaataacaaacgatattcattaactttaactatacttaatatactcgcactcccttaaatt

SEQ ID NO: 35917 - DNA, 1108 bp, Artificial Sequence
  chemically treated genomic DNA (Homo sapiens) CpG-island No: 35917
ttttgggttggaaaggtttcgtttattatttgtggttagtacgaaggtcgggacgttgtggaagcgtatcggttcgtggttgcggtcgttttcgtatgttacgaaggcggttattagttcgtagggttagtggatattgacgcgggtttcgcgggtgttcgtaggggcgtcggtataagttcgaagtttaaagcgaagggtttagcgttagtattgcgtggtcgtatatggagttgtagttttcgttgtgtaggaataggacgtttagatgcgcgttcggtagttcgttcgggattaggatcgtttcgtatatgtttcggtgttttcggggttcgaatatgagtcgtcgtcgtacgtggttaaggtgttggcgtatgtagcgtcgtttggttagtagggtgggtttagatattttcggatatttcgttagtacgatacgtaagggttcgtcgttcgtgtgtatgtttattatcgatagtatcggcgtttttggattatgcgggggtagtcggggtatcgttagcgcgttttttatggtttgcgtcgggggagacgagtacggtttcgtagttatggttttaagttcgatttttatttattgatttcgcgggaggagggcgggacgttaattagttacgttcggggggcggggtttcggagtttaaattcggaagcgagggaggaatttcggagttgtcgttcgggttatcgggaggcggagtcgtcgagttcgttgtggttcggatgttcggtgtagttgttagattcgttgatttagtgtttttcgaaaaaaatttttaggcggtttatgggtgagtggtcgttaagatttcgggaagcgtttttggtagtttcgattatttttttatacggttggtttcgggttcggttttttgtaggcggttttcggttggcggcgtaggttcgttttttgatttcgttcgttttcgggtcgggtttcgtatttttgcggggttggggtggtttgttcgtaacgggttattaggggaggcgcgttgtttgcggcgaaatgttaggtttttgttgtttggttcgaaatgtttttttagttttttagtttaatgtcgagggaatatttgtttgaggg

SEQ ID NO: 35918 - DNA, 1108 bp, Artificial Sequence
  chemically treated genomic DNA (Homo sapiens) CpG-island No: 35918
ccctcaaacaaatattccctcgacattaaactaaaaaactaaaaaaacatttcgaaccaaacaacaaaaacctaacatttcgccgcaaacaacgcgcctcccctaataacccgttacgaacaaaccaccccaaccccgcaaaaatacgaaacccgacccgaaaacgaacgaaatcaaaaaacgaacctacgccgccaaccgaaaaccgcctacaaaaaaccgaacccgaaaccaaccgtataaaaaaataatcgaaactaccaaaaacgcttcccgaaatcttaacgaccactcacccataaaccgcctaaaaatttttttcgaaaaacactaaatcaacgaatctaacaactacaccgaacatccgaaccacaacgaactcgacgactccgcctcccgataacccgaacgacaactccgaaattcctccctcgcttccgaatttaaactccgaaaccccgccccccgaacgtaactaattaacgtcccgccctcctcccgcgaaatcaataaataaaaatcgaacttaaaaccataactacgaaaccgtactcgtctcccccgacgcaaaccataaaaaacgcgctaacgataccccgactacccccgcataatccaaaaacgccgatactatcgataataaacatacacacgaacgacgaacccttacgtatcgtactaacgaaatatccgaaaatatctaaacccaccctactaaccaaacgacgctacatacgccaacaccttaaccacgtacgacgacgactcatattcgaaccccgaaaacaccgaaacatatacgaaacgatcctaatcccgaacgaactaccgaacgcgcatctaaacgtcctattcctacacaacgaaaactacaactccatatacgaccacgcaatactaacgctaaacccttcgctttaaacttcgaacttataccgacgcccctacgaacacccgcgaaacccgcgtcaatatccactaaccctacgaactaataaccgccttcgtaacatacgaaaacgaccgcaaccacgaaccgatacgcttccacaacgtcccgaccttcgtactaaccacaaataataaacgaaacctttccaacccaaaa

SEQ ID NO: 35919 - DNA, 1108 bp, Artificial Sequence
  chemically treated genomic DNA (Homo sapiens) CpG-island No: 35919
tttttaagtaagtgttttttcgatattaaattaagggattgaagagatatttcggattaaataataaagatttggtatttcgtcgtagatagcgcgttttttttagtagttcgttgcggatagattattttaatttcgtaggagtgcggagttcggttcgagggcgggcggggttaaggggcgagtttgcgtcgttaatcgaaggtcgtttataaagagtcgagttcgaggttagtcgtgtaggaaagtagtcgggattattagaaacgtttttcgggattttggcgattatttatttatgggtcgtttgaaggtttttttcgagaagtattagattagcggatttggtagttgtatcgaatattcgggttatagcgagttcggcggtttcgtttttcggtaattcgggcgatagtttcgaagtttttttttcgttttcgggtttaggtttcgagatttcgtttttcggacgtggttggttagcgtttcgtttttttttcgcggagttagtgggtgagggtcgggtttgaagttatagttgcgggatcgtattcgtttttttcgacgtagattatggagagcgcgttggcggtgtttcggttgttttcgtatgatttagggacgtcggtgttgtcggtggtggatatgtatacgggcggcgagtttttgcgtatcgtgttggcggggtgttcggaggtgtttgggtttattttgttggttaagcggcgttatatgcgttagtattttgattacgtgcggcgacggtttatgttcgagtttcgagggtatcgggatatgtacggggcggttttagtttcgagcgagttgtcggacgcgtatttgggcgttttgtttttgtataacgagggttatagttttatgtgcggttacgtagtgttggcgttgggtttttcgttttggatttcgggtttgtgtcggcgtttttgcgggtattcgcgaggttcgcgttaatatttattggttttgcgggttggtgatcgttttcgtggtatgcgaggacggtcgtagttacggatcggtgcgtttttatagcgtttcggttttcgtgttggttataggtaatgggcgggatttttttagtttaggg

SEQ ID NO: 35920 - DNA, 1108 bp, Artificial Sequence
  chemically treated genomic DNA (Homo sapiens) CpG-island No: 35920
ccctaaactaaaaaaatcccgcccattacctataaccaacacgaaaaccgaaacgctataaaaacgcaccgatccgtaactacgaccgtcctcgcataccacgaaaacgatcaccaacccgcaaaaccaataaatattaacgcgaacctcgcgaatacccgcaaaaacgccgacacaaacccgaaatccaaaacgaaaaacccaacgccaacactacgtaaccgcacataaaactataaccctcgttatacaaaaacaaaacgcccaaatacgcgtccgacaactcgctcgaaactaaaaccgccccgtacatatcccgataccctcgaaactcgaacataaaccgtcgccgcacgtaatcaaaatactaacgcatataacgccgcttaaccaacaaaataaacccaaacacctccgaacaccccgccaacacgatacgcaaaaactcgccgcccgtatacatatccaccaccgacaacaccgacgtccctaaatcatacgaaaacaaccgaaacaccgccaacgcgctctccataatctacgtcgaaaaaaacgaatacgatcccgcaactataacttcaaacccgaccctcacccactaactccgcgaaaaaaaaacgaaacgctaaccaaccacgtccgaaaaacgaaatctcgaaacctaaacccgaaaacgaaaaaaaaacttcgaaactatcgcccgaattaccgaaaaacgaaaccgccgaactcgctataacccgaatattcgatacaactaccaaatccgctaatctaatacttctcgaaaaaaaccttcaaacgacccataaataaataatcgccaaaatcccgaaaaacgtttctaataatcccgactactttcctacacgactaacctcgaactcgactctttataaacgaccttcgattaacgacgcaaactcgccccttaaccccgcccgccctcgaaccgaactccgcactcctacgaaattaaaataatctatccgcaacgaactactaaaaaaaacgcgctatctacgacgaaataccaaatctttattatttaatccgaaatatctcttcaatcccttaatttaatatcgaaaaaacacttacttaaaaa

SEQ ID NO: 35921 - DNA, 1178 bp, Artificial Sequence
  chemically treated genomic DNA (Homo sapiens) CpG-island No: 35921
cgtggaagttttgcgtcgtcgcgagttttcggggcgtttcgagtagtttttagggtaaggagaagtttagggtcgttagttaggcgttcgttagtagttgtagcgcgcggcggcggtcgattttttttcgcggcggtcgtacgatagcgtagtaacggtttaacgagatgagcgttacgttgagcgtggatacgatgtcgaagtacgagttgaagaagcggttggcggcgtagaagtcgcgttagggtttcgcggcggcggtaggcgtcgaattttcgggcggagtgaagaggtttaggaaggcggcgggtaggtagagtagcgtcgtgagtagattcgatagggatagcgataggatgaaggcgttggtgacggtgcggagttgtcggtgttttataattatttttattatcgcgtagttgttaaggttagatagtaggaagatgagtaggaggacgagcgtttgggtcgttattgtagtttcgtgcgatagtagcggcgtcgttttcgtcgttagcggtcgttttatcgtcgttttcgtttttcgcgttgtttcggattcgttaaggtcgtcgttatcgggagcggtagttgtgtcgttttcgtttgcgtcgtttaggttttttagcgtcgcggtcgttacggtgttgaaggagagtacggtcgtcgtggtcgcggaggaagtttcgttaggtgggtcggtcgcggagggggcgtcggagtgttggttgtttagtaaggttatgttcgttggtgggcggggcggttgcggtttttttatggggtttagtggcggtcgcggatttttttatttcgtatcgggggcggcggtcgttaggtcggagtggtggttcggggtcgggggttagcggtcgtcgcggggagttgggttcggtcggaggggtggcggtcgttggggatttggcggagtttttgacgtgggttttagcgttgtcgagggaatcgcgtgtttacgtaggagcgcggggcgggacggtagtttagtattcgttgtaaagtcgattcgcgatatcgttatttcggaggttatcggttcgggtgttcgggttttcgagagtgttaggtcgattttttgagggattaatgttcggttagataaagtgtcgattggtatgtaaataaatgattagatttaacgaaagtttatttttgttttt

SEQ ID NO: 35922 - DNA, 1178 bp, Artificial Sequence
  chemically treated genomic DNA (Homo sapiens) CpG-island No: 35922
aaaaacaaaaataaactttcgttaaatctaatcatttatttacataccaatcgacactttatctaaccgaacattaatccctcaaaaaatcgacctaacactctcgaaaacccgaacacccgaaccgataacctccgaaataacgatatcgcgaatcgactttacaacgaatactaaactaccgtcccgccccgcgctcctacgtaaacacgcgattccctcgacaacgctaaaacccacgtcaaaaactccgccaaatccccaacgaccgccacccctccgaccgaacccaactccccgcgacgaccgctaacccccgaccccgaaccaccactccgacctaacgaccgccgcccccgatacgaaataaaaaaatccgcgaccgccactaaaccccataaaaaaaccgcaaccgccccgcccaccaacgaacataaccttactaaacaaccaacactccgacgccccctccgcgaccgacccacctaacgaaacttcctccgcgaccacgacgaccgtactctccttcaacaccgtaacgaccgcgacgctaaaaaacctaaacgacgcaaacgaaaacgacacaactaccgctcccgataacgacgaccttaacgaatccgaaacaacgcgaaaaacgaaaacgacgataaaacgaccgctaacgacgaaaacgacgccgctactatcgcacgaaactacaataacgacccaaacgctcgtcctcctactcatcttcctactatctaaccttaacaactacgcgataataaaaataattataaaacaccgacaactccgcaccgtcaccaacgccttcatcctatcgctatccctatcgaatctactcacgacgctactctacctacccgccgccttcctaaacctcttcactccgcccgaaaattcgacgcctaccgccgccgcgaaaccctaacgcgacttctacgccgccaaccgcttcttcaactcgtacttcgacatcgtatccacgctcaacgtaacgctcatctcgttaaaccgttactacgctatcgtacgaccgccgcgaaaaaaaatcgaccgccgccgcgcgctacaactactaacgaacgcctaactaacgaccctaaacttctccttaccctaaaaactactcgaaacgccccgaaaactcgcgacgacgcaaaacttccacg

SEQ ID NO: 35923 - DNA, 1178 bp, Artificial Sequence
  chemically treated genomic DNA (Homo sapiens) CpG-island No: 35923
gagagtaagagtgaattttcgttgaatttggttatttgtttgtatgttagtcggtattttatttggtcggatattggttttttaggaggtcgatttggtattttcggaaattcgaatattcgggtcggtaattttcggagtggcggtgtcgcgggtcggttttgtagcgggtattgggttgtcgtttcgtttcgcgtttttgcgtaaatacgcggttttttcggtaacgttggaatttacgttaaaggtttcgttaggtttttagcgatcgttattttttcggtcgagtttagtttttcgcggcggtcgttagttttcggtttcgagttattatttcgatttagcggtcgtcgttttcggtgcgggatgaggagattcgcggtcgttattgggttttatggaggagtcgtagtcgtttcgtttattagcgagtatggttttattgggtagttagtatttcggcgtttttttcgcggtcggtttatttggcgggatttttttcgcggttacggcggtcgtgtttttttttagtatcgtggcgatcgcggcgttggggaatttgagcgacgtaagcggaggcggtatagttgtcgttttcggtggcggcggttttggcgggttcggggtagcgcgggaggcgggggcggcggtgaggcggtcgttagcgacggaggcggcgtcgttgttgtcgtacggagttgtagtggcggtttaggcgttcgtttttttgtttatttttttgttgtttagttttggtaattgcgcggtgatgggggtgattgtgaagtatcggtagtttcgtatcgttattaacgtttttattttgtcgttgtttttatcggatttgtttacggcgttgttttgtttgttcgtcgtttttttggatttttttatttcgttcgggggttcggcgtttgtcgtcgtcgcggggttttggcgcggtttttgcgtcgttagtcgtttttttagttcgtgtttcggtatcgtgtttacgtttagcgtggcgtttatttcgttggatcgttattgcgttatcgtgcggtcgtcgcgggagaagatcggtcgtcgtcgcgcgttgtagttgttggcgggcgtttggttgacggttttgggtttttttttgttttgggagttgttcggggcgtttcgggaattcgcggcggcgtagagtttttacg

SEQ ID NO: 35924 - DNA, 1178 bp, Artificial Sequence
  chemically treated genomic DNA (Homo sapiens) CpG-island No: 35924
cgtaaaaactctacgccgccgcgaattcccgaaacgccccgaacaactcccaaaacaaaaaaaaacccaaaaccgtcaaccaaacgcccgccaacaactacaacgcgcgacgacgaccgatcttctcccgcgacgaccgcacgataacgcaataacgatccaacgaaataaacgccacgctaaacgtaaacacgataccgaaacacgaactaaaaaaacgactaacgacgcaaaaaccgcgccaaaaccccgcgacgacgacaaacgccgaacccccgaacgaaataaaaaaatccaaaaaaacgacgaacaaacaaaacaacgccgtaaacaaatccgataaaaacaacgacaaaataaaaacgttaataacgatacgaaactaccgatacttcacaatcacccccatcaccgcgcaattaccaaaactaaacaacaaaaaaataaacaaaaaaacgaacgcctaaaccgccactacaactccgtacgacaacaacgacgccgcctccgtcgctaacgaccgcctcaccgccgcccccgcctcccgcgctaccccgaacccgccaaaaccgccgccaccgaaaacgacaactataccgcctccgcttacgtcgctcaaattccccaacgccgcgatcgccacgatactaaaaaaaaacacgaccgccgtaaccgcgaaaaaaatcccgccaaataaaccgaccgcgaaaaaaacgccgaaatactaactacccaataaaaccatactcgctaataaacgaaacgactacgactcctccataaaacccaataacgaccgcgaatctcctcatcccgcaccgaaaacgacgaccgctaaatcgaaataataactcgaaaccgaaaactaacgaccgccgcgaaaaactaaactcgaccgaaaaaataacgatcgctaaaaacctaacgaaacctttaacgtaaattccaacgttaccgaaaaaaccgcgtatttacgcaaaaacgcgaaacgaaacgacaacccaatacccgctacaaaaccgacccgcgacaccgccactccgaaaattaccgacccgaatattcgaatttccgaaaataccaaatcgacctcctaaaaaaccaatatccgaccaaataaaataccgactaacatacaaacaaataaccaaattcaacgaaaattcactcttactctc

SEQ ID NO: 35925 - DNA, 509 bp, Artificial Sequence
  chemically treated genomic DNA (Homo sapiens) CpG-island No: 35925
agcgagcgtcgagttagcgtcgagttagcgcggtttttcgggtgcggcgggcgcggggtggattgagcgggttcgggcgggacgagaggtgggcgagcgtttcgtattttcggcgcgtcgcgcgggattagcgttttttagtcgcgttgtttcggtttatcgtgtagttgtagtcgcggcgcggtggcgcggtggcgtagggcgttgttgggtcgtttattgttgagcgcgttgggtttcgtcggcgatgtcgcgcgtcgttttttcggagcggcggcgaagtttgaatttggcgtcggtttggagtttcgagtagttcgggggcggcggtcgcgaggcgagcggcgatggtgagtgaggagggcggttgggtacggagagggaggcgggggtcggtcggttgttttttggagcgcgtttatttcgggttttgcggcgattttggaaagttttgtttggaggatggtttttaggggtttttacggttagtatttcggttgatgggggta

SEQ ID NO: 35926 - DNA, 509 bp, Artificial Sequence
  chemically treated genomic DNA (Homo sapiens) CpG-island No: 35926
tacccccatcaaccgaaatactaaccgtaaaaacccctaaaaaccatcctccaaacaaaactttccaaaatcgccgcaaaacccgaaataaacgcgctccaaaaaacaaccgaccgacccccgcctccctctccgtacccaaccgccctcctcactcaccatcgccgctcgcctcgcgaccgccgcccccgaactactcgaaactccaaaccgacgccaaattcaaacttcgccgccgctccgaaaaaacgacgcgcgacatcgccgacgaaacccaacgcgctcaacaataaacgacccaacaacgccctacgccaccgcgccaccgcgccgcgactacaactacacgataaaccgaaacaacgcgactaaaaaacgctaatcccgcgcgacgcgccgaaaatacgaaacgctcgcccacctctcgtcccgcccgaacccgctcaatccaccccgcgcccgccgcacccgaaaaaccgcgctaactcgacgctaactcgacgctcgct

SEQ ID NO: 35927 - DNA, 509 bp, Artificial Sequence
  chemically treated genomic DNA (Homo sapiens) CpG-island No: 35927
tgtttttattagtcggggtgttggtcgtgaaagtttttgggagttattttttagatagggttttttagagtcgtcgtagagttcgaaatagacgcgttttagaaagtagtcggtcggttttcgttttttttttcgtgtttagtcgttttttttatttattatcgtcgttcgtttcgcggtcgtcgttttcgggttgttcggggttttaggtcgacgttaagtttaaatttcgtcgtcgtttcgaggaggcggcgcgcggtatcgtcggcggggtttaacgcgtttaataatgggcggtttagtagcgttttgcgttatcgcgttatcgcgtcgcggttatagttgtacggtgggtcggggtagcgcggttggaggacgttgatttcgcgcggcgcgtcgagggtgcggggcgttcgtttatttttcgtttcgttcgggttcgtttagtttatttcgcgttcgtcgtattcgaggggtcgcgttggttcggcgttggttcggcgttcgtt

SEQ ID NO: 35928 - DNA, 509 bp, Artificial Sequence
  chemically treated genomic DNA (Homo sapiens) CpG-island No: 35928
aacgaacgccgaaccaacgccgaaccaacgcgacccctcgaatacgacgaacgcgaaataaactaaacgaacccgaacgaaacgaaaaataaacgaacgccccgcaccctcgacgcgccgcgcgaaatcaacgtcctccaaccgcgctaccccgacccaccgtacaactataaccgcgacgcgataacgcgataacgcaaaacgctactaaaccgcccattattaaacgcgttaaaccccgccgacgataccgcgcgccgcctcctcgaaacgacgacgaaatttaaacttaacgtcgacctaaaaccccgaacaacccgaaaacgacgaccgcgaaacgaacgacgataataaataaaaaaaacgactaaacacgaaaaaaaaaacgaaaaccgaccgactactttctaaaacgcgtctatttcgaactctacgacgactctaaaaaaccctatctaaaaaataactcccaaaaactttcacgaccaacaccccgactaataaaaaca

SEQ ID NO: 35929 - DNA, 510 bp, Artificial Sequence
  chemically treated genomic DNA (Homo sapiens) CpG-island No: 35929
  unsure (13, 405, 408, 427)
cggggggagcgtnaataggaaggaggggtttgatatgatgttcgtaagcggtaatcgaaaacgattcggaaaggtttttcgggattaatagaaaattttcgtgcggggggtacgttcgaagcggggtcggttttatggtcgtcgtggggcgggaagtatttaagggaatttcggaattttgaggggggggtcgcgtttttttattcgttagggggggtcgcgtttcgggttcggcggttcgggtcgaattttttcgggggcgcgcggggcggtttttcggcgaatacgtcgttaattgtggggcggtgtcgatcggtgttcgggagagaagttcgtttttgcgcgcggcgtcgttttttttttttcgcgggttcgcgcggagggtcggtacgcgcgttgtaggtncgncgagcgtcgcgtttttcgncgagcgcgttttgtcgcggcgtcgcgtttatcggcgcggggttaggacggggggggcgtcgtagacggcgtcgttcgggggcg

SEQ ID NO: 35930 - DNA, 510 bp, Artificial Sequence
  chemically treated genomic DNA (Homo sapiens) CpG-island No: 35930
  unsure (84, 103, 106, 498)
cgcccccgaacgacgccgtctacgacgccccccccgtcctaaccccgcgccgataaacgcgacgccgcgacaaaacgcgctcgncgaaaaacgcgacgctcgncgnacctacaacgcgcgtaccgaccctccgcgcgaacccgcgaaaaaaaaaaaacgacgccgcgcgcaaaaacgaacttctctcccgaacaccgatcgacaccgccccacaattaacgacgtattcgccgaaaaaccgccccgcgcgcccccgaaaaaattcgacccgaaccgccgaacccgaaacgcgaccccccctaacgaataaaaaaacgcgacccccccctcaaaattccgaaattcccttaaatacttcccgccccacgacgaccataaaaccgaccccgcttcgaacgtaccccccgcacgaaaattttctattaatcccgaaaaacctttccgaatcgttttcgattaccgcttacgaacatcatatcaaacccctccttcctattnacgctccccccg

SEQ ID NO: 35931 - DNA, 510 bp, Artificial Sequence
  chemically treated genomic DNA (Homo sapiens) CpG-island No: 35931
  unsure (84, 103, 106, 498)
cgttttcgaacggcgtcgtttgcggcgtttttttcgttttgatttcgcgtcggtgggcgcggcgtcgcggtagggcgcgttcgncgaaaagcgcggcgttcgncgngtttatagcgcgcgtgtcgatttttcgcgcgagttcgcggggggggaagggcggcgtcgcgcgtaggggcgggtttttttttcgggtatcggtcggtatcgttttataattagcggcgtgttcgtcggggggtcgtttcgcgcgttttcgggggggttcggttcgggtcgtcgggttcggggcgcggttttttttggcgggtagaagggcgcggttttttttttagggtttcggggtttttttaggtgtttttcgttttacggcggttatgaggtcggtttcgtttcgagcgtatttttcgtacgaaggttttttattggtttcggagggttttttcgggtcgttttcggttgtcgtttgcgggtattatgttagattttttttttttattngcgtttttttcg

SEQ ID NO: 35932 - DNA, 510 bp, Artificial Sequence
  chemically treated genomic DNA (Homo sapiens) CpG-island No: 35932
  unsure (13, 405, 408, 427)
cgaaaaaaacgcnaataaaaaaaaaaaatctaacataatacccgcaaacgacaaccgaaaacgacccgaaaaaaccctccgaaaccaataaaaaaccttcgtacgaaaaatacgctcgaaacgaaaccgacctcataaccgccgtaaaacgaaaaacacctaaaaaaaccccgaaaccctaaaaaaaaaaccgcgcccttctacccgccaaaaaaaaccgcgccccgaacccgacgacccgaaccgaacccccccgaaaacgcgcgaaacgaccccccgacgaacacgccgctaattataaaacgataccgaccgatacccgaaaaaaaaacccgcccctacgcgcgacgccgcccttccccccccgcgaactcgcgcgaaaaatcgacacgcgcgctataaacncgncgaacgccgcgcttttcgncgaacgcgccctaccgcgacgccgcgcccaccgacgcgaaatcaaaacgaaaaaaacgccgcaaacgacgccgttcgaaaacg

SEQ ID NO: 35933 - DNA, 687 bp, Artificial Sequence
  chemically treated genomic DNA (Homo sapiens) CpG-island No: 35933
cgaagttcggttcggcgttgatagggcgttatttttttagtttcggagaatttttagggattttcggttttcgcgtcggttattcgagattttcgcggttttttttcggacggtttcgcgcgcgaggttcggtttcgttttcggacgtcgggtttcgattttcgattcgattttgggcgggttcgtaggcgggaagtcggtaggggagtagggggtgtcgggaaagggagagggttcgcgtcgttttttgtttattttttcggacgtcgtcggtcgtcgttatttgttttattgtagtagtagtagtcgtcgcggtcgtcgtttttcgtttttcggttcgtcggttcggggcgggggagagcgtgacgttcgtcgtcgtcgcgggtcgggcgtgcgtcgttgtttatgagaagatatcgcgcgttttttttagagtttcgtcgtcgcgttcgttcggtggggcggttcggattttttcgagttcgtatcggttttgcggtcgcgttcggtttcgcgtcgtttcgtcgtttttttgtttgcgtttatcgcggtttcgggaggattttggtttcggcgcgttcgtcgttcgttttcgaattttttcgagtttcggtttggggagtaaggtgcgagggaaaatttataggtttgtttcgaggggtttttcgttatttttgtaaagtgttt

SEQ ID NO: 35934 - DNA, 687 bp, Artificial Sequence
  chemically treated genomic DNA (Homo sapiens) CpG-island No: 35934
aaacactttacaaaaataacgaaaaacccctcgaaacaaacctataaattttccctcgcaccttactccccaaaccgaaactcgaaaaaattcgaaaacgaacgacgaacgcgccgaaaccaaaatcctcccgaaaccgcgataaacgcaaacaaaaaaacgacgaaacgacgcgaaaccgaacgcgaccgcaaaaccgatacgaactcgaaaaaatccgaaccgccccaccgaacgaacgcgacgacgaaactctaaaaaaaacgcgcgatatcttctcataaacaacgacgcacgcccgacccgcgacgacgacgaacgtcacgctctcccccgccccgaaccgacgaaccgaaaaacgaaaaacgacgaccgcgacgactactactactacaataaaacaaataacgacgaccgacgacgtccgaaaaaataaacaaaaaacgacgcgaaccctctccctttcccgacaccccctactcccctaccgacttcccgcctacgaacccgcccaaaatcgaatcgaaaatcgaaacccgacgtccgaaaacgaaaccgaacctcgcgcgcgaaaccgtccgaaaaaaaaccgcgaaaatctcgaataaccgacgcgaaaaccgaaaatccctaaaaattctccgaaactaaaaaaataacgccctatcaacgccgaaccgaacttcg

SEQ ID NO: 35935 - DNA, 687 bp, Artificial Sequence
  chemically treated genomic DNA (Homo sapiens) CpG-island No: 35935
gaatattttgtagaaatgacgagaagtttttcggagtaggtttgtgggttttttttcgtattttgttttttaagtcggggttcgggagggttcgagggcggacggcgggcgcgtcggggttagggttttttcggggtcgcggtgggcgtagataaagaggcggcggggcggcgcgaggtcgggcgcggtcgtagggtcggtgcggattcgagggggttcgggtcgttttatcgggcgggcgcggcggcggagttttgggaggagcgcgcggtgtttttttatggatagcggcgtacgttcggttcgcggcggcggcgggcgttacgttttttttcgtttcgagtcgacgagtcgggaggcgggaggcggcggtcgcggcggttgttgttgttgtagtgggataggtggcggcgatcggcggcgttcgaggaggtgagtagggggcggcgcgggttttttttttttttcggtattttttgtttttttgtcggtttttcgtttgcgggttcgtttagggtcgggtcgggggtcgaagttcggcgttcgggagcggggtcgagtttcgcgcgcggagtcgttcgggaggggatcgcgggagtttcgggtggtcggcgcggaggtcgggggtttttggaggtttttcggagttggaaaagtggcgttttgttagcgtcgagtcgggtttcg

SEQ ID NO: 35936 - DNA, 687 bp, Artificial Sequence
  chemically treated genomic DNA (Homo sapiens) CpG-island No: 35936
cgaaacccgactcgacgctaacaaaacgccacttttccaactccgaaaaacctccaaaaacccccgacctccgcgccgaccacccgaaactcccgcgatcccctcccgaacgactccgcgcgcgaaactcgaccccgctcccgaacgccgaacttcgacccccgacccgaccctaaacgaacccgcaaacgaaaaaccgacaaaaaaacaaaaaataccgaaaaaaaaaaaaaacccgcgccgccccctactcacctcctcgaacgccgccgatcgccgccacctatcccactacaacaacaacaaccgccgcgaccgccgcctcccgcctcccgactcgtcgactcgaaacgaaaaaaaacgtaacgcccgccgccgccgcgaaccgaacgtacgccgctatccataaaaaaacaccgcgcgctcctcccaaaactccgccgccgcgcccgcccgataaaacgacccgaaccccctcgaatccgcaccgaccctacgaccgcgcccgacctcgcgccgccccgccgcctctttatctacgcccaccgcgaccccgaaaaaaccctaaccccgacgcgcccgccgtccgccctcgaaccctcccgaaccccgacttaaaaaacaaaatacgaaaaaaaacccacaaacctactccgaaaaacttctcgtcatttctacaaaatattc

SEQ ID NO: 35937 - DNA, 522 bp, Artificial Sequence
  chemically treated genomic DNA (Homo sapiens) CpG-island No: 35937
tttttcgcgtatttcgtggttagtagttagatagttgtgtttaattagaaattacgttataattttagacgattcgaaggggaaatttcggcgtgaagtgtagtttcgtttcggttttttttagttttttttttttttttggaattcgaggcgcggatttttttcgttttatcgttttagttttttcgggagttcgtcggtgttttttagggtgtcggttcgtgttgggaagtgttttttattttggtaatggggggcggcgaggtatcgtaggagtggcgaggcggcgtttagggtggtattgtttcggaacggggcgttgggtgcgcgcgggagggttttcgcgcgggtttcgtcgttgtcgtagttgcgagcgcgtcgcgttatcgagttttttgtagtaatggttcgttcgtgaaacgcgagttacggttgttttttttaagagtgtttgtatttttcgtttgcgtttcgtaattgttttgggtgaaaatggttgtttagattaaaatgtggtagaag

SEQ ID NO: 35938 - DNA, 522 bp, Artificial Sequence
  chemically treated genomic DNA (Homo sapiens) CpG-island No: 35938
cttctaccacattttaatctaaacaaccattttcacccaaaacaattacgaaacgcaaacgaaaaatacaaacactcttaaaaaaaacaaccgtaactcgcgtttcacgaacgaaccattactacaaaaaactcgataacgcgacgcgctcgcaactacgacaacgacgaaacccgcgcgaaaaccctcccgcgcgcacccaacgccccgttccgaaacaataccaccctaaacgccgcctcgccactcctacgatacctcgccgccccccattaccaaaataaaaaacacttcccaacacgaaccgacaccctaaaaaacaccgacgaactcccgaaaaaactaaaacgataaaacgaaaaaaatccgcgcctcgaattccaaaaaaaaaaaaaaaactaaaaaaaaccgaaacgaaactacacttcacgccgaaatttccccttcgaatcgtctaaaattataacgtaatttctaattaaacacaactatctaactactaaccacgaaatacgcgaaaaa

SEQ ID NO: 35939 - DNA, 522 bp, Artificial Sequence
  chemically treated genomic DNA (Homo sapiens) CpG-island No: 35939
tttttgttatattttagtttagatagttatttttatttaggatagttgcgaagcgtaaacggaggatgtaggtatttttaaaaagagtagtcgtggttcgcgttttacggacgagttattgttgtaggaggttcggtggcgcggcgcgttcgtagttgcggtagcggcggagttcgcgcggggattttttcgcgcgtatttagcgtttcgtttcggggtagtgttattttgggcgtcgtttcgttatttttacggtgtttcgtcgttttttattattaggatggagggtattttttagtacgagtcgatattttagagggtatcggcgagttttcgaaaaaattagggcggtggggcgaggaagattcgcgtttcggattttagagaaggaaagaaagttagagggagtcggagcggagttgtattttacgtcgaagtttttttttcgaatcgtttggagttgtaacgtggtttttgattgaatatagttgtttagttgttggttacggggtgcgcggagga

SEQ ID NO: 35940 - DNA, 522 bp, Artificial Sequence
  chemically treated genomic DNA (Homo sapiens) CpG-island No: 35940
tcctccgcgcaccccgtaaccaacaactaaacaactatattcaatcaaaaaccacgttacaactccaaacgattcgaaaaaaaaacttcgacgtaaaatacaactccgctccgactccctctaactttctttccttctctaaaatccgaaacgcgaatcttcctcgccccaccgccctaattttttcgaaaactcgccgataccctctaaaatatcgactcgtactaaaaaataccctccatcctaataataaaaaacgacgaaacaccgtaaaaataacgaaacgacgcccaaaataacactaccccgaaacgaaacgctaaatacgcgcgaaaaaatccccgcgcgaactccgccgctaccgcaactacgaacgcgccgcgccaccgaacctcctacaacaataactcgtccgtaaaacgcgaaccacgactactctttttaaaaatacctacatcctccgtttacgcttcgcaactatcctaaataaaaataactatctaaactaaaatataacaaaaa

SEQ ID NO: 35941 - DNA, 671 bp, Artificial Sequence
  chemically treated genomic DNA (Homo sapiens) CpG-island No: 35941
agggaggcgttgagggaggcggtttcggtttcggtttcggtttcgtagtatcgttcgatatttttgacgtcgttgtttaggttttggagttttcgcgttagttcggttagggcggtggtggcggttttttcgcggttcgcgtcgtggttgggttttaggtgttttgtcggtcgcgggggtttcgaggtttgttttagggtcgttattcgggcggttagttcgttttagtcgagcgtttgtttttgtagttcgttagcggcgttttgtagggttacgcggatttgttcgtagtttaggggtagcggtttcggcgtttgtttagatattttttttagtatttttttttcgaagagcgcggttagtatcgtttcgtgtcgtagcgcgttttttagtagggcggcgaaggcgttgtgtagttggcgtatttcgtggcgggtttcggtcgcggtcgtttttagcgcgtttatttcgttatttagcgtttgtatttggtttcggagtcgcgacgtggtcgttcgcgttcgttcgtttttcgttttgtgcgcgtttacggttagcgatacggcgtttacggcgttttgtagggtttgtagggaggagtcgtttagttgtcgtcgttcgtttaggtttatttgggttttttttagggtacgcgtggcgtttttttggtt

SEQ ID NO: 35942 - DNA, 671 bp, Artificial Sequence
  chemically treated genomic DNA (Homo sapiens) CpG-island No: 35942
aaccaaaaaaacgccacgcgtaccctaaaaaaaacccaaataaacctaaacgaacgacgacaactaaacgactcctccctacaaaccctacaaaacgccgtaaacgccgtatcgctaaccgtaaacgcgcacaaaacgaaaaacgaacgaacgcgaacgaccacgtcgcgactccgaaaccaaatacaaacgctaaataacgaaataaacgcgctaaaaacgaccgcgaccgaaacccgccacgaaatacgccaactacacaacgccttcgccgccctactaaaaaacgcgctacgacacgaaacgatactaaccgcgctcttcgaaaaaaaaatactaaaaaaaatatctaaacaaacgccgaaaccgctacccctaaactacgaacaaatccgcgtaaccctacaaaacgccgctaacgaactacaaaaacaaacgctcgactaaaacgaactaaccgcccgaataacgaccctaaaacaaacctcgaaacccccgcgaccgacaaaacacctaaaacccaaccacgacgcgaaccgcgaaaaaaccgccaccaccgccctaaccgaactaacgcgaaaactccaaaacctaaacaacgacgtcaaaaatatcgaacgatactacgaaaccgaaaccgaaaccgaaaccgcctccctcaacgcctccct

SEQ ID NO: 35943 - DNA, 671 bp, Artificial Sequence
  chemically treated genomic DNA (Homo sapiens) CpG-island No: 35943
ggttagagggacgttacgcgtgttttggaggagatttaggtgagtttggacgagcggcggtagttggacggtttttttttgtaggttttgtagaacgtcgtggacgtcgtgtcgttggtcgtggacgcgtataaagcggagggcgagcgggcgcgggcggttacgtcgcggtttcggagttaagtgtaggcgttggatgacgaggtgggcgcgttgaaggcggtcgcggtcgaggttcgttacgaggtgcgttagttgtatagcgttttcgtcgttttgttggaggacgcgttgcggtacgaggcggtgttggtcgcgtttttcggggaggaggtgttggaggagatgtttgagtagacgtcgggatcgttgtttttgagttacgagtagattcgcgtggttttgtaggacgtcgttagcgggttgtaggagtaggcgttcggttgggacgagttggtcgttcgagtgacggttttggagtaggtttcggagttttcgcggtcggtagagtatttggagtttagttacgacgcgggtcgcgaggaggtcgttattatcgttttggtcgggttggcgcgggagttttagagtttgagtaacgacgttaagaatgtcgggcggtgttgcgaggtcgaggtcggggtcggggtcgttttttttaacgttttttt

SEQ ID NO: 35944 - DNA, 671 bp, Artificial Sequence
  chemically treated genomic DNA (Homo sapiens) CpG-island No: 35944
aaaaaaacgttaaaaaaaacgaccccgaccccgacctcgacctcgcaacaccgcccgacattcttaacgtcgttactcaaactctaaaactcccgcgccaacccgaccaaaacgataataacgacctcctcgcgacccgcgtcgtaactaaactccaaatactctaccgaccgcgaaaactccgaaacctactccaaaaccgtcactcgaacgaccaactcgtcccaaccgaacgcctactcctacaacccgctaacgacgtcctacaaaaccacgcgaatctactcgtaactcaaaaacaacgatcccgacgtctactcaaacatctcctccaacacctcctccccgaaaaacgcgaccaacaccgcctcgtaccgcaacgcgtcctccaacaaaacgacgaaaacgctatacaactaacgcacctcgtaacgaacctcgaccgcgaccgccttcaacgcgcccacctcgtcatccaacgcctacacttaactccgaaaccgcgacgtaaccgcccgcgcccgctcgccctccgctttatacgcgtccacgaccaacgacacgacgtccacgacgttctacaaaacctacaaaaaaaaaccgtccaactaccgccgctcgtccaaactcacctaaatctcctccaaaacacgcgtaacgtccctctaacc

SEQ ID NO: 35945 - DNA, 693 bp, Artificial Sequence
  chemically treated genomic DNA (Homo sapiens) CpG-island No: 35945
cgggggtcgtttttatttcgggttcggttttaggggttgttgttcgaacgtattggtttttttagaagtattcgtcggcggtatatcggtagggcggtcggttttgttgggttttttgggcgtcggtttcgggggttcgggcggtttttttcggttttcggtttggattcgcgaacgcgcgggcgcgaggggttgggacgcgggagttttttgagtgcggagcgcggagttttggtgtttcggcgtattgtagttatattttcgggtcgcgcgttttcgtcgttttttattcgcgtcgtagggtttttttttttgaggcgtcgttcgcgtatcgtcgggggggagggggtagcgttaataaattggggagttcggttcgtcgcgtttaggttttcgtttggagtcgtcgtattcgggacggtgcgtagcgttggaagttcggtttttcgagagttagttgttcgtcgcggttttcgtacgtcgggtagtcgtttttcgtcgtttcgggcgcgttattatggggtttcggtttagcgtttggttgttgttgttgttcgtcgtttttttgttttacgaggagtatagtcgggtcgttgcgaaggtgagttttcggttagtttcgttttcggcgtttcgtttcgagtttgggcgtttcgagaggtttttttgttcgcgtttggattcgttcgtttg

SEQ ID NO: 35946 - DNA, 693 bp, Artificial Sequence
  chemically treated genomic DNA (Homo sapiens) CpG-island No: 35946
caaacgaacgaatccaaacgcgaacaaaaaaacctctcgaaacgcccaaactcgaaacgaaacgccgaaaacgaaactaaccgaaaactcaccttcgcaacgacccgactatactcctcgtaaaacaaaaaaacgacgaacaacaacaacaaccaaacgctaaaccgaaaccccataataacgcgcccgaaacgacgaaaaacgactacccgacgtacgaaaaccgcgacgaacaactaactctcgaaaaaccgaacttccaacgctacgcaccgtcccgaatacgacgactccaaacgaaaacctaaacgcgacgaaccgaactccccaatttattaacgctaccccctcccccccgacgatacgcgaacgacgcctcaaaaaaaaaaaccctacgacgcgaataaaaaacgacgaaaacgcgcgacccgaaaatataactacaatacgccgaaacaccaaaactccgcgctccgcactcaaaaaactcccgcgtcccaacccctcgcgcccgcgcgttcgcgaatccaaaccgaaaaccgaaaaaaaccgcccgaacccccgaaaccgacgcccaaaaaacccaacaaaaccgaccgccctaccgatataccgccgacgaatacttctaaaaaaaccaatacgttcgaacaacaacccctaaaaccgaacccgaaataaaaacgacccccg

SEQ ID NO: 35947 - DNA, 693 bp, Artificial Sequence
  chemically treated genomic DNA (Homo sapiens) CpG-island No: 35947
taggcggacgggtttaggcgcggataaaggggtttttcggggcgtttaagttcggggcgggacgtcgggagcggagttggtcgggaatttattttcgtagcggttcggttgtgtttttcgtggagtagaagggcggcgggtagtagtagtagttagacgttgagtcggggttttatggtggcgcgttcgaggcggcgagggacggttgttcggcgtgcgggggtcgcggcggatagttagttttcggaaggtcggatttttagcgttacgtatcgtttcgggtgcggcggttttaagcggagatttgagcgcggcgggtcgagttttttaatttgttggcgttgttttttttttttcggcggtgcgcgggcggcgttttaaaggggaggattttgcggcgcgggtaagaggcggcgggagcgcgcggttcgggagtgtggttgtagtgcgtcgggatattagggtttcgcgtttcgtatttaagaggttttcgcgttttaatttttcgcgttcgcgcgttcgcggatttaggtcgaggatcgaaaggggtcgttcgagttttcggggtcggcgtttagagagtttagtaaggtcggtcgttttgtcggtgtgtcgtcggcgggtgtttttggaagggttaatgcgttcgggtagtagtttttgaagtcgagttcgaggtgagagcgattttcg

SEQ ID NO: 35948 - DNA, 693 bp, Artificial Sequence
  chemically treated genomic DNA (Homo sapiens) CpG-island No: 35948
cgaaaatcgctctcacctcgaactcgacttcaaaaactactacccgaacgcattaacccttccaaaaacacccgccgacgacacaccgacaaaacgaccgaccttactaaactctctaaacgccgaccccgaaaactcgaacgacccctttcgatcctcgacctaaatccgcgaacgcgcgaacgcgaaaaattaaaacgcgaaaacctcttaaatacgaaacgcgaaaccctaatatcccgacgcactacaaccacactcccgaaccgcgcgctcccgccgcctcttacccgcgccgcaaaatcctcccctttaaaacgccgcccgcgcaccgccgaaaaaaaaaaaacaacgccaacaaattaaaaaactcgacccgccgcgctcaaatctccgcttaaaaccgccgcacccgaaacgatacgtaacgctaaaaatccgaccttccgaaaactaactatccgccgcgacccccgcacgccgaacaaccgtccctcgccgcctcgaacgcgccaccataaaaccccgactcaacgtctaactactactactacccgccgcccttctactccacgaaaaacacaaccgaaccgctacgaaaataaattcccgaccaactccgctcccgacgtcccgccccgaacttaaacgccccgaaaaacccctttatccgcgcctaaacccgtccgccta

SEQ ID NO: 35949 - DNA, 609 bp, Artificial Sequence
  chemically treated genomic DNA (Homo sapiens) CpG-island No: 35949
tcgaaggtggaacggattttagttatttcggggttaggaaaagatgaagtgtcgtaggttcggcgttttcgtttttcgtttgaggtaacggagtattttttttcgagtagtttattttttagagagttttttcggttgcgaaagttagacgaagagggatttaaagttatcgtagcggtaagagtcggagaattattgagggatagcgttttttgtagaggcggttgaatcgttttttatagcgttgggcggggcgtcgcgtagtttttgggcgttgattgggtatttcgtgttttttttttttcggttcggcgttgtttttgttttttttgatttcgattttaagttatgcgttgagtttcggttggttcggtttttttgaggcgtaagttcggtttgtttaatgaggagcgagcgtcgcgggggtcgtcgggaagggcggtcgatttatataagtagtttgcggggcgttttttcgggttgtggttggtgtgcgggtttcggttggaggattcgttggggaggtggtttgcgtttgtagagattgtattttcgagacgatggcggagggagataatcgtagtattaatttgttggtgagttttggtt

SEQ ID NO: 35950 - DNA, 609 bp, Artificial Sequence
  chemically treated genomic DNA (Homo sapiens) CpG-island No: 35950
aaccaaaactcaccaacaaattaatactacgattatctccctccgccatcgtctcgaaaatacaatctctacaaacgcaaaccacctccccaacgaatcctccaaccgaaacccgcacaccaaccacaacccgaaaaaacgccccgcaaactacttatataaatcgaccgcccttcccgacgacccccgcgacgctcgctcctcattaaacaaaccgaacttacgcctcaaaaaaaccgaaccaaccgaaactcaacgcataacttaaaatcgaaatcaaaaaaaacaaaaacaacgccgaaccgaaaaaaaaaaaacacgaaatacccaatcaacgcccaaaaactacgcgacgccccgcccaacgctataaaaaacgattcaaccgcctctacaaaaaacgctatccctcaataattctccgactcttaccgctacgataactttaaatccctcttcgtctaactttcgcaaccgaaaaaactctctaaaaaataaactactcgaaaaaaaatactccgttacctcaaacgaaaaacgaaaacgccgaacctacgacacttcatcttttcctaaccccgaaataactaaaatccgttccaccttcga

SEQ ID NO: 35951 - DNA, 609 bp, Artificial Sequence
  chemically treated genomic DNA (Homo sapiens) CpG-island No: 35951
agttaggatttattagtaggttggtgttgcgattattttttttcgttatcgtttcggggatgtagtttttataagcgtaggttatttttttaacgagttttttaatcgaaattcgtatattaattataattcgagggaacgtttcgtaggttgtttatatgggtcggtcgtttttttcgacggttttcgcgacgttcgttttttattggatagatcgagtttacgttttaaggaagtcgggttaatcgaagtttagcgtatggtttgaaatcgaggttaaaggagatagaggtagcgtcgggtcgagggggaggggatacggagtgtttaattagcgtttagggattgcgcgacgtttcgtttagcgttgtgggaagcggtttaatcgtttttgtagggggcgttgttttttagtggtttttcggtttttgtcgttgcggtggttttgggttttttttcgtttggttttcgtagtcgaggagattttttggaaaatgggttattcgaagagagatgtttcgttgttttaggcggagggcggggacgtcgggtttgcgatattttatttttttttggtttcgaggtggttgggattcgttttattttcgg

SEQ ID NO: 35952 - DNA, 609 bp, Artificial Sequence
  chemically treated genomic DNA (Homo sapiens) CpG-island No: 35952
ccgaaaataaaacgaatcccaaccacctcgaaaccaaaaaaaaataaaatatcgcaaacccgacgtccccgccctccgcctaaaacaacgaaacatctctcttcgaataacccattttccaaaaaatctcctcgactacgaaaaccaaacgaaaaaaaacccaaaaccaccgcaacgacaaaaaccgaaaaaccactaaaaaacaacgccccctacaaaaacgattaaaccgcttcccacaacgctaaacgaaacgtcgcgcaatccctaaacgctaattaaacactccgtatcccctccccctcgacccgacgctacctctatctcctttaacctcgatttcaaaccatacgctaaacttcgattaacccgacttccttaaaacgtaaactcgatctatccaataaaaaacgaacgtcgcgaaaaccgtcgaaaaaaacgaccgacccatataaacaacctacgaaacgttccctcgaattataattaatatacgaatttcgattaaaaaactcgttaaaaaaataacctacgcttataaaaactacatccccgaaacgataacgaaaaaaaataatcgcaacaccaacctactaataaatcctaact

SEQ ID NO: 35953 - DNA, 702 bp, Artificial Sequence
  chemically treated genomic DNA (Homo sapiens) CpG-island No: 35953
cgtttattcgtgtttttttaaggagttttttgtttttgtagggatttcgacggatttaagtcgatgagggaaggtggtgcgcgtattagtagtcgggcggcggtatcgggaagggagagcgaggcgcgtagattttcgcgtcgagtgttttgggttggcgggtatttcgcggcgttcgggtagcgttagcgtttagatcggtcgagcgtaattttagtttggatcgtagttttcgttaaaatattttttttggcgttttgagatcgaatttgagaatttattaattagcggcggtcggcggggcggtttcggttaatcgtgcggcggtacggttcgggtttatcgtttttcggagttttggcgtttcgagtcgcgcgttttgtttttattcgtttaattgttgtcgtttcggttttttttttttttcgggtatttggaaatttcgggttcgggagttaatttttgttggggacgcgggtttcggcggtcgcgggaagttaaggtgggggcggcgcggggcggcgcggggcggcgggagaaggaagaggaggaggagggtttttttgttatgtatagaagattcgcgtacgttttcgcggtttgtcgcgttcggggatttcgggtatagttagaggataggaaagtagatggggtttggaagaacgatttatattttttggatgttgttgtcgttattttcgt

SEQ ID NO: 35954 - DNA, 702 bp, Artificial Sequence
  chemically treated genomic DNA (Homo sapiens) CpG-island No: 35954
acgaaaataacgacaacaacatccaaaaaatataaatcgttcttccaaaccccatctactttcctatcctctaactatacccgaaatccccgaacgcgacaaaccgcgaaaacgtacgcgaatcttctatacataacaaaaaaaccctcctcctcctcttccttctcccgccgccccgcgccgccccgcgccgcccccaccttaacttcccgcgaccgccgaaacccgcgtccccaacaaaaattaactcccgaacccgaaatttccaaatacccgaaaaaaaaaaaaaaccgaaacgacaacaattaaacgaataaaaacaaaacgcgcgactcgaaacgccaaaactccgaaaaacgataaacccgaaccgtaccgccgcacgattaaccgaaaccgccccgccgaccgccgctaattaataaattctcaaattcgatctcaaaacgccaaaaaaaatattttaacgaaaactacgatccaaactaaaattacgctcgaccgatctaaacgctaacgctacccgaacgccgcgaaatacccgccaacccaaaacactcgacgcgaaaatctacgcgcctcgctctcccttcccgataccgccgcccgactactaatacgcgcaccaccttccctcatcgacttaaatccgtcgaaatccctacaaaaacaaaaaactccttaaaaaaacacgaataaacg

SEQ ID NO: 35955 - DNA, 702 bp, Artificial Sequence
  chemically treated genomic DNA (Homo sapiens) CpG-island No: 35955
gcggggatggcggtagtagtatttagagggtgtagatcgtttttttaaattttatttgtttttttgttttttggttgtgttcggggttttcgggcgcggtaagtcgcggggacgtgcgcgggttttttatgtataataaaagagttttttttttttttttttttttttcgtcgtttcgcgtcgtttcgcgtcgtttttattttggtttttcgcggtcgtcggggttcgcgtttttagtaggaattggttttcgggttcgaggtttttaggtattcggaagggggagggggtcgaggcggtaataattgggcgggtgagggtaaaacgcgcggttcggagcgttaagatttcgaggggcggtgagttcgggtcgtgtcgtcgtacgattggtcggggtcgtttcgtcggtcgtcgttgattggtggatttttaaattcggttttaaggcgttagaggaggtgttttagcggggattacgatttaggttggagttgcgttcggtcggtttgagcgttggcgttgttcggacgtcgcggggtattcgttagtttagggtattcggcgcggggatttgcgcgtttcgtttttttttttcgatgtcgtcgttcggttgttgatacgcgtattatttttttttatcggtttgggttcgtcgaggtttttgtagaggtaggaagttttttaggaaagtacgggtaaacg

SEQ ID NO: 35956 - DNA, 702 bp, Artificial Sequence
  chemically treated genomic DNA (Homo sapiens) CpG-island No: 35956
cgtttacccgtactttcctaaaaaacttcctacctctacaaaaacctcgacgaacccaaaccgataaaaaaaaataatacgcgtatcaacaaccgaacgacgacatcgaaaaaaaaaaacgaaacgcgcaaatccccgcgccgaataccctaaactaacgaataccccgcgacgtccgaacaacgccaacgctcaaaccgaccgaacgcaactccaacctaaatcgtaatccccgctaaaacacctcctctaacgccttaaaaccgaatttaaaaatccaccaatcaacgacgaccgacgaaacgaccccgaccaatcgtacgacgacacgacccgaactcaccgcccctcgaaatcttaacgctccgaaccgcgcgttttaccctcacccgcccaattattaccgcctcgaccccctcccccttccgaatacctaaaaacctcgaacccgaaaaccaattcctactaaaaacgcgaaccccgacgaccgcgaaaaaccaaaataaaaacgacgcgaaacgacgcgaaacgacgaaaaaaaaaaaaaaaaaaaaaaaactcttttattatacataaaaaacccgcgcacgtccccgcgacttaccgcgcccgaaaaccccgaacacaaccaaaaaacaaaaaaacaaataaaatttaaaaaaacgatctacaccctctaaatactactaccgccatccccgc

SEQ ID NO: 35957 - DNA, 647 bp, Artificial Sequence
  chemically treated genomic DNA (Homo sapiens) CpG-island No: 35957
  unsure (233, 367, 396, 611..612, 636, 640)
tatcgcgtcgtcggtatggatttggtaggtgcgaggtcgaggttagggtttagcgaaggacgtcgagtttatagagcgcgcgcgttttagaggaggtagtagtagtcgtagtttggttcgttcgaattttgcgagtttggcgggggagatagaggcgggcgatttgttcgttagcgttgaggaacgattttttttatgttagttcgttgttcgttttttcgtagcgtagagtnttttttaaagaatttgcggttttttataatcgttttaaataataaatttttgttttcgttttcgtaggaattggggtagttgggggttcgcgttatagatttaagttcgttagtagaagggtaggtcggaagtntgcgttcgaatttcgttttagttggggantaggtcgttatcggtaggagggagtcggcgcgagagatttgacgggaggaggtggagagcgggaggcgggaatgagggcgcgggatcgggcgggcggagcgtgcgagatttgcgtagcgagtttagtagggcggagggcggggcgtggcgcgttcggttttcgtttcgcgcgttgtaattttgtcgagtttttttgaaaatttttgtcgttaaannagggggaatttttttaggaacgtncganatttcgt

SEQ ID NO: 35958 - DNA, 647 bp, Artificial Sequence
  chemically treated genomic DNA (Homo sapiens) CpG-island No: 35958
  unsure (8, 12, 36..37, 252, 281, 415)
acgaaatntcgnacgttcctaaaaaaattccccctnntttaacgacaaaaattttcaaaaaaactcgacaaaattacaacgcgcgaaacgaaaaccgaacgcgccacgccccgccctccgccctactaaactcgctacgcaaatctcgcacgctccgcccgcccgatcccgcgccctcattcccgcctcccgctctccacctcctcccgtcaaatctctcgcgccgactccctcctaccgataacgacctantccccaactaaaacgaaattcgaacgcanacttccgacctacccttctactaacgaacttaaatctataacgcgaacccccaactaccccaattcctacgaaaacgaaaacaaaaatttattatttaaaacgattataaaaaaccgcaaattctttaaaaaanactctacgctacgaaaaaacgaacaacgaactaacataaaaaaaatcgttcctcaacgctaacgaacaaatcgcccgcctctatctcccccgccaaactcgcaaaattcgaacgaaccaaactacgactactactacctcctctaaaacgcgcgcgctctataaactcgacgtccttcgctaaaccctaacctcgacctcgcacctaccaaatccataccgacgacgcgata

SEQ ID NO: 35959 - DNA, 647 bp, Artificial Sequence
  chemically treated genomic DNA (Homo sapiens) CpG-island No: 35959
  unsure (8, 12, 36..37, 252, 281, 415)
gcgaggtntcgnacgtttttagagagattttttttnntttaacggtagagatttttaaggaggttcggtagagttgtagcgcgcggggcgaaggtcgggcgcgttacgtttcgtttttcgttttgttgggttcgttgcgtagatttcgtacgtttcgttcgttcggtttcgcgtttttattttcgtttttcgttttttattttttttcgttaagtttttcgcgtcggtttttttttgtcggtagcggtttgntttttagttggagcggggttcggacgtangttttcggtttgtttttttgttggcgggtttgagtttgtgacgcgaatttttagttgttttaatttttacgggggcgaggataggggtttgttatttaagacggttgtggagggtcgtaggttttttggagggngttttacgttgcgggaaggcggatagcgagttggtataaagggagtcgttttttagcgttagcgggtaggtcgttcgtttttgtttttttcgttaggttcgtaaagttcgggcgggttaggttgcggttgttgttgttttttttagggcgcgcgcgttttgtaaattcggcgtttttcgttgagttttggtttcggtttcgtatttgttagatttatgtcgacggcgcggtg

SEQ ID NO: 35960 - DNA, 647 bp, Artificial Sequence
  chemically treated genomic DNA (Homo sapiens) CpG-island No: 35960
  unsure (233, 367, 396, 611..612, 636, 640)
caccgcgccgtcgacataaatctaacaaatacgaaaccgaaaccaaaactcaacgaaaaacgccgaatttacaaaacgcgcgcgccctaaaaaaaacaacaacaaccgcaacctaacccgcccgaactttacgaacctaacgaaaaaaacaaaaacgaacgacctacccgctaacgctaaaaaacgactccctttataccaactcgctatccgccttcccgcaacgtaaaacnccctccaaaaaacctacgaccctccacaaccgtcttaaataacaaacccctatcctcgcccccgtaaaaattaaaacaactaaaaattcgcgtcacaaactcaaacccgccaacaaaaaaacaaaccgaaaacntacgtccgaaccccgctccaactaaaaancaaaccgctaccgacaaaaaaaaaccgacgcgaaaaacttaacgaaaaaaaataaaaaacgaaaaacgaaaataaaaacgcgaaaccgaacgaacgaaacgtacgaaatctacgcaacgaacccaacaaaacgaaaaacgaaacgtaacgcgcccgaccttcgccccgcgcgctacaactctaccgaacctccttaaaaatctctaccgttaaannaaaaaaaatctctctaaaaacgtncganacctcgc

SEQ ID NO: 35961 - DNA, 685 bp, Artificial Sequence
  chemically treated genomic DNA (Homo sapiens) CpG-island No: 35961
tgatttcgtcggttgggtgaggtagtattcggtgacggcggttatgattgtgttttgggcgtaggaacgagtttttcgcgttgtttcgaaggtttttgatttttcgcgttttgcgttgtttcgcgtcgtcgggtggatttatatacgttaggagtaaattgcgtaggattcggtcgttatttttttgcgtttttttatcgcggagattttgcgtttttagtttagcgttttttattttatttgggtagcgttgcgtttgcggttcgtcggtttcgggttcgttcgtcgcggattttggtttaggtttcggtttcggttggggtttcggatttagttttggttttggtattgtacggtttttcggtttttgttggttcgttatattttagcgcgcgaggtcggggttttttcggttcggttcgtttttttcgtcgtcgtcgttcgtcgttcgcggggaaggcggggatattggtcgggaggcgggaagggtggggggaggggaagttagtgttcgtcgggatttgcggggagaggggcggcgcgtagtttcgtcggttaggggttttggtttttttcggggcgtaggttggggttcgcgcggttggcggtcgggtttcgaggtcggggagcgcgttttgggattttcgtggaggggttttgtcgtatgcggacgaagttagagcgg

SEQ ID NO: 35962 - DNA, 685 bp, Artificial Sequence
  chemically treated genomic DNA (Homo sapiens) CpG-island No: 35962
ccgctctaacttcgtccgcatacgacaaaacccctccacgaaaatcccaaaacgcgctccccgacctcgaaacccgaccgccaaccgcgcgaaccccaacctacgccccgaaaaaaaccaaaacccctaaccgacgaaactacgcgccgcccctctccccgcaaatcccgacgaacactaacttcccctccccccacccttcccgcctcccgaccaatatccccgccttccccgcgaacgacgaacgacgacgacgaaaaaaacgaaccgaaccgaaaaaaccccgacctcgcgcgctaaaatataacgaaccaacaaaaaccgaaaaaccgtacaataccaaaaccaaaactaaatccgaaaccccaaccgaaaccgaaacctaaaccaaaatccgcgacgaacgaacccgaaaccgacgaaccgcaaacgcaacgctacccaaataaaataaaaaacgctaaactaaaaacgcaaaatctccgcgataaaaaaacgcaaaaaaataacgaccgaatcctacgcaatttactcctaacgtatataaatccacccgacgacgcgaaacaacgcaaaacgcgaaaaatcaaaaaccttcgaaacaacgcgaaaaactcgttcctacgcccaaaacacaatcataaccgccgtcaccgaatactacctcacccaaccgacgaaatca

SEQ ID NO: 35963 - DNA, 685 bp, Artificial Sequence
  chemically treated genomic DNA (Homo sapiens) CpG-island No: 35963
tcgttttggtttcgttcgtatgcggtagggtttttttacggaggttttagggcgcgtttttcggtttcgaggttcggtcgttagtcgcgcggattttagtttacgtttcgagggaggttaggatttttagtcggcgggattgcgcgtcgttttttttttcgtaggtttcggcgaatattagttttttttttttttatttttttcgtttttcggttagtgttttcgtttttttcgcgggcgacgggcggcggcggcgggaggagcgggtcgagtcgaggaagtttcggtttcgcgcgttgggatgtagcgaattagtaggggtcgaagaatcgtgtagtgttagagttagagttggattcggggttttagtcggagtcgaaatttgagttagagttcgcggcgggcgagttcggagtcgacgagtcgtagacgtagcgttgtttaggtggggtaagagacgttgggttaggggcgtagggttttcgcggtggaggggcgtagggaggtggcggtcgagttttgcgtagtttgtttttggcgtgtgtgggtttattcggcggcgcgggatagcgtaaggcgcggaaggttaggagttttcgaggtagcgcgaggagttcgtttttgcgtttagggtatagttatagtcgtcgttatcgggtgttattttatttaatcggcgggatta

SEQ ID NO: 35964 - DNA, 685 bp, Artificial Sequence
  chemically treated genomic DNA (Homo sapiens) CpG-island No: 35964
taatcccgccgattaaataaaataacacccgataacgacgactataactataccctaaacgcaaaaacgaactcctcgcgctacctcgaaaactcctaaccttccgcgccttacgctatcccgcgccgccgaataaacccacacacgccaaaaacaaactacgcaaaactcgaccgccacctccctacgcccctccaccgcgaaaaccctacgcccctaacccaacgtctcttaccccacctaaacaacgctacgtctacgactcgtcgactccgaactcgcccgccgcgaactctaactcaaatttcgactccgactaaaaccccgaatccaactctaactctaacactacacgattcttcgacccctactaattcgctacatcccaacgcgcgaaaccgaaacttcctcgactcgacccgctcctcccgccgccgccgcccgtcgcccgcgaaaaaaacgaaaacactaaccgaaaaacgaaaaaaataaaaaaaaaaaaaactaatattcgccgaaacctacgaaaaaaaaaacgacgcgcaatcccgccgactaaaaatcctaacctccctcgaaacgtaaactaaaatccgcgcgactaacgaccgaacctcgaaaccgaaaaacgcgccctaaaacctccgtaaaaaaaccctaccgcatacgaacgaaaccaaaacga

SEQ ID NO: 35965 - DNA, 590 bp, Artificial Sequence
  chemically treated genomic DNA (Homo sapiens) CpG-island No: 35965
gagcggttttataattttttttcgttttttttcgacggttcgcgaaggtaagcgttatcgggaagggatgggtaggatagaggagatcggtcgggtttagtattcggaattcgtttttacgagtttttacgtagttcgttcgcgtggagattgatatttttgcgtggtcggtgttaagcgtttcggattttgtatataatttcgcgcgtattttaaatacgttttgtagtttttggagttttagtttttgtgcgtagtaatcgagcgttcgtttcgtgttggttttttttttcgagtttttagttttaggggacgcggattaattatatcgttcgtcggttcggttggcgttttttaggttttacggtttttcgtttgtttttttttttatttgttgtcgtcgcggtcgtttttatttttatttgtttttgattcgggttcgtttcggttcgggtttttcgtagattcgttttcggttcgttttagttcgtttacgggcgttaggtttttcgtagattcgttttagatttttagtaaatacgtttttttttttatttcgtttagattgtcgtttaggaaagggttgtgtt

SEQ ID NO: 35966 - DNA, 590 bp, Artificial Sequence
  chemically treated genomic DNA (Homo sapiens) CpG-island No: 35966
aacacaaccctttcctaaacgacaatctaaacgaaataaaaaaaaaaacgtatttactaaaaatctaaaacgaatctacgaaaaacctaacgcccgtaaacgaactaaaacgaaccgaaaacgaatctacgaaaaacccgaaccgaaacgaacccgaatcaaaaacaaataaaaataaaaacgaccgcgacgacaacaaataaaaaaaaaaacaaacgaaaaaccgtaaaacctaaaaaacgccaaccgaaccgacgaacgatataattaatccgcgtcccctaaaactaaaaactcgaaaaaaaaaaccaacacgaaacgaacgctcgattactacgcacaaaaactaaaactccaaaaactacaaaacgtatttaaaatacgcgcgaaattatatacaaaatccgaaacgcttaacaccgaccacgcaaaaatatcaatctccacgcgaacgaactacgtaaaaactcgtaaaaacgaattccgaatactaaacccgaccgatctcctctatcctacccatcccttcccgataacgcttaccttcgcgaaccgtcgaaaaaaaacgaaaaaaaattataaaaccgctc

SEQ ID NO: 35967 - DNA, 590 bp, Artificial Sequence
  chemically treated genomic DNA (Homo sapiens) CpG-island No: 35967
agtataatttttttttgagcggtagtttgggcggggtgaaagggggggcgtgtttattgggggtttggggcgggtttgcggggagtttagcgttcgtgggcgggttggggcgggtcgggggcgggtttgcgggaagttcgagtcggggcgggttcgagttaaaggtaagtgaaggtggaagcggtcgcggcggtagtaggtagggggaggggtaggcgaggggtcgtagggtttggaaggcgttagtcgggtcggcgggcggtgtgattgattcgcgttttttggagttggaggttcgggggaaagggttagtacggagcgggcgttcggttgttgcgtataaaggttgaggttttaagagttgtagggcgtgtttggggtgcgcgcgaggttgtgtgtaaggttcggggcgtttggtatcggttacgtaagggtgttagtttttacgcggacgggttgcgtagggattcgtagggacgggtttcgggtgttgggttcggtcggttttttttgttttatttattttttttcgatggcgtttgttttcgcgggtcgtcgggggagaacgggagaagattgtgggatcgttt

SEQ ID NO: 35968 - DNA, 590 bp, Artificial Sequence
  chemically treated genomic DNA (Homo sapiens) CpG-island No: 35968
aaacgatcccacaatcttctcccgttctcccccgacgacccgcgaaaacaaacgccatcgaaaaaaaataaataaaacaaaaaaaaccgaccgaacccaacacccgaaacccgtccctacgaatccctacgcaacccgtccgcgtaaaaactaacacccttacgtaaccgataccaaacgccccgaaccttacacacaacctcgcgcgcaccccaaacacgccctacaactcttaaaacctcaacctttatacgcaacaaccgaacgcccgctccgtactaaccctttcccccgaacctccaactccaaaaaacgcgaatcaatcacaccgcccgccgacccgactaacgccttccaaaccctacgacccctcgcctacccctccccctacctactaccgccgcgaccgcttccaccttcacttacctttaactcgaacccgccccgactcgaacttcccgcaaacccgcccccgacccgccccaacccgcccacgaacgctaaactccccgcaaacccgccccaaacccccaataaacacgccccccctttcaccccgcccaaactaccgctcaaaaaaaaattatact

SEQ ID NO: 35969 - DNA, 561 bp, Artificial Sequence
  chemically treated genomic DNA (Homo sapiens) CpG-island No: 35969
tcgcggggagcgaggtcgtggcgggaaaagaggggtattttcggttgggcgggttttcgagggttagggtcgaggttattcgttggagggcggggcggagaagaaagaaggttgtcggtgaacgggacggataggttggggacgttcggggaacggtagagatttcggcgcgggagatagagtttcggtaaggggtttcgcgcggaggcgggggcgggcgttgaagggcggggcggggaggggcggtcgtttcggttttttttggcggggtttcgcggtttggaagtcggagcgggtcgagtcgttatcgcggtcggagttgttttttagttagattcggcgagatacgagcggcgggagggaggcggtggcgcgttcggtttcgttcgttcgattaagcgtcggacgcggttcggcgtcgagttatggtgagtttagcgtcgtagttttttgggttttttcggttttcgcgtagttcgtttcgggtttttaagtttttagtttggtgtttttcgagtttgtttcggattgttcggtttttttgggatttttttttttttt

SEQ ID NO: 35970 - DNA, 561 bp, Artificial Sequence
  chemically treated genomic DNA (Homo sapiens) CpG-island No: 35970
aaaaaaaaaaaaaatcccaaaaaaaccgaacaatccgaaacaaactcgaaaaacaccaaactaaaaacttaaaaacccgaaacgaactacgcgaaaaccgaaaaaacccaaaaaactacgacgctaaactcaccataactcgacgccgaaccgcgtccgacgcttaatcgaacgaacgaaaccgaacgcgccaccgcctccctcccgccgctcgtatctcgccgaatctaactaaaaaacaactccgaccgcgataacgactcgacccgctccgacttccaaaccgcgaaaccccgccaaaaaaaaccgaaacgaccgcccctccccgccccgcccttcaacgcccgcccccgcctccgcgcgaaaccccttaccgaaactctatctcccgcgccgaaatctctaccgttccccgaacgtccccaacctatccgtcccgttcaccgacaaccttctttcttctccgccccgccctccaacgaataacctcgaccctaaccctcgaaaacccgcccaaccgaaaatacccctcttttcccgccacgacctcgctccccgcga

SEQ ID NO: 35971 - DNA, 561 bp, Artificial Sequence
  chemically treated genomic DNA (Homo sapiens) CpG-island No: 35971
gggagggaggagagttttagaggggtcgaatagttcgaggtaggttcgggaggtattaggttgaggatttgggggttcggagcgggttgcgcgaaggtcgaggggatttagggggttgcgacgttggatttattatggttcggcgtcgggtcgcgttcgacgtttggtcgggcgggcggggtcgggcgcgttatcgtttttttttcgtcgttcgtgtttcgtcgggtttggttaagggatagtttcggtcgcggtggcggttcggttcgtttcggtttttaggtcgcggggtttcgttagggagggtcgagacggtcgttttttttcgtttcgttttttagcgttcgttttcgttttcgcgcgggattttttgtcgggattttgtttttcgcgtcgagatttttgtcgtttttcgggcgtttttagtttattcgtttcgtttatcggtaattttttttttttttcgtttcgttttttagcgggtaatttcgattttgattttcggaggttcgtttagtcgaggatgttttttttttttcgttacggtttcgtttttcgcgg

SEQ ID NO: 35972 - DNA, 561 bp, Artificial Sequence
  chemically treated genomic DNA (Homo sapiens) CpG-island No: 35972
ccgcgaaaaacgaaaccgtaacgaaaaaaaaaaaacatcctcgactaaacgaacctccgaaaatcaaaatcgaaattacccgctaaaaaacgaaacgaaaaaaaaaaaaaattaccgataaacgaaacgaataaactaaaaacgcccgaaaaacgacaaaaatctcgacgcgaaaaacaaaatcccgacaaaaaatcccgcgcgaaaacgaaaacgaacgctaaaaaacgaaacgaaaaaaaacgaccgtctcgaccctccctaacgaaaccccgcgacctaaaaaccgaaacgaaccgaaccgccaccgcgaccgaaactatcccttaaccaaacccgacgaaacacgaacgacgaaaaaaaaacgataacgcgcccgaccccgcccgcccgaccaaacgtcgaacgcgacccgacgccgaaccataataaatccaacgtcgcaaccccctaaatcccctcgaccttcgcgcaacccgctccgaacccccaaatcctcaacctaatacctcccgaacctacctcgaactattcgacccctctaaaactctcctccctccc

SEQ ID NO: 35973 - DNA, 650 bp, Artificial Sequence
  chemically treated genomic DNA (Homo sapiens) CpG-island No: 35973
  unsure (146, 211, 331, 336, 343)
cgggggatacgataacgggacggggagggaggagaaggtattagacggtcggacggaatttacgttgatatcggggaggtaattcgtataaaaagcggaaagagggggggcgtatacggtacggagaagaaaaggcggggcggatncgtcgggcgggggggggagggcggggggggcgcgggcgtcgggggtcgggggggcgggtcgcgtncggcggcgcggggggtcgcgtcggcggggcgtttcgggcgttcgcgtcgcggttcgggtcgttcgcgggtcggtcgggggggcgggcggggtcgggcgttcgttcgcggttttttcgttntcggntcggttntcgtttttttttcggtttttcgttttcggttttggttcgtattgtgtgcggcgggaggcggttcggttattagtatgcggggggcggcgcggcggggttgggagtcgcgcgggagtcgggttttggtttcggggatagggagttggggatttcgggagtcgcgagaggcggtcgttaggggcggggtgcgggcggtttggagacggggggcgttgtcggagggagggaggaagggagggagcgggggtggggcgtatagaggattttaataggagattggaagagattttgaaaggttatttcgttt

SEQ ID NO: 35974 - DNA, 650 bp, Artificial Sequence
  chemically treated genomic DNA (Homo sapiens) CpG-island No: 35974
  unsure (308, 315, 320, 440, 505)
aaacgaaataacctttcaaaatctcttccaatctcctattaaaatcctctatacgccccacccccgctccctcccttcctccctccctccgacaacgccccccgtctccaaaccgcccgcaccccgcccctaacgaccgcctctcgcgactcccgaaatccccaactccctatccccgaaaccaaaacccgactcccgcgcgactcccaaccccgccgcgccgccccccgcatactaataaccgaaccgcctcccgccgcacacaatacgaaccaaaaccgaaaacgaaaaaccgaaaaaaaaacganaaccganccganaacgaaaaaaccgcgaacgaacgcccgaccccgcccgcccccccgaccgacccgcgaacgacccgaaccgcgacgcgaacgcccgaaacgccccgccgacgcgaccccccgcgccgccgnacgcgacccgcccccccgacccccgacgcccgcgccccccccgccctcccccccccgcccgacgnatccgccccgccttttcttctccgtaccgtatacgccccccctctttccgctttttatacgaattacctccccgatatcaacgtaaattccgtccgaccgtctaataccttctcctccctccccgtcccgttatcgtatcccccg

SEQ ID NO: 35975 - DNA, 650 bp, Artificial Sequence
  chemically treated genomic DNA (Homo sapiens) CpG-island No: 35975
  unsure (308, 315, 320, 440, 505)
ggacgagatgattttttaaaattttttttagttttttgttggaattttttgtgcgttttattttcgtttttttttttttttttttttttcgatagcgtttttcgtttttaaatcgttcgtatttcgtttttggcggtcgtttttcgcggttttcggggtttttagttttttgttttcggagttagagttcggttttcgcgcggtttttagtttcgtcgcgtcgtttttcgtatgttaatggtcgggtcgtttttcgtcgtatataatgcgggttagggtcgggggcgggggatcggggagggggcggnggtcggntcggnggcgggggggtcgcgggcgggcgttcggtttcgttcgttttttcggtcggttcgcgggcggttcgggtcgcggcgcgggcgttcggggcgtttcgtcggcgcggtttttcgcgtcgtcgngcgcggttcgttttttcggttttcggcgttcgcgtttttttcgttttttttttttcgttcggcgngttcgtttcgttttttttttttcgtgtcgtgtgcgtttttttttttttcgttttttgtacgagttgttttttcggtgttaacgtgggtttcgttcgatcgtttaatattttttttttttttttcgtttcgttgtcgtatttttcg

SEQ ID NO: 35976 - DNA, 650 bp, Artificial Sequence
  chemically treated genomic DNA (Homo sapiens) CpG-island No: 35976
  unsure (146, 211, 331, 336, 343)
cgaaaaatacgacaacgaaacgaaaaaaaaaaaaaaaatattaaacgatcgaacgaaacccacgttaacaccgaaaaaacaactcgtacaaaaaacgaaaaaaaaaaaaacgcacacgacacgaaaaaaaaaaaacgaaacgaacncgccgaacgaaaaaaaaaaaacgaaaaaaacgcgaacgccgaaaaccgaaaaaacgaaccgcgcncgacgacgcgaaaaaccgcgccgacgaaacgccccgaacgcccgcgccgcgacccgaaccgcccgcgaaccgaccgaaaaaacgaacgaaaccgaacgcccgcccgcgacccccccgccnccganccgaccnccgccccctccccgatcccccgcccccgaccctaacccgcattatatacgacgaaaaacgacccgaccattaacatacgaaaaacgacgcgacgaaactaaaaaccgcgcgaaaaccgaactctaactccgaaaacaaaaaactaaaaaccccgaaaaccgcgaaaaacgaccgccaaaaacgaaatacgaacgatttaaaaacgaaaaacgctatcgaaaaaaaaaaaaaaaaaaaaaaacgaaaataaaacgcacaaaaaattccaacaaaaaactaaaaaaaattttaaaaaatcatctcgtcc

SEQ ID NO: 35977 - DNA, 563 bp, Artificial Sequence
  chemically treated genomic DNA (Homo sapiens) CpG-island No: 35977
cgttttttgaggtggtgtcgcgtgattagtttttggtttattatagtttcgattattcggtgttttagacgtcgttttcgatttaatattcgtcggcgtttgaatagttttttttttagtttttgtcggggagaaagatgcgaattagatggagtgggttcgtcgcgattcggggtttttttattaggtagtttcggttttttattgattttatttcgtgcgagataaaagggtttaggaacgtttgaggaaataaagtcgcggtttttatatagttatcgttcggggtcggttgattttttttttcggagtttttatagtcgcgattttattttagtttacggttcgtattttcgtttagcgtcggattcgcggggtttcgtttcggtttttcgcgggttaatcgtaattcgggggcgggttttcgggttatataaaggagtttcgcggtgcgggaggtttttcggagggtggtgagttagtaagtgtggttttagttgtagtagttagattgggcggtcgggagtggtgggggtgtcgggtggaaggttttgggcggggtt

SEQ ID NO: 35978 - DNA, 563 bp, Artificial Sequence
  chemically treated genomic DNA (Homo sapiens) CpG-island No: 35978
aaccccgcccaaaaccttccacccgacacccccaccactcccgaccgcccaatctaactactacaactaaaaccacacttactaactcaccaccctccgaaaaacctcccgcaccgcgaaactcctttatataacccgaaaacccgcccccgaattacgattaacccgcgaaaaaccgaaacgaaaccccgcgaatccgacgctaaacgaaaatacgaaccgtaaactaaaataaaatcgcgactataaaaactccgaaaaaaaaaatcaaccgaccccgaacgataactatataaaaaccgcgactttatttcctcaaacgttcctaaacccttttatctcgcacgaaataaaatcaataaaaaaccgaaactacctaataaaaaaaccccgaatcgcgacgaacccactccatctaattcgcatctttctccccgacaaaaactaaaaaaaaaactattcaaacgccgacgaatattaaatcgaaaacgacgtctaaaacaccgaataatcgaaactataataaaccaaaaactaatcacgcgacaccacctcaaaaaacg

SEQ ID NO: 35979 - DNA, 563 bp, Artificial Sequence
  chemically treated genomic DNA (Homo sapiens) CpG-island No: 35979
gatttcgtttagagttttttattcggtatttttattattttcggtcgtttaatttggttattatagttaaaattatatttattagtttattatttttcgaaaggtttttcgtatcgcggagtttttttatatagttcgaggattcgttttcgagttgcgattggttcgcggaaggtcggggcggagtttcgcggattcggcgttgagcggaagtacggatcgtgaattggagtggaatcgcgattatgggagtttcggggggaaagattaatcggtttcgaacggtgattgtgtgggggtcgcgattttgtttttttaagcgtttttgagtttttttatttcgtacgagatgggattagtgaggggtcggggttgtttggtggaggggtttcgggtcgcggcgagtttattttatttgattcgtattttttttttcggtaggagttgaagaagaagttgtttaaacgtcggcgggtgttgaatcgggagcggcgtttgaggtatcgggtggtcggggttgtgatagattaagggttgattacgcggtattattttaagaagcg

SEQ ID NO: 35980 - DNA, 563 bp, Artificial Sequence
  chemically treated genomic DNA (Homo sapiens) CpG-island No: 35980
cgcttcttaaaataataccgcgtaatcaacccttaatctatcacaaccccgaccacccgatacctcaaacgccgctcccgattcaacacccgccgacgtttaaacaacttcttcttcaactcctaccgaaaaaaaaaatacgaatcaaataaaataaactcgccgcgacccgaaacccctccaccaaacaaccccgacccctcactaatcccatctcgtacgaaataaaaaaactcaaaaacgcttaaaaaaacaaaatcgcgacccccacacaatcaccgttcgaaaccgattaatctttccccccgaaactcccataatcgcgattccactccaattcacgatccgtacttccgctcaacgccgaatccgcgaaactccgccccgaccttccgcgaaccaatcgcaactcgaaaacgaatcctcgaactatataaaaaaactccgcgatacgaaaaacctttcgaaaaataataaactaataaatataattttaactataataaccaaattaaacgaccgaaaataataaaaataccgaataaaaaactctaaacgaaatc

SEQ ID NO: 35981 - DNA, 633 bp, Artificial Sequence
  chemically treated genomic DNA (Homo sapiens) CpG-island No: 35981
gttttttttaaacgggggttttgtttataaggaggtcgtagtagttttcgagtgatttcggtgtaaatttgtagagaaaaattattttattttacggaagcgggtggaggagtcgcgtttttcggtaggttacgtggggcggaaagatttatttagttttttcgtattttcgtttcgatttaggaaaacgttttggggaattttagttttgaaaaggcgcgttttattttttacgtcgggtgttggcgataaggtttagtgaaaaagcgtttcggggtcgttcgcgcggaggggaaagtgttgagggaagttaaggaattcgcgtttgcggtcgtcggaaacgtggcggggatacgattttcgcgtcggggttattttgtttattgttgaggaggtttttcgttacgtttcgttttcgtttttttcgaggatcgggcgcggtggcgtttttggtttatagtaggaaggaaggggtagtaatttacgttattaattttgtttttttgagcggcgcgcgttcgtttatcggtttcgttgttgtcggagtcggtaacgtttttacgcgtatttttcggtttggttaacgcggtgatttttttatttttatcgtttggtcggtaattcggagtttaa

SEQ ID NO: 35982 - DNA, 633 bp, Artificial Sequence
  chemically treated genomic DNA (Homo sapiens) CpG-island No: 35982
ttaaactccgaattaccgaccaaacgataaaaataaaaaaatcaccgcgttaaccaaaccgaaaaatacgcgtaaaaacgttaccgactccgacaacaacgaaaccgataaacgaacgcgcgccgctcaaaaaaacaaaattaataacgtaaattactaccccttccttcctactataaaccaaaaacgccaccgcgcccgatcctcgaaaaaaacgaaaacgaaacgtaacgaaaaacctcctcaacaataaacaaaataaccccgacgcgaaaatcgtatccccgccacgtttccgacgaccgcaaacgcgaattccttaacttccctcaacactttcccctccgcgcgaacgaccccgaaacgctttttcactaaaccttatcgccaacacccgacgtaaaaaataaaacgcgccttttcaaaactaaaattccccaaaacgttttcctaaatcgaaacgaaaatacgaaaaaactaaataaatctttccgccccacgtaacctaccgaaaaacgcgactcctccacccgcttccgtaaaataaaataatttttctctacaaatttacaccgaaatcactcgaaaactactacgacctccttataaacaaaacccccgtttaaaaaaaac

SEQ ID NO: 35983 - DNA, 633 bp, Artificial Sequence
  chemically treated genomic DNA (Homo sapiens) CpG-island No: 35983
ttgaatttcgaattgtcgattaggcgatgagggtggggaggttatcgcgttaattaaatcggaaagtgcgcgtggaggcgttgtcggtttcggtaatagcggggtcggtaagcgggcgcgcgtcgtttagaggggtagagttggtggcgtgagttgttgtttttttttttttgttgtgggttagaggcgttatcgcgttcggttttcgaggaagacgggagcgggacgtggcgagaggtttttttagtagtgggtaaaatagtttcgacgcggaggtcgtgttttcgttacgttttcggcgatcgtaggcgcggattttttggttttttttagtattttttttttcgcgcggacggtttcgagacgtttttttattgggttttgtcgttagtattcggcgtggggggtgagacgcgtttttttagggttggggttttttagagcgtttttttaagtcgaggcggaggtgcgaggaaattgagtgggttttttcgttttacgtggtttgtcgggaagcgcggtttttttattcgttttcgtggaatggaatggtttttttttgtaggtttatatcggggttattcgagagttgttgcggtttttttatgggtaggattttcgtttggggagaat

SEQ ID NO: 35984 - DNA, 633 bp, Artificial Sequence
  chemically treated genomic DNA (Homo sapiens) CpG-island No: 35984
attctccccaaacgaaaatcctacccataaaaaaaccgcaacaactctcgaataaccccgatataaacctacaaaaaaaaaccattccattccacgaaaacgaataaaaaaaccgcgcttcccgacaaaccacgtaaaacgaaaaaacccactcaatttcctcgcacctccgcctcgacttaaaaaaacgctctaaaaaaccccaaccctaaaaaaacgcgtctcaccccccacgccgaatactaacgacaaaacccaataaaaaaacgtctcgaaaccgtccgcgcgaaaaaaaaaatactaaaaaaaaccaaaaaatccgcgcctacgatcgccgaaaacgtaacgaaaacacgacctccgcgtcgaaactattttacccactactaaaaaaacctctcgccacgtcccgctcccgtcttcctcgaaaaccgaacgcgataacgcctctaacccacaacaaaaaaaaaaaaacaacaactcacgccaccaactctacccctctaaacgacgcgcgcccgcttaccgaccccgctattaccgaaaccgacaacgcctccacgcgcactttccgatttaattaacgcgataacctccccaccctcatcgcctaatcgacaattcgaaattcaa

SEQ ID NO: 35985 - DNA, 1301 bp, Artificial Sequence
  chemically treated genomic DNA (Homo sapiens) CpG-island No: 35985
tcgttttttcgtattatttttttttttgttcgttttgttcgttttttttttagtttagtaggcgttttacgatcgggggagtgaaaggtaggatggacgatatggttggggagggcgcgcgggcgcgaggagcgtttcggcgggtttgggttcgacgggacgtcggggcgtagaaggggagttcggtcggggttgtcgcggtcgtttaaatttcgttttaattttcggcgaagttgtcggggcgatcggtcgggcgcgcgttgtagtttgcggggttcggcgcgcggttttgcgttcggagcggtttttacggcgaagagaagagcggtcgggcgggcggacggtagtagtgtagggtcgggaagcgtcgaacgcggggcggaggcggcggtcgcgagattttaagtggtagtagaagtttgggttttcgtacggggtagttgtttgggtgtcgttttcgggaaggaaagtttaattttcggttaaatttcgttcgtttcgttagttttgatgcgtagattttttcgtttttgcggttttatcgtttcgttattttttttttttcggttcgcgttcgttcgttcgttggttgggtcggttcggggcgtgcgtcgcgttttcgttttcgttcgtttttagtttgtgttttatgtaaattcgcgtgtagttttttttttaagtgttgttatcgttttttcgtcgtcggggtttttcgttttttttttcgcgtttcgttattttttttcggcgttttgttcgttttttgtttcggggagggcgttcggtcggttattatttcgcgtttagtagtttacgtgggcgattcgggcggcggtagttttggttggagcgcgcgggattttgcgcggttcgatttgaagtcgggcgggcgcggggaggaagttttgggaaatacggcgagaggggtttcgggcgggagggttgagcgcggttcgtggcgttcgttttcggagtttatattcgggcggttcggttggagttgcgggtcggagagggttggattcgtagtaagtaagcgtcgttcggacgcgagtgtattttggagaggattcgagttcgagagggggcgcgcggaaggttcggtttaggaagttggggttcgtatttggtttcgcgtttgttgattttcgttagagtttttgggtcgcgtcggcgtttttgggttgtttttattttttagtcggtgagattatatcggtcgagagtttcgggaacgtgtgcggaggaggagggggtgagaagtgggtttttagaagtggagagttggggatattagtgat

SEQ ID NO: 35986 - DNA, 1301 bp, Artificial Sequence
  chemically treated genomic DNA (Homo sapiens) CpG-island No: 35986
atcactaatatccccaactctccacttctaaaaacccacttctcaccccctcctcctccgcacacgttcccgaaactctcgaccgatataatctcaccgactaaaaaataaaaacaacccaaaaacgccgacgcgacccaaaaactctaacgaaaatcaacaaacgcgaaaccaaatacgaaccccaacttcctaaaccgaaccttccgcgcgccccctctcgaactcgaatcctctccaaaatacactcgcgtccgaacgacgcttacttactacgaatccaaccctctccgacccgcaactccaaccgaaccgcccgaatataaactccgaaaacgaacgccacgaaccgcgctcaaccctcccgcccgaaacccctctcgccgtatttcccaaaacttcctccccgcgcccgcccgacttcaaatcgaaccgcgcaaaatcccgcgcgctccaaccaaaactaccgccgcccgaatcgcccacgtaaactactaaacgcgaaataataaccgaccgaacgccctccccgaaacaaaaaacgaacaaaacgccgaaaaaaaataacgaaacgcgaaaaaaaaaacgaaaaaccccgacgacgaaaaaacgataacaacacttaaaaaaaaaactacacgcgaatttacataaaacacaaactaaaaacgaacgaaaacgaaaacgcgacgcacgccccgaaccgacccaaccaacgaacgaacgaacgcgaaccgaaaaaaaaaaaataacgaaacgataaaaccgcaaaaacgaaaaaatctacgcatcaaaactaacgaaacgaacgaaatttaaccgaaaattaaactttccttcccgaaaacgacacccaaacaactaccccgtacgaaaacccaaacttctactaccacttaaaatctcgcgaccgccgcctccgccccgcgttcgacgcttcccgaccctacactactaccgtccgcccgcccgaccgctcttctcttcgccgtaaaaaccgctccgaacgcaaaaccgcgcgccgaaccccgcaaactacaacgcgcgcccgaccgatcgccccgacaacttcgccgaaaattaaaacgaaatttaaacgaccgcgacaaccccgaccgaactccccttctacgccccgacgtcccgtcgaacccaaacccgccgaaacgctcctcgcgcccgcgcgccctccccaaccatatcgtccatcctacctttcactcccccgatcgtaaaacgcctactaaactaaaaaaaaaacgaacaaaacgaacaaaaaaaaaaataatacgaaaaaacga

SEQ ID NO: 35987 - DNA, 1301 bp, Artificial Sequence
  chemically treated genomic DNA (Homo sapiens) CpG-island No: 35987
gttattggtgtttttagttttttatttttgaggatttattttttatttttttttttttcgtatacgttttcgaggttttcggtcggtgtgattttatcgattagagaataaaaatagtttaggggcgtcggcgcggtttaagggttttgacggggattagtaagcgcgaggttaagtgcgggttttaattttttgggtcgggtttttcgcgcgttttttttcgggttcgggttttttttagggtgtattcgcgttcggacgacgtttatttgttgcgagtttaatttttttcggttcgtaattttaatcgagtcgttcgagtgtggatttcgagagcggacgttacgggtcgcgtttagttttttcgttcgaggtttttttcgtcgtgttttttaggatttttttttcgcgttcgttcgattttaggtcgggtcgcgtagggtttcgcgcgttttagttaggattgtcgtcgttcgggtcgtttacgtgggttgttgggcgcggggtggtggtcggtcgggcgtttttttcggagtagggggcgggtagggcgtcgggaggaggtggcggggcgcgggggaggaggcggggagtttcggcggcgagggggcggtgatagtatttggaaaggaggttgtacgcggatttgtatgaaatatagattgggagcgggcgggagcgggagcgcggcgtacgtttcgggtcggtttagttagcgagcgagcgagcgcgagtcgggaggaggagggtggcggggcggtgaggtcgtagaggcggagggatttgcgtattaaagttagcgaggcgagcgaagtttggtcgggggttggattttttttttcggaggcggtatttaaatagttatttcgtgcggaaatttaaatttttgttgttatttggagtttcgcggtcgtcgttttcgtttcgcgttcggcgtttttcgattttgtattgttgtcgttcgttcgttcggtcgttttttttttcgtcgtgggagtcgtttcgggcgtagggtcgcgcgtcgagtttcgtaagttgtagcgcgcgttcggtcggtcgtttcggtaatttcgtcgagagttgaggcgaagtttgggcgatcgcggtagtttcggtcgagttttttttttgcgtttcggcgtttcgtcgagtttagattcgtcggggcgtttttcgcgttcgcgcgttttttttagttatgtcgtttattttgttttttattttttcgatcgtgaagcgtttgttgggttggaagaagggcgagtagaacgggtaggaggagaaatggtgcgagaaggcgg

SEQ ID NO: 35988 - DNA, 1301 bp, Artificial Sequence
  chemically treated genomic DNA (Homo sapiens) CpG-island No: 35988
ccgccttctcgcaccatttctcctcctacccgttctactcgcccttcttccaacccaacaaacgcttcacgatcgaaaaaataaaaaacaaaataaacgacataactaaaaaaaacgcgcgaacgcgaaaaacgccccgacgaatctaaactcgacgaaacgccgaaacgcaaaaaaaaaactcgaccgaaactaccgcgatcgcccaaacttcgcctcaactctcgacgaaattaccgaaacgaccgaccgaacgcgcgctacaacttacgaaactcgacgcgcgaccctacgcccgaaacgactcccacgacgaaaaaaaaaacgaccgaacgaacgaacgacaacaatacaaaatcgaaaaacgccgaacgcgaaacgaaaacgacgaccgcgaaactccaaataacaacaaaaatttaaatttccgcacgaaataactatttaaataccgcctccgaaaaaaaaaatccaacccccgaccaaacttcgctcgcctcgctaactttaatacgcaaatccctccgcctctacgacctcaccgccccgccaccctcctcctcccgactcgcgctcgctcgctcgctaactaaaccgacccgaaacgtacgccgcgctcccgctcccgcccgctcccaatctatatttcatacaaatccgcgtacaacctcctttccaaatactatcaccgccccctcgccgccgaaactccccgcctcctcccccgcgccccgccacctcctcccgacgccctacccgccccctactccgaaaaaaacgcccgaccgaccaccaccccgcgcccaacaacccacgtaaacgacccgaacgacgacaatcctaactaaaacgcgcgaaaccctacgcgacccgacctaaaatcgaacgaacgcgaaaaaaaaatcctaaaaaacacgacgaaaaaaacctcgaacgaaaaaactaaacgcgacccgtaacgtccgctctcgaaatccacactcgaacgactcgattaaaattacgaaccgaaaaaaattaaactcgcaacaaataaacgtcgtccgaacgcgaatacaccctaaaaaaaacccgaacccgaaaaaaaacgcgcgaaaaacccgacccaaaaaattaaaacccgcacttaacctcgcgcttactaatccccgtcaaaacccttaaaccgcgccgacgcccctaaactatttttattctctaatcgataaaatcacaccgaccgaaaacctcgaaaacgtatacgaaaaaaaaaaaaataaaaaataaatcctcaaaaataaaaaactaaaaacaccaataac

SEQ ID NO: 35989 - DNA, 714 bp, Artificial Sequence
  chemically treated genomic DNA (Homo sapiens) CpG-island No: 35989
gggggaaggcgtgttttcgcgtttcgtttcgtttcgtttcggaaagttttcgcggtttcgtttattttaggggttcgtttagttttcggagatttttttttttgagcgtagtcgtttggtgtcggttttcgtcgagttggagcgcgcgggttacggtttttttggggacgtagaagcgagaagcggggatttcggcgcgcgtttcgcgtttcgttttttttgttcgcgtttcggttttcggttcgcgtttcggtcgtcggtatggtgttgttggtcgggatcgggtcggagggcggcggggcgcgttgtatgattttattatcgtcgtttttatttcggggcgcgtaggtcgaggaggatttcgttgattacgaagagtttgaggatttttcgagtttgttagatattcgtagtatcgtttcggacgattttttttattttttcgaggacgaggaggagtacggcgtcgagagcgcggagagcgtttcggagggcgtttcggaaagcgtttcggagacggcgatttttttgcgcgtcgtttgcgttaataacgtggggttgttgcggacgttggtgcggcgcggggtgagcgtcgaggaggcgtaggagattgatcgtaacggtagggtaagcgggcgttttcgtaggatttgagtttttttattgtttttattttttttttttttattatattttcgcgttttttagtttttg

SEQ ID NO: 35990 - DNA, 714 bp, Artificial Sequence
  chemically treated genomic DNA (Homo sapiens) CpG-island No: 35990
caaaaactaaaaaacgcgaaaatataataaaaaaaaaaaaaataaaaacaataaaaaaactcaaatcctacgaaaacgcccgcttaccctaccgttacgatcaatctcctacgcctcctcgacgctcaccccgcgccgcaccaacgtccgcaacaaccccacgttattaacgcaaacgacgcgcaaaaaaatcgccgtctccgaaacgctttccgaaacgccctccgaaacgctctccgcgctctcgacgccgtactcctcctcgtcctcgaaaaaataaaaaaaatcgtccgaaacgatactacgaatatctaacaaactcgaaaaatcctcaaactcttcgtaatcaacgaaatcctcctcgacctacgcgccccgaaataaaaacgacgataataaaatcatacaacgcgccccgccgccctccgacccgatcccgaccaacaacaccataccgacgaccgaaacgcgaaccgaaaaccgaaacgcgaacaaaaaaaacgaaacgcgaaacgcgcgccgaaatccccgcttctcgcttctacgtccccaaaaaaaccgtaacccgcgcgctccaactcgacgaaaaccgacaccaaacgactacgctcaaaaaaaaaaatctccgaaaactaaacgaacccctaaaataaacgaaaccgcgaaaactttccgaaacgaaacgaaacgaaacgcgaaaacacgccttccccc

SEQ ID NO: 35991 - DNA, 714 bp, Artificial Sequence
  chemically treated genomic DNA (Homo sapiens) CpG-island No: 35991
taggagttgggaggcgcggggatgtggtggggaggaggggagtgggggtagtgagggggtttaaattttgcggggacgttcgtttattttgtcgttgcggttagttttttgcgttttttcgacgtttatttcgcgtcgtattagcgttcgtagtagttttacgttgttggcgtaggcggcgcgtaggagggtcgtcgttttcgggacgtttttcgggacgtttttcgggacgtttttcgcgttttcgacgtcgtgttttttttcgttttcgaaagggtagaaagagtcgttcgaggcgatgttgcgggtgtttggtagattcgagaagtttttaaatttttcgtagttagcggggtttttttcgatttgcgcgtttcggggtggggacggcggtggtggggttatgtagcgcgtttcgtcgtttttcggttcggtttcggttagtagtattatgtcggcggtcggggcgcgggtcgggggtcggggcgcgggtaggaagagcgggacgcggggcgcgcgtcgaggttttcgtttttcgtttttgcgtttttagagaagtcgtggttcgcgcgttttagttcggcggaaatcggtattaggcggttgcgtttaaagaaaaaagttttcggaggttgagcgagtttttggggtgggcgggatcgcgggggtttttcgaggcggggcggggcggggcgcggggatacgttttttttt

SEQ ID NO: 35992 - DNA, 714 bp, Artificial Sequence
  chemically treated genomic DNA (Homo sapiens) CpG-island No: 35992
aaaaaaaaacgtatccccgcgccccgccccgccccgcctcgaaaaacccccgcgatcccgcccaccccaaaaactcgctcaacctccgaaaacttttttctttaaacgcaaccgcctaataccgatttccgccgaactaaaacgcgcgaaccacgacttctctaaaaacgcaaaaacgaaaaacgaaaacctcgacgcgcgccccgcgtcccgctcttcctacccgcgccccgacccccgacccgcgccccgaccgccgacataatactactaaccgaaaccgaaccgaaaaacgacgaaacgcgctacataaccccaccaccgccgtccccaccccgaaacgcgcaaatcgaaaaaaaccccgctaactacgaaaaatttaaaaacttctcgaatctaccaaacacccgcaacatcgcctcgaacgactctttctaccctttcgaaaacgaaaaaaaacacgacgtcgaaaacgcgaaaaacgtcccgaaaaacgtcccgaaaaacgtcccgaaaacgacgaccctcctacgcgccgcctacgccaacaacgtaaaactactacgaacgctaatacgacgcgaaataaacgtcgaaaaaacgcaaaaaactaaccgcaacgacaaaataaacgaacgtccccgcaaaatttaaaccccctcactacccccactcccctcctccccaccacatccccgcgcctcccaactccta

SEQ ID NO: 35993 - DNA, 552 bp, Artificial Sequence
  chemically treated genomic DNA (Homo sapiens) CpG-island No: 35993
gtgtgtcggtatgttagtatgtgtgttagtatgtgttagtatacgtgtcggtatgtgttagtacgcgtgttagtatgtgttagcgtgcgtgtcggtatgtgttggtgtgcgtgtcggtatgtgttggtgtgcgtgtcggtatgtgttggtgtgcgtgttagtatgttagtatgtgtttgcgttagcgtgcgtgtcggtatgtgttagtatatgtgttggtatgtgttagtgtgcgtgtcggtatgtgttggtgtgcgtgtcggtatgtgttggtgtgcgtgtcggtatgtgttagtgtgcgtgttggtatgtgttagcgtgcgtgtcggtatgtgttggtgtgcgtgtcggtatgtgttagtacgtgtcggtatgttagtgtgcgtgtcggtatgtgttggtgtgcgtgtcggtatgttagtatgtgtgtcggtatgtgttagcgtgcgtgtcggtatgtgttggtgtgcgtgtcggtatgttagtttgtgtgtcggtatgtgttagtgtatgtcggtatgtgttagtgtatgtcggtatgtgttagtatgt

SEQ ID NO: 35994 - DNA, 552 bp, Artificial Sequence
  chemically treated genomic DNA (Homo sapiens) CpG-island No: 35994
acatactaacacataccgacatacactaacacataccgacatacactaacacataccgacacacaaactaacataccgacacgcacaccaacacataccgacacgcacgctaacacataccgacacacatactaacataccgacacgcacaccaacacataccgacacgcacactaacataccgacacgtactaacacataccgacacgcacaccaacacataccgacacgcacgctaacacataccaacacgcacactaacacataccgacacgcacaccaacacataccgacacgcacaccaacacataccgacacgcacactaacacataccaacacatatactaacacataccgacacgcacgctaacgcaaacacatactaacatactaacacgcacaccaacacataccgacacgcacaccaacacataccgacacgcacaccaacacataccgacacgcacgctaacacatactaacacgcgtactaacacataccgacacgtatactaacacatactaacacacatactaacataccgacacac

SEQ ID NO: 35995 - DNA, 552 bp, Artificial Sequence
  chemically treated genomic DNA (Homo sapiens) CpG-island No: 35995
atatgttaatatatgtcgatatgtattaatatatgtcgatatgtattaatatatgtcgatatataggttaatatgtcgatacgtatattaatatatgtcgatacgtacgttaatatatatcgatatatatgttaatatgtcgatacgtatattaatatatgtcgatacgtatattaatatgtcgatacgtgttaatatatgtcgatacgtatattaatatatgtcgatacgtacgttaatatatgttaatacgtatattaatatatgtcgatacgtatattaatatatgtcgatacgtatattaatatatgtcgatacgtatattaatatatgttaatatatgtgttaatatatgtcgatacgtacgttaacgtagatatatgttaatatgttgatacgtatattaatatatgtcgatacgtatattaatatatgtcgatacgtatattaatatatgtcgatacgtacgttaatatatgttgatacgcgtgttaatatatgtcgatacgtgtgttaatatatgttgatatatatgttaatatgtcgatatat

SEQ ID NO: 35996 - DNA, 552 bp, Artificial Sequence
  chemically treated genomic DNA (Homo sapiens) CpG-island No: 35996
atatatcgacatattaacatatatatcaacatatattaacacacgtatcgacatatattaacacgcgtatcaacatatattaacgtacgtatcgacatatattaatatacgtatcgacatatattaatatacgtatcgacatatattaatatacgtatcaacatattaacatatatctacgttaacgtacgtatcgacatatattaacacatatattaacatatattaatatacgtatcgacatatattaatatacgtatcgacatatattaatatacgtatcgacatatattaatatacgtattaacatatattaacgtacgtatcgacatatattaatatacgtatcgacatatattaacacgtatcgacatattaatatacgtatcgacatatattaatatacgtatcgacatattaacatatatatcgatatatattaacgtacgtatcgacatatattaatatacgtatcgacatattaacctatatatcgacatatattaatacatatcgacatatattaatacatatcgacatatattaacatat

SEQ ID NO: 35997 - DNA, 747 bp, Artificial Sequence
  chemically treated genomic DNA (Homo sapiens) CpG-island No: 35997
tcgtttatattcggcggtgggaaatcgattcgaagatgtttttgtaggcgaaacgtttagttcgcgcggttttgaattatcggggagtagcggttgttgttagtcggattacgttagtatttttttgtttagttcgggagtagtttcgtttcgtttagggtcgcgtgcgcgtgcgcggttttaggggcggggtttgttcgcgtttcgggtgtttggatatcgagcgcgttcgtagtggcggttggcgttagggaattgtagggtttagggtgttgtcggagtggtagttggttcgaatttttttcgaagttcgcggaggagcgggtaagagtttcgcgaattcggttttaatttcgggaacgggatgggaggcggttttggtcgtaagtttcgcgttgttagcgggtttatcgcgtcgtagtcgatagtcgtttttttttttcgtagcgcgtcgcgatttattagtttggttttttttgcggagagcgatgtcgtttttcgatattatgttttgcgtttagtagatttatattttttcggagttgtcggatattttgaagtaatttattaaggttgttattcgtatttagtcggtcgacgtgttgcggtggttcgcggggtaagcgtttttggttcggggagttgttcggtttatatgtttaagttagacgagtttagagagtttttttttcggattaggggttttacgcggtatttagcgtttttaagagtattaggtaaaatttt

SEQ ID NO: 35998 - DNA, 747 bp, Artificial Sequence
  chemically treated genomic DNA (Homo sapiens) CpG-island No: 35998
aaaattttacctaatactcttaaaaacgctaaataccgcgtaaaacccctaatccgaaaaaaaaactctctaaactcgtctaacttaaacatataaaccgaacaactccccgaaccaaaaacgcttaccccgcgaaccaccgcaacacgtcgaccgactaaatacgaataacaaccttaataaattacttcaaaatatccgacaactccgaaaaaatataaatctactaaacgcaaaacataatatcgaaaaacgacatcgctctccgcaaaaaaaaccaaactaataaatcgcgacgcgctacgaaaaaaaaaaacgactatcgactacgacgcgataaacccgctaacaacgcgaaacttacgaccaaaaccgcctcccatcccgttcccgaaattaaaaccgaattcgcgaaactcttacccgctcctccgcgaacttcgaaaaaaattcgaaccaactaccactccgacaacaccctaaaccctacaattccctaacgccaaccgccactacgaacgcgctcgatatccaaacacccgaaacgcgaacaaaccccgcccctaaaaccgcgcacgcgcacgcgaccctaaacgaaacgaaactactcccgaactaaacaaaaaaatactaacgtaatccgactaacaacaaccgctactccccgataattcaaaaccgcgcgaactaaacgtttcgcctacaaaaacatcttcgaatcgatttcccaccgccgaatataaacga

SEQ ID NO: 35999 - DNA, 747 bp, Artificial Sequence
  chemically treated genomic DNA (Homo sapiens) CpG-island No: 35999
aaagttttgtttgatatttttaaggacgttgagtgtcgcgtaaggtttttggttcgggaggagggttttttgggttcgtttggtttgggtatgtagatcggatagtttttcgggttaagggcgtttatttcgcggattatcgtagtacgtcggtcggttgggtgcggatggtagttttggtgaattgttttaggatgttcggtagtttcgggggaatgtggatttgttgagcgtagaatatggtgtcgggaagcggtatcgtttttcgtagaagggattaggttggtgaatcgcggcgcgttgcgaggaagaagggcggttgtcggttacgacgcggtggattcgttagtagcgcggggtttgcggttagggtcgttttttatttcgttttcgaggttggggtcggattcgcggggtttttattcgttttttcgcgggtttcgggagaaattcggattaattgttatttcgataatattttagattttgtagttttttagcgttagtcgttattacggacgcgttcggtatttaggtattcgggacgcgagtaggtttcgtttttggagtcgcgtacgcgtacgcggttttgagcgaggcggggttgttttcgggttggataaggaggtgttggcgtagttcgattagtagtagtcgttgtttttcggtggtttagagtcgcgcgagttgagcgtttcgtttataaaagtattttcggatcggttttttatcgtcgaatgtgagcgg

SEQ ID NO: 36000 - DNA, 747 bp, Artificial Sequence
  chemically treated genomic DNA (Homo sapiens) CpG-island No: 36000
ccgctcacattcgacgataaaaaaccgatccgaaaatacttttataaacgaaacgctcaactcgcgcgactctaaaccaccgaaaaacaacgactactactaatcgaactacgccaacacctccttatccaacccgaaaacaaccccgcctcgctcaaaaccgcgtacgcgtacgcgactccaaaaacgaaacctactcgcgtcccgaatacctaaataccgaacgcgtccgtaataacgactaacgctaaaaaactacaaaatctaaaatattatcgaaataacaattaatccgaatttctcccgaaacccgcgaaaaaacgaataaaaaccccgcgaatccgaccccaacctcgaaaacgaaataaaaaacgaccctaaccgcaaaccccgcgctactaacgaatccaccgcgtcgtaaccgacaaccgcccttcttcctcgcaacgcgccgcgattcaccaacctaatcccttctacgaaaaacgataccgcttcccgacaccatattctacgctcaacaaatccacattcccccgaaactaccgaacatcctaaaacaattcaccaaaactaccatccgcacccaaccgaccgacgtactacgataatccgcgaaataaacgcccttaacccgaaaaactatccgatctacatacccaaaccaaacgaacccaaaaaaccctcctcccgaaccaaaaaccttacgcgacactcaacgtccttaaaaatatcaaacaaaacttt

SEQ ID NO: 36001 - DNA, 799 bp, Artificial Sequence
  chemically treated genomic DNA (Homo sapiens) CpG-island No: 36001
cgtatcgaagttttcggcgttgtttttttttttttttttcggagtttttagtttcgtttttatttttttttcgtatttaagttttagtttcgtttttttaattttcgtttcgagtttttagagtttttttttttttcgttttacgtttttttttagttttatttcgatacgtaggttttttttttcggcggatcggcgggggtcgtattttttttattagtcgttgtatgcgtttttggaagcggcggcgattggttttgagtttttgtagtagttggtcgttttttacgttttcgttttttatggcgcgtagcgtatttagtatcggatttagttagtatttaagcgttaattcggattgtagggtttcgcgcgttataaatttaaataggagatttcgttttttttgtttttttttcggttttttattggttagagcggagaagtcgggtattgattgggttttttaaataaatttgcgttttatttttcggttaatttattttcgagtttttagttacgttttaatgttcggcggaagggagggagggttttcggtcgttacggtcggtggtagttgtataaatagttgtgtgtttatttattagcggtgttgtgcgagattcggtgggatgcgtgttatttttcgcgttgtgtatcggagataagtgcggtttgaagatttttgcgtgatttgttttgggtgtcgtcgttgggcgaggttcgttttttttattttttcgtttgggatttcggcgtagtttttagggtaggggtttaagaaagataattttaaatt

SEQ ID NO: 36002 - DNA, 799 bp, Artificial Sequence
  chemically treated genomic DNA (Homo sapiens) CpG-island No: 36002
aatttaaaattatctttcttaaacccctaccctaaaaactacgccgaaatcccaaacgaaaaaataaaaaaaacgaacctcgcccaacgacgacacccaaaacaaatcacgcaaaaatcttcaaaccgcacttatctccgatacacaacgcgaaaaataacacgcatcccaccgaatctcgcacaacaccgctaataaataaacacacaactatttatacaactaccaccgaccgtaacgaccgaaaaccctccctcccttccgccgaacattaaaacgtaactaaaaactcgaaaataaattaaccgaaaaataaaacgcaaatttatttaaaaaacccaatcaatacccgacttctccgctctaaccaataaaaaaccgaaaaaaaaacaaaaaaaacgaaatctcctatttaaatttataacgcgcgaaaccctacaatccgaattaacgcttaaatactaactaaatccgatactaaatacgctacgcgccataaaaaacgaaaacgtaaaaaacgaccaactactacaaaaactcaaaaccaatcgccgccgcttccaaaaacgcatacaacgactaataaaaaaaatacgacccccgccgatccgccgaaaaaaaaaacctacgtatcgaaataaaactaaaaaaaaacgtaaaacgaaaaaaaaaaaaactctaaaaactcgaaacgaaaattaaaaaaacgaaactaaaacttaaatacgaaaaaaaaataaaaacgaaactaaaaactccgaaaaaaaaaaaaaaaaacaacgccgaaaacttcgatacg

SEQ ID NO: 36003 - DNA, 799 bp, Artificial Sequence
  chemically treated genomic DNA (Homo sapiens) CpG-island No: 36003
aatttggggttgttttttttaggtttttgttttggaaattgcgtcgggattttaggcggaggggtgaggaaggcggatttcgtttagcggcgatatttagagtaagttacgtagaaatttttaggtcgtatttattttcggtgtatagcgcgggagatgatacgtattttatcggatttcgtatagtatcgttgatgaataagtatatagttgtttgtataattattatcggtcgtggcggtcggagattttttttttttttcgtcggatattggggcgtggttggaaattcgggagtggattggtcggaaggtgggacgtaaatttgtttgaaaggtttaattagtgttcggttttttcgttttagttaatagaaaatcgagaggaaggtaggaggggcggagttttttatttgagtttgtggcgcgcgaggttttgtagttcgggttggcgtttgggtattggttgggttcgatgttgggtacgttgcgcgttatggagggcgaggacgtggaagacgattagttgttgtagaagtttagggttagtcgtcgtcgtttttagaggcgtatgtagcggttgatagagaaggtgcggttttcgtcggttcgtcgggaggggaggtttgcgtgtcggagtgaggttgggaggggacgtaggacgggaagggaaggggttttgaggattcggagcgggggttggggaagcgggattggggtttgaatgcggagagaaggtggaggcggagttgggggtttcggagagggaaaaaggaggtagcgtcgaaggtttcggtgcg

SEQ ID NO: 36004 - DNA, 799 bp, Artificial Sequence
  chemically treated genomic DNA (Homo sapiens) CpG-island No: 36004
cgcaccgaaaccttcgacgctacctcctttttccctctccgaaacccccaactccgcctccaccttctctccgcattcaaaccccaatcccgcttccccaacccccgctccgaatcctcaaaaccccttcccttcccgtcctacgtcccctcccaacctcactccgacacgcaaacctcccctcccgacgaaccgacgaaaaccgcaccttctctatcaaccgctacatacgcctctaaaaacgacgacgactaaccctaaacttctacaacaactaatcgtcttccacgtcctcgccctccataacgcgcaacgtacccaacatcgaacccaaccaatacccaaacgccaacccgaactacaaaacctcgcgcgccacaaactcaaataaaaaactccgcccctcctaccttcctctcgattttctattaactaaaacgaaaaaaccgaacactaattaaacctttcaaacaaatttacgtcccaccttccgaccaatccactcccgaatttccaaccacgccccaatatccgacgaaaaaaaaaaaaaatctccgaccgccacgaccgataataattatacaaacaactatatacttattcatcaacgatactatacgaaatccgataaaatacgtatcatctcccgcgctatacaccgaaaataaatacgacctaaaaatttctacgtaacttactctaaatatcgccgctaaacgaaatccgccttcctcacccctccgcctaaaatcccgacgcaatttccaaaacaaaaacctaaaaaaaacaaccccaaatt

SEQ ID NO: 36005 - DNA, 717 bp, Artificial Sequence
  chemically treated genomic DNA (Homo sapiens) CpG-island No: 36005
tagagcgcgggttcgacgaaatagagcgcgggttcgacgaaatagagcgtagtttcggttcgcgttggtttttagggaaatcgttcgcggaggaatttcgggttagggtcgtgatatttgcgacgagtttcgtttggcgttagggggcgcggaagcgcgttcgtttttaggttttatgtcgggttcgtttcgtttttgtcggttatatttttttatttcgtttttttttcgtgaggatcggtcgttttcggttttcggttttcggtttcgttttcggcgtaggcgtagtttcgcgttttttcggcggttgtcggcgtagtgagttcgtcgtcgtggagtgtagcggaaagggttcgtcgttttttttcgtttttcgttgtttcgggacgcgttttttgcggttttgtgagcgtttttgagcgtcggtagcggtcgcggtgggttttttaggtgagtgcggtcgcgggagggagaggttcggagcgtagagtatcgtttttttcggcgttcgcgcgttcgtttttggcgagtcggttaggaggggcggtcgcggtaggtgtaggtgttggcgtcgtgtagggcgcggtacgcgggggttcggggggatgtttaggttcggtgagttcgtttttcgtttgggtatttgggtttcgggtttttgggggcggcgtgtgggggggattttggcgattcgggttagtcggtcgttttttgggt

SEQ ID NO: 36006 - DNA, 717 bp, Artificial Sequence
  chemically treated genomic DNA (Homo sapiens) CpG-island No: 36006
acccaaaaaacgaccgactaacccgaatcgccaaaatcccccccacacgccgcccccaaaaacccgaaacccaaatacccaaacgaaaaacgaactcaccgaacctaaacatccccccgaacccccgcgtaccgcgccctacacgacgccaacacctacacctaccgcgaccgcccctcctaaccgactcgccaaaaacgaacgcgcgaacgccgaaaaaaacgatactctacgctccgaacctctccctcccgcgaccgcactcacctaaaaaacccaccgcgaccgctaccgacgctcaaaaacgctcacaaaaccgcaaaaaacgcgtcccgaaacaacgaaaaacgaaaaaaaacgacgaaccctttccgctacactccacgacgacgaactcactacgccgacaaccgccgaaaaaacgcgaaactacgcctacgccgaaaacgaaaccgaaaaccgaaaaccgaaaacgaccgatcctcacgaaaaaaaaacgaaataaaaaaatataaccgacaaaaacgaaacgaacccgacataaaacctaaaaacgaacgcgcttccgcgccccctaacgccaaacgaaactcgtcgcaaatatcacgaccctaacccgaaattcctccgcgaacgatttccctaaaaaccaacgcgaaccgaaactacgctctatttcgtcgaacccgcgctctatttcgtcgaacccgcgctcta

SEQ ID NO: 36007 - DNA, 717 bp, Artificial Sequence
  chemically treated genomic DNA (Homo sapiens) CpG-island No: 36007
gtttagggggcggtcggttgattcgggtcgttaaagttttttttatacgtcgtttttaagggttcggagtttaagtgtttaggcggagagcgagtttatcgggtttgggtattttttcgaattttcgcgtgtcgcgttttgtacggcgttagtatttgtatttgtcgcggtcgttttttttggtcgattcgttagaggcgggcgcgcgggcgtcgaggggggcggtgttttacgtttcgggtttttttttttcgcggtcgtatttatttgaagaatttatcgcggtcgttgtcggcgtttaggggcgtttatagagtcgtagagagcgcgtttcgaagtagcgagaaacggaggaggacggcgagtttttttcgttatattttacggcggcgggtttattacgtcggtagtcgtcgagggaacgcgggattgcgtttgcgtcggaagcggggtcgggggtcgggagtcgggagcggtcggtttttacggagggagggcggggtaggggggtgtggtcggtaggggcggggcgagttcggtatggggtttgggggcggacgcgttttcgcgttttttggcgttaggcggggttcgtcgtaggtgttacggttttggttcgaggttttttcgcgggcggtttttttgggaattagcgcgagtcggagttgcgttttgtttcgtcgggttcgcgttttgtttcgtcgggttcgcgttttg

SEQ ID NO: 36008 - DNA, 717 bp, Artificial Sequence
  chemically treated genomic DNA (Homo sapiens) CpG-island No: 36008
caaaacgcgaacccgacgaaacaaaacgcgaacccgacgaaacaaaacgcaactccgactcgcgctaattcccaaaaaaaccgcccgcgaaaaaacctcgaaccaaaaccgtaacacctacgacgaaccccgcctaacgccaaaaaacgcgaaaacgcgtccgcccccaaaccccataccgaactcgccccgcccctaccgaccacacccccctaccccgccctccctccgtaaaaaccgaccgctcccgactcccgacccccgaccccgcttccgacgcaaacgcaatcccgcgttccctcgacgactaccgacgtaataaacccgccgccgtaaaatataacgaaaaaaactcgccgtcctcctccgtttctcgctacttcgaaacgcgctctctacgactctataaacgcccctaaacgccgacaacgaccgcgataaattcttcaaataaatacgaccgcgaaaaaaaaaaacccgaaacgtaaaacaccgcccccctcgacgcccgcgcgcccgcctctaacgaatcgaccaaaaaaaacgaccgcgacaaatacaaatactaacgccgtacaaaacgcgacacgcgaaaattcgaaaaaatacccaaacccgataaactcgctctccgcctaaacacttaaactccgaacccttaaaaacgacgtataaaaaaaactttaacgacccgaatcaaccgaccgccccctaaac

SEQ ID NO: 36009 - DNA, 559 bp, Artificial Sequence
  chemically treated genomic DNA (Homo sapiens) CpG-island No: 36009
tgggcgtcgggcggcggtttttttttcgggtacgggcgcgttatatattaattgcgcggtttcgcgcgttcggggtagggagttcgagtttagcgggttatttggcggcgggcgggcgcggtcgggagcggagggtcgcggtcgcgaagaggatgaagagagagttttcgaataagtcggaagtagtttataatatcggacgtcgcgcggtagggttgtggatttggggtggtttcgtgttttagttttaggaaattacgcgcgaggtatcgtgttgaggcgtagaggttattttcgggaggtttcggtgaaatttggtgggaaatttcgggtaggcgttcggagtcgcgtttaagtaggtagtttcgtgtcgttagatttgtgttcgggggagttgagacgaattgtacgggtgggattgtatggttttgtttttttagcgttgataattcgtttcgatcgtttaggaagcgcgagtttattggttttagaagtgatgatgttgggtggaagtcgtagtatgtgaagagttgtcggttgttatgggattaaaaaagat

SEQ ID NO: 36010 - DNA, 559 bp, Artificial Sequence
  chemically treated genomic DNA (Homo sapiens) CpG-island No: 36010
atcttttttaatcccataacaaccgacaactcttcacatactacgacttccacccaacatcatcacttctaaaaccaataaactcgcgcttcctaaacgatcgaaacgaattatcaacgctaaaaaaacaaaaccatacaatcccacccgtacaattcgtctcaactcccccgaacacaaatctaacgacacgaaactacctacttaaacgcgactccgaacgcctacccgaaatttcccaccaaatttcaccgaaacctcccgaaaataacctctacgcctcaacacgatacctcgcgcgtaatttcctaaaactaaaacacgaaaccaccccaaatccacaaccctaccgcgcgacgtccgatattataaactacttccgacttattcgaaaactctctcttcatcctcttcgcgaccgcgaccctccgctcccgaccgcgcccgcccgccgccaaataacccgctaaactcgaactccctaccccgaacgcgcgaaaccgcgcaattaatatataacgcgcccgtacccgaaaaaaaaaccgccgcccgacgccca

SEQ ID NO: 36011 - DNA, 559 bp, Artificial Sequence
  chemically treated genomic DNA (Homo sapiens) CpG-island No: 36011
attttttttaattttataataatcggtaattttttatatgttgcgatttttatttagtattattatttttggagttagtaagttcgcgttttttgggcggtcggggcgagttgttaacgttgggagggtagagttatgtaattttattcgtgtagttcgttttaattttttcgaatataagtttggcggtacggagttgtttatttgggcgcgatttcgggcgtttgttcggaattttttattaggttttatcgaaatttttcgagggtgatttttacgttttagtacggtgtttcgcgcgtagttttttaagattgggatacgaaattattttaggtttatagttttgtcgcgcggcgttcggtgttgtgagttgttttcgatttgttcgggaattttttttttatttttttcgcgatcgcggtttttcgttttcggtcgcgttcgttcgtcgttaggtaattcgttggattcgggttttttgtttcgggcgcgcgggatcgcgtagttaatgtgtaacgcgttcgtgttcgggggaggagtcgtcgttcgacgttta

SEQ ID NO: 36012 - DNA, 559 bp, Artificial Sequence
  chemically treated genomic DNA (Homo sapiens) CpG-island No: 36012
taaacgtcgaacgacgactcctcccccgaacacgaacgcgttacacattaactacgcgatcccgcgcgcccgaaacaaaaaacccgaatccaacgaattacctaacgacgaacgaacgcgaccgaaaacgaaaaaccgcgatcgcgaaaaaaataaaaaaaaaattcccgaacaaatcgaaaacaactcacaacaccgaacgccgcgcgacaaaactataaacctaaaataatttcgtatcccaatcttaaaaaactacgcgcgaaacaccgtactaaaacgtaaaaatcaccctcgaaaaatttcgataaaacctaataaaaaattccgaacaaacgcccgaaatcgcgcccaaataaacaactccgtaccgccaaacttatattcgaaaaaattaaaacgaactacacgaataaaattacataactctaccctcccaacgttaacaactcgccccgaccgcccaaaaaacgcgaacttactaactccaaaaataataatactaaataaaaatcgcaacatataaaaaattaccgattattataaaattaaaaaaaat

SEQ ID NO: 36013 - DNA, 565 bp, Artificial Sequence
  chemically treated genomic DNA (Homo sapiens) CpG-island No: 36013
tacgcgtttattggttttttgtttttggcgtttttgggtacgggggagttggggcggtttcgtttgcgtacggcggtgtcgggattgggggcgggtacgtcgttttcgttttttacgcgttcgttcgttcgttcgttttcgtttttttcgtttcgagcgattttttgttttagttttgtaggtttcgtattgtagatgtttgttggtttttttgcgttcggcggttttcgcggtgtttcgtaagttttcgtgattttttagtattagtcggttgtgcgttttttgtttttacgggtcggttagtcgtagatatttatttagtttcgcgagtttagtcgtttagcgagtggggtacggggacgagacggacggtagtcgtgttagagttcggggcgttttcggatgcggtaggataagttgatcgggtttttgaggcgcggggggagatgtttgaagcggtagggcggcggcgtgggtattattttgagtaatgtgtttaagaagcgtttgtatttttcggatcgcgtttcggttgttgtgtattttggagtcgggtgaggatttt

SEQ ID NO: 36014 - DNA, 565 bp, Artificial Sequence
  chemically treated genomic DNA (Homo sapiens) CpG-island No: 36014
aaaatcctcacccgactccaaaatacacaacaaccgaaacgcgatccgaaaaatacaaacgcttcttaaacacattactcaaaataatacccacgccgccgccctaccgcttcaaacatctccccccgcgcctcaaaaacccgatcaacttatcctaccgcatccgaaaacgccccgaactctaacacgactaccgtccgtctcgtccccgtaccccactcgctaaacgactaaactcgcgaaactaaataaatatctacgactaaccgacccgtaaaaacaaaaaacgcacaaccgactaatactaaaaaatcacgaaaacttacgaaacaccgcgaaaaccgccgaacgcaaaaaaaccaacaaacatctacaatacgaaacctacaaaactaaaacaaaaaatcgctcgaaacgaaaaaaacgaaaacgaacgaacgaacgaacgcgtaaaaaacgaaaacgacgtacccgcccccaatcccgacaccgccgtacgcaaacgaaaccgccccaactcccccgtacccaaaaacgccaaaaacaaaaaaccaataaacgcgta

SEQ ID NO: 36015 - DNA, 565 bp, Artificial Sequence
  chemically treated genomic DNA (Homo sapiens) CpG-island No: 36015
ggggtttttattcggttttagggtgtatagtagtcggggcgcggttcgggaaatgtaggcgttttttgagtatattgtttaggatggtgtttacgtcgtcgttttgtcgttttaggtattttttttcgcgttttagagattcggttagtttgttttgtcgtattcgagagcgtttcgggttttggtacggttatcgttcgtttcgttttcgtattttattcgttgagcggttgagttcgcggagttgggtgagtgtttgcggttgatcggttcgtgggagtagggagcgtatagtcggttggtgttggagggttacggggatttacggggtatcgcgggagtcgtcgagcgtagggaagttagtaggtatttgtagtgcggagtttgtaaggttgaggtaggagatcgttcgaggcggggagggcgggagcgagcgagcgagcgagcgcgtgggagacggaggcggcgtgttcgtttttaatttcggtatcgtcgtgcgtaggcggggtcgttttagttttttcgtgtttagaagcgttagagatagggagttagtgggcgcgta

SEQ ID NO: 36016 - DNA, 565 bp, Artificial Sequence
  chemically treated genomic DNA (Homo sapiens) CpG-island No: 36016
tacgcgcccactaactccctatctctaacgcttctaaacacgaaaaaactaaaacgaccccgcctacgcacgacgataccgaaattaaaaacgaacacgccgcctccgtctcccacgcgctcgctcgctcgctcgctcccgccctccccgcctcgaacgatctcctacctcaaccttacaaactccgcactacaaatacctactaacttccctacgctcgacgactcccgcgataccccgtaaatccccgtaaccctccaacaccaaccgactatacgctccctactcccacgaaccgatcaaccgcaaacactcacccaactccgcgaactcaaccgctcaacgaataaaatacgaaaacgaaacgaacgataaccgtaccaaaacccgaaacgctctcgaatacgacaaaacaaactaaccgaatctctaaaacgcgaaaaaaaatacctaaaacgacaaaacgacgacgtaaacaccatcctaaacaatatactcaaaaaacgcctacatttcccgaaccgcgccccgactactatacaccctaaaaccgaataaaaacccc

SEQ ID NO: 36017 - DNA, 1148 bp, Artificial Sequence
  chemically treated genomic DNA (Homo sapiens) CpG-island No: 36017
tttgcgtattattttgttgtttttttcgtgttgataagcgttagcggaaggtcgacgatggtcgtagtggtataggtgaatttttcgcgtcggcgtgtatatcgggtttatttggttttgtatttgttttatcgttaggtcgtacgatgttagttagcggcggttttttttatttattcggttagttaggattttattttttagtcggtcgagtatttgtattagtatcggcgggaatattatattgttatcgttttcgttatcggattgttgaagggtattcgttaggttgcggcgttgcgttttcgttagtttatcggtggcggttttaattttgatgagtggcgtgaagtttttcggttgataaatagtttggatgcgggttttgtcgttttgtatcgtggttaggcggtcgtcgttttagtcgtattaggttatttgcggttttcgtgatagcgatatttagttcgttaggtttcgtttacgtcgttatattcgttttgttattttgcggtttagcgggtcgtaaagatagcgattttcgattagcggttttgtatattgtgttcgcgtgtagtgtattagtcggtgttgattgtcgtaatggtatcggtgagttcgtttattattcgtgcggatatttttttcgggatgaggtcggttttttttgttagtttgtcgtgacggttatatcggtatagatgtgcgcgttacgggcgatacggttattcggttatatgttgagggtgttgttcgggtgtagtttcgggtcgggtaggcggttatttgtcgggtttgtgtatacgggatgcggatatttagattcgttgcggtggtgtgaacgtcggttagtttgtcggtggtgttgtagttgtatttcgggtttggcgcgggttgttgatgcggatgagttcgtcgttgtcgttttaggtgtatcgcggttagatagtaggttgtttaggtgttggttttgtaattgttcggtaggggtatgagcggtggtgagtttattacggtcgaagttggcgtagcgtttttcggtgtagcggtcgcgggtgtattttattagcggtgtgtcgtcgagttttatgtttgtaggtaatcgttgcgtaggttagtattttacgggggtagttgttcggttatag

SEQ ID NO: 36018 - DNA, 1148 bp, Artificial Sequence
  chemically treated genomic DNA (Homo sapiens) CpG-island No: 36018
ctataaccgaacaactacccccgtaaaatactaacctacgcaacgattacctacaaacataaaactcgacgacacaccgctaataaaatacacccgcgaccgctacaccgaaaaacgctacgccaacttcgaccgtaataaactcaccaccgctcatacccctaccgaacaattacaaaaccaacacctaaacaacctactatctaaccgcgatacacctaaaacgacaacgacgaactcatccgcatcaacaacccgcgccaaacccgaaatacaactacaacaccaccgacaaactaaccgacgttcacaccaccgcaacgaatctaaatatccgcatcccgtatacacaaacccgacaaataaccgcctacccgacccgaaactacacccgaacaacaccctcaacatataaccgaataaccgtatcgcccgtaacgcgcacatctataccgatataaccgtcacgacaaactaacaaaaaaaaccgacctcatcccgaaaaaaatatccgcacgaataataaacgaactcaccgataccattacgacaatcaacaccgactaatacactacacgcgaacacaatatacaaaaccgctaatcgaaaatcgctatctttacgacccgctaaaccgcaaaataacaaaacgaatataacgacgtaaacgaaacctaacgaactaaatatcgctatcacgaaaaccgcaaataacctaatacgactaaaacgacgaccgcctaaccacgatacaaaacgacaaaacccgcatccaaactatttatcaaccgaaaaacttcacgccactcatcaaaattaaaaccgccaccgataaactaacgaaaacgcaacgccgcaacctaacgaatacccttcaacaatccgataacgaaaacgataacaatataatattcccgccgatactaatacaaatactcgaccgactaaaaaataaaatcctaactaaccgaataaataaaaaaaaccgccgctaactaacatcgtacgacctaacgataaaacaaatacaaaaccaaataaacccgatatacacgccgacgcgaaaaattcacctataccactacgaccatcgtcgaccttccgctaacgcttatcaacacgaaaaaaacaacaaaataatacgcaaa

SEQ ID NO: 36019 - DNA, 1148 bp, Artificial Sequence
  chemically treated genomic DNA (Homo sapiens) CpG-island No: 36019
ttgtaatcggatagttgttttcgtggaatgttgatttacgtagcggttatttgtaggtatgaaattcggcgatatatcgttggtggagtatattcgcgatcgttgtatcgggaaacgttgcgttagtttcggtcgtgatgaatttattatcgtttatatttttgtcgggtagttatagagttagtatttgaatagtttgttgtttgatcgcgatatatttggaacgataacggcgaatttattcgtattagtagttcgcgttagattcggagtatagttatagtattatcggtaggttgatcggcgtttatattatcgtagcgaatttggatattcgtatttcgtatgtatagattcggtaggtaatcgtttgttcgattcggagttgtattcggatagtatttttagtatgtggtcggataatcgtatcgttcgtgacgcgtatatttgtatcggtatgatcgttacggtaggttgatagagaaaatcgattttatttcggaaggggtattcgtacggatgatgagcggatttatcggtattattacgatagttagtatcggttggtgtattatacgcggatataatatgtagagtcgttggtcgaaagtcgttatttttacgattcgttgggtcgtagggtggtaaaacgggtatggcggcgtgaacgggatttgacgggttggatgtcgttgttacggaaatcgtaagtgatttggtacggttgggacggcgatcgtttgattacgatatagaacgatagaattcgtatttagattatttattagtcggggagttttacgttatttattagggttgaaatcgttatcggtgagttggcgaaaacgtagcgtcgtagtttggcggatattttttagtagttcggtggcgaagacggtggtagtgtggtgttttcgtcggtgttggtgtagatgttcgatcggttggaaagtgaaattttggttgatcgggtgagtgaggaaagtcgtcgttggttggtatcgtgcggtttgacggtggagtagatgtaaaattagatggattcggtatatacgtcggcgcgaaaaatttatttgtattattgcgattatcgtcggtttttcgttggcgtttgttagtacggaaggggtaatagaatggtgcgtaga

SEQ ID NO: 36020 - DNA, 1148 bp, Artificial Sequence
  chemically treated genomic DNA (Homo sapiens) CpG-island No: 36020
tctacgcaccattctattaccccttccgtactaacaaacgccaacgaaaaaccgacgataatcgcaataatacaaataaatttttcgcgccgacgtatataccgaatccatctaattttacatctactccaccgtcaaaccgcacgataccaaccaacgacgactttcctcactcacccgatcaaccaaaatttcactttccaaccgatcgaacatctacaccaacaccgacgaaaacaccacactaccaccgtcttcgccaccgaactactaaaaaatatccgccaaactacgacgctacgttttcgccaactcaccgataacgatttcaaccctaataaataacgtaaaactccccgactaataaataatctaaatacgaattctatcgttctatatcgtaatcaaacgatcgccgtcccaaccgtaccaaatcacttacgatttccgtaacaacgacatccaacccgtcaaatcccgttcacgccgccatacccgttttaccaccctacgacccaacgaatcgtaaaaataacgactttcgaccaacgactctacatattatatccgcgtataatacaccaaccgatactaactatcgtaataataccgataaatccgctcatcatccgtacgaataccccttccgaaataaaatcgattttctctatcaacctaccgtaacgatcataccgatacaaatatacgcgtcacgaacgatacgattatccgaccacatactaaaaatactatccgaatacaactccgaatcgaacaaacgattacctaccgaatctatacatacgaaatacgaatatccaaattcgctacgataatataaacgccgatcaacctaccgataatactataactatactccgaatctaacgcgaactactaatacgaataaattcgccgttatcgttccaaatatatcgcgatcaaacaacaaactattcaaatactaactctataactacccgacaaaaatataaacgataataaattcatcacgaccgaaactaacgcaacgtttcccgatacaacgatcgcgaatatactccaccaacgatatatcgccgaatttcatacctacaaataaccgctacgtaaatcaacattccacgaaaacaactatccgattacaa

SEQ ID NO: 36021 - DNA, 596 bp, Artificial Sequence
  chemically treated genomic DNA (Homo sapiens) CpG-island No: 36021
cggttgaaaatgtttttttttttaaagcgcgagaaagtatttgtcgttagtacgttagtttataggtagttgtagtaatttgcggtataattatcggcgaaaatatgttgaaagcgtgcgggaaacggttttaggacggagatgtattacggtaattagttttttgatttttgttagagtttcgaggatttttgttttttgattcgggcggaattcggtatgaaggcggaaattaaataggtcgaattttagttgacgtagaataaatagcgtcgtttggtagtttttcgtcgttagtattttatttagtaattttttcggtagcggttcgtcggttttatagtgattagagataaacgttagcgttttcggtttttagtattagttttttataaattgattcggtagttcgatcgtattttacggtatatcgttgatatcggaaatattagcggtttcgatgcgggttagtatatggtgtaggtcgtgatcgaattcgtggaagagggtgattatttcgtcgtgagtgaatagcgtcggtttattatttatcgggcggttgaagttataagttaaatacgcgatcggtttttgta

SEQ ID NO: 36022 - DNA, 596 bp, Artificial Sequence
  chemically treated genomic DNA (Homo sapiens) CpG-island No: 36022
tacaaaaaccgatcgcgtatttaacttataacttcaaccgcccgataaataataaaccgacgctattcactcacgacgaaataatcaccctcttccacgaattcgatcacgacctacaccatatactaacccgcatcgaaaccgctaatatttccgatatcaacgatataccgtaaaatacgatcgaactaccgaatcaatttataaaaaactaatactaaaaaccgaaaacgctaacgtttatctctaatcactataaaaccgacgaaccgctaccgaaaaaattactaaataaaatactaacgacgaaaaactaccaaacgacgctatttattctacgtcaactaaaattcgacctatttaatttccgccttcataccgaattccgcccgaatcaaaaaacaaaaatcctcgaaactctaacaaaaatcaaaaaactaattaccgtaatacatctccgtcctaaaaccgtttcccgcacgctttcaacatattttcgccgataattataccgcaaattactacaactacctataaactaacgtactaacgacaaatactttctcgcgctttaaaaaaaaaaacattttcaaccg

SEQ ID NO: 36023 - DNA, 596 bp, Artificial Sequence
  chemically treated genomic DNA (Homo sapiens) CpG-island No: 36023
tgtaaaaatcggtcgcgtatttgatttgtaattttaatcgttcggtaaatggtaaatcggcgttgtttatttacgacgaagtgattatttttttttacgagttcggttacggtttgtattatatgttgattcgtatcgaaatcgttggtgttttcggtattagcggtgtgtcgtgggatgcggtcgaattgtcgagttagtttatggaaaattggtgttgggagtcggaggcgttggcgtttatttttggttattatgaaatcggcgaatcgttgtcgaaagagttgttggataaaatgttggcggcgaagaattattaggcggcgttgtttattttgcgttagttggagttcggtttgtttgattttcgtttttatgtcgagtttcgttcggattagggggtaaaaattttcgaaattttggtagaaattaagaaattggttgtcgtggtgtattttcgttttggggtcgtttttcgtacgtttttagtatattttcgtcggtggttatgtcgtaggttattatagttatttgtgggttgacgtattggcggtagatgttttttcgcgttttgaggaagagggtatttttaatcg

SEQ ID NO: 36024 - DNA, 596 bp, Artificial Sequence
  chemically treated genomic DNA (Homo sapiens) CpG-island No: 36024
cgattaaaaataccctcttcctcaaaacgcgaaaaaacatctaccgccaatacgtcaacccacaaataactataataacctacgacataaccaccgacgaaaatatactaaaaacgtacgaaaaacgaccccaaaacgaaaatacaccacgacaaccaatttcttaatttctaccaaaatttcgaaaatttttaccccctaatccgaacgaaactcgacataaaaacgaaaatcaaacaaaccgaactccaactaacgcaaaataaacaacgccgcctaataattcttcgccgccaacattttatccaacaactctttcgacaacgattcgccgatttcataataaccaaaaataaacgccaacgcctccgactcccaacaccaattttccataaactaactcgacaattcgaccgcatcccacgacacaccgctaataccgaaaacaccaacgatttcgatacgaatcaacatataatacaaaccgtaaccgaactcgtaaaaaaaaataatcacttcgtcgtaaataaacaacgccgatttaccatttaccgaacgattaaaattacaaatcaaatacgcgaccgatttttaca

SEQ ID NO: 36025 - DNA, 527 bp, Artificial Sequence
  chemically treated genomic DNA (Homo sapiens) CpG-island No: 36025
taaagatgcgttaaaaggatggaaaaggtagttttgtttttcgtaaattgagattttttttgttcgcgaagggttaagagttttaggttcgggggtttggtatcggcgcgggacgttcggaggttagattcggagtcggcggcgcgtagagcggggcggttcggggcgcggggttgtgattttatcggtcggcgtcgtttcgcggggttatgagattatgagatgtcggcgttcgtcgaggagtcgatttgttgggagcgcggggatagtcggtcgttcgacgcggtgattttattcgggttcgggggaggaggaggtaggcggtcgggttagttcgcgtcgttaggagggggattaatggttgtcgtcgggtggtgacgttatcggtagtattcgttgttaggtaacgcgcggttattagtttcgtttcgttggtttcgttttttatttgttgcgtttttttttattttggttcgttttttttttgttttttttttttttttttttgtattgaggtataatttata

SEQ ID NO: 36026 - DNA, 527 bp, Artificial Sequence
  chemically treated genomic DNA (Homo sapiens) CpG-island No: 36026
tataaattatacctcaatacaaaaaaaaaaaaaaaaaaaacaaaaaaaaaacgaaccaaaataaaaaaaaacgcaacaaataaaaaacgaaaccaacgaaacgaaactaataaccgcgcgttacctaacaacgaatactaccgataacgtcaccacccgacgacaaccattaatccccctcctaacgacgcgaactaacccgaccgcctacctcctcctcccccgaacccgaataaaatcaccgcgtcgaacgaccgactatccccgcgctcccaacaaatcgactcctcgacgaacgccgacatctcataatctcataaccccgcgaaacgacgccgaccgataaaatcacaaccccgcgccccgaaccgccccgctctacgcgccgccgactccgaatctaacctccgaacgtcccgcgccgataccaaacccccgaacctaaaactcttaacccttcgcgaacaaaaaaaatctcaatttacgaaaaacaaaactaccttttccatccttttaacgcatcttta

SEQ ID NO: 36027 - DNA, 527 bp, Artificial Sequence
  chemically treated genomic DNA (Homo sapiens) CpG-island No: 36027
tgtaagttatgttttaatataaaagaaaaaggaaaaaaggtaagagaagggcgagttaggatggaaagaagcgtagtaggtaggaggcggggttagcggggcggggttggtggtcgcgcgttgtttggtaacgggtgttgtcggtgacgttattattcggcggtagttattaattttttttttggcggcgcgggttggttcggtcgtttgtttttttttttttcgggttcggatgagattatcgcgtcgggcggtcggttgttttcgcgtttttaataaatcgatttttcggcgagcgtcggtattttatgattttatggtttcgcgggacggcgtcggtcgatgaggttatagtttcgcgtttcgggtcgtttcgttttgcgcgtcgtcggtttcgggtttggttttcgggcgtttcgcgtcggtattaggttttcgagtttgaggtttttagtttttcgcggataaaggagattttagtttgcgaagggtaaagttgttttttttatttttttgacgtatttttg

SEQ ID NO: 36028 - DNA, 527 bp, Artificial Sequence
  chemically treated genomic DNA (Homo sapiens) CpG-island No: 36028
caaaaatacgtcaaaaaaataaaaaaaacaactttacccttcgcaaactaaaatctcctttatccgcgaaaaactaaaaacctcaaactcgaaaacctaataccgacgcgaaacgcccgaaaaccaaacccgaaaccgacgacgcgcaaaacgaaacgacccgaaacgcgaaactataacctcatcgaccgacgccgtcccgcgaaaccataaaatcataaaataccgacgctcgccgaaaaatcgatttattaaaaacgcgaaaacaaccgaccgcccgacgcgataatctcatccgaacccgaaaaaaaaaaaaacaaacgaccgaaccaacccgcgccgccaaaaaaaaaattaataactaccgccgaataataacgtcaccgacaacacccgttaccaaacaacgcgcgaccaccaaccccgccccgctaaccccgcctcctacctactacgcttctttccatcctaactcgcccttctcttaccttttttcctttttcttttatattaaaacataacttaca

SEQ ID NO: 36029 - DNA, 604 bp, Artificial Sequence
  chemically treated genomic DNA (Homo sapiens) CpG-island No: 36029
gttagtataataaacgtataatataaggagaaatttggtgtttaggggaggttttcggcggttggagcgcggcggtagcgggcgtagaggtcggagggagaggaggcgaggggcggttcgagcgcggggcgggagcgaggttagcggttatgtgttcgtgttttttgtatcgcggtcgcggtttttcggtcgtgtgcgtttgtagcgcgggtcgtttggggttgcgttcgttcgtcgcgtagtttatcgtcgttcggtttaaggcgttaggcgacgagttgtattagcgtattatgtggcggcgtcgcgcgcggagtcggagggcgtcggcgttcggcgcgttttttatttattggttttggttgtgcgcggtcgcgtaggtggcggcgttggcggtttggttgttcggtaggcggaatttgtaggaacgcggggttttttggtggggtcggagtcgagatttagtcggagcgagtaataggtacgcgagcgagcgagcgagagtcggggcgcggtagttgggtattggagacgttgggttggttcgggagcgggagagtggtaagtttggttttttttttttttttttttttttttttttcgt

SEQ ID NO: 36030 - DNA, 604 bp, Artificial Sequence
  chemically treated genomic DNA (Homo sapiens) CpG-island No: 36030
acgaaaaaaaaaaaaaaaaaaaaaaaaaaaaaaccaaacttaccactctcccgctcccgaaccaacccaacgtctccaatacccaactaccgcgccccgactctcgctcgctcgctcgcgtacctattactcgctccgactaaatctcgactccgaccccaccaaaaaaccccgcgttcctacaaattccgcctaccgaacaaccaaaccgccaacgccgccacctacgcgaccgcgcacaaccaaaaccaataaataaaaaacgcgccgaacgccgacgccctccgactccgcgcgcgacgccgccacataatacgctaatacaactcgtcgcctaacgccttaaaccgaacgacgataaactacgcgacgaacgaacgcaaccccaaacgacccgcgctacaaacgcacacgaccgaaaaaccgcgaccgcgatacaaaaaacacgaacacataaccgctaacctcgctcccgccccgcgctcgaaccgcccctcgcctcctctccctccgacctctacgcccgctaccgccgcgctccaaccgccgaaaacctcccctaaacaccaaatttctccttatattatacgtttattatactaac

SEQ ID NO: 36031 - DNA, 604 bp, Artificial Sequence
  chemically treated genomic DNA (Homo sapiens) CpG-island No: 36031
acggaggaagaaggagaagggaaaagaagaaagttaaatttgttattttttcgttttcgggttagtttagcgtttttagtgtttagttgtcgcgtttcggttttcgttcgttcgttcgcgtatttgttgttcgtttcggttgggtttcggtttcggttttattaagaagtttcgcgtttttataagtttcgtttgtcgagtagttaggtcgttagcgtcgttatttgcgcggtcgcgtatagttaaggttagtaggtggggagcgcgtcgggcgtcggcgtttttcggtttcgcgcgcggcgtcgttatatggtgcgttggtgtagttcgtcgtttagcgttttgagtcgggcggcggtgagttgcgcggcggacgagcgtagttttaggcgattcgcgttgtaggcgtatacggtcggggggtcgcggtcgcggtgtagggggtacgggtatatgatcgttggtttcgttttcgtttcgcgttcgggtcgtttttcgtttttttttttttcggtttttgcgttcgttgtcgtcgcgttttagtcgtcgggggttttttttggatattaagtttttttttgtgttgtgcgtttgttgtgttgat

SEQ ID NO: 36032 - DNA, 604 bp, Artificial Sequence
  chemically treated genomic DNA (Homo sapiens) CpG-island No: 36032
atcaacacaacaaacgcacaacacaaaaaaaaacttaatatccaaaaaaaacccccgacgactaaaacgcgacgacaacgaacgcaaaaaccgaaaaaaaaaaaaacgaaaaacgacccgaacgcgaaacgaaaacgaaaccaacgatcatatacccgtaccccctacaccgcgaccgcgaccccccgaccgtatacgcctacaacgcgaatcgcctaaaactacgctcgtccgccgcgcaactcaccgccgcccgactcaaaacgctaaacgacgaactacaccaacgcaccatataacgacgccgcgcgcgaaaccgaaaaacgccgacgcccgacgcgctccccacctactaaccttaactatacgcgaccgcgcaaataacgacgctaacgacctaactactcgacaaacgaaacttataaaaacgcgaaacttcttaataaaaccgaaaccgaaacccaaccgaaacgaacaacaaatacgcgaacgaacgaacgaaaaccgaaacgcgacaactaaacactaaaaacgctaaactaacccgaaaacgaaaaaataacaaatttaactttcttcttttcccttctccttcttcctccgt

SEQ ID NO: 36033 - DNA, 1133 bp, Artificial Sequence
  chemically treated genomic DNA (Homo sapiens) CpG-island No: 36033
tacgttttcggtttatattagatatcgtgttttatttacgtttttcgtttatattagatatcgttttatttacgtttttcgtttatattagatatcgtgttttatttacgtttttcgtttatattagatatcgtgttttatttacgtttttcggtatatattagatatcgttttatttacgttttcggtttatattagatatcgtgttttatttacgttttcggtttatattagatatcgttttatttacgttttcggtttatattagatatcgtgttttatttacgttttcggtttatattagatatcgttttatttacgtttttcgttatattagatatcgtgttttatttacgttgtcggtttatattagatatcgtgttttatttacgttttcggtttatattagatatcgttttatttacgttttcggtttatattagataatgtgttttatttacgttttcggtttatattagatatcgttttatttacgttttcggtttatattagatatcgtgtttttatttacgttttcggtttatattagatatcgttttatttacgtttttcgtttatattagatatcgtgttttatttacgttgtcggtttatattagatatcgttttatttacgtttttcgtttatattaaagtagtaatcggtggtttatttacgttgtcggtttatattagatatcgtgttttatttacgttgtcggtttatattagatatcgttttatttacgttttcggtttatattagatatcgtgttttatttacgttttcggtttatattagatatcgttttatttacgttttcggtttatattagatatcgtgttttatttacgttttcggtttatattagatatcgtgttttatttacgttttcggtttatattagatatcgttttatttacgttttcggtttatattagatatcgtgttttatttacgtttatcgtttatattagatatcgtgttttatttacgttttcggtttatattagatattgttttatttacgttttcggtttatattattgttttatttacgttttcggtttgggtttgaagattattagatatttaatattcgtttgattttttttttttaaggtattttttt

SEQ ID NO: 36034 - DNA, 1133 bp, Artificial Sequence
  chemically treated genomic DNA (Homo sapiens) CpG-island No: 36034
aaaaaaataccttaaaaaaaaaaaatcaaacgaatattaaatatctaataatcttcaaacccaaaccgaaaacgtaaataaaacaataatataaaccgaaaacgtaaataaaacaatatctaatataaaccgaaaacgtaaataaaacacgatatctaatataaacgataaacgtaaataaaacacgatatctaatataaaccgaaaacgtaaataaaacgatatctaatataaaccgaaaacgtaaataaaacacgatatctaatataaaccgaaaacgtaaataaaacacgatatctaatataaaccgaaaacgtaaataaaacgatatctaatataaaccgaaaacgtaaataaaacacgatatctaatataaaccgaaaacgtaaataaaacgatatctaatataaaccgacaacgtaaataaaacacgatatctaatataaaccgacaacgtaaataaaccaccgattactactttaatataaacgaaaaacgtaaataaaacgatatctaatataaaccgacaacgtaaataaaacacgatatctaatataaacgaaaaacgtaaataaaacgatatctaatataaaccgaaaacgtaaataaaaacacgatatctaatataaaccgaaaacgtaaataaaacgatatctaatataaaccgaaaacgtaaataaaacacattatctaatataaaccgaaaacgtaaataaaacgatatctaatataaaccgaaaacgtaaataaaacacgatatctaatataaaccgacaacgtaaataaaacacgatatctaatataacgaaaaacgtaaataaaacgatatctaatataaaccgaaaacgtaaataaaacacgatatctaatataaaccgaaaacgtaaataaaacgatatctaatataaaccgaaaacgtaaataaaacacgatatctaatataaaccgaaaacgtaaataaaacgatatctaatatataccgaaaaacgtaaataaaacacgatatctaatataaacgaaaaacgtaaataaaacacgatatctaatataaacgaaaaacgtaaataaaacgatatctaatataaacgaaaaacgtaaataaaacacgatatctaatataaaccgaaaacgta

SEQ ID NO: 36035 - DNA, 1133 bp, Artificial Sequence
  chemically treated genomic DNA (Homo sapiens) CpG-island No: 36035
ggagaaatgttttgaaggagaagaattagacgaatgttgagtgtttagtgatttttaaatttagatcgggagcgtgggtgggatagtggtgtagatcgggaacgtgggtgggatagtgtttggtgtagatcgggagcgtgggtgggatacggtgtttggtgtagacggtaagcgtgggtgggatacggtgtttggtgtagatcgggagcgtgggtgggacggtgtttggtgtagatcgggagcgtgggtgggatacggtgtttggtgtagatcgggagcgtgggtgggatacggtgtttggtgtagatcgggagcgtgggtgggacggtgtttggtgtagatcgggagcgtgggtgggatacggtgtttggtgtagatcgggagcgtgggtgggacggtgtttggtgtagatcggtagcgtgggtgggatacggtgtttggtgtagatcggtagcgtgggtggattatcggttgttgttttggtatagacggggagcgtgggtgggacggtgtttggtgtagatcggtagcgtgggtgggatacggtgtttggtgtagacggggagcgtgggtgggacggtgtttggtgtagatcgggagcgtgggtgggaatacggtgtttggtgtagatcgggagcgtgggtgggacggtgtttggtgtagatcgggagcgtgggtgggatatattgtttggtgtagatcgggagcgtgggtgggacggtgtttggtgtagatcgggagcgtgggtgggatacggtgtttggtgtagatcggtagcgtgggtgggatacggtgtttggtgtgacggggagcgtgggtgggacggtgtttggtgtagatcgggagcgtgggtgggatacggtgtttggtgtagatcgggagcgtgggtgggacggtgtttggtgtagatcgggagcgtgggtgggatacggtgtttggtgtagatcgggagcgtgggtgggacggtgtttggtgtatatcgggagacgtgggtgggatacggtgtttggtgtagacggggagcgtgggtgggatacggtgtttggtgtagacggggagcgtgggtgggacggtgtttggtgtagacggggagcgtgggtgggatacggtgtttggtgtagatcgggagcgtg

SEQ ID NO: 36036 - DNA, 1133 bp, Artificial Sequence
  chemically treated genomic DNA (Homo sapiens) CpG-island No: 36036
cacgctcccgatctacaccaaacaccgtatcccacccacgctccccgtctacaccaaacaccgtcccacccacgctccccgtctacaccaaacaccgtatcccacccacgctccccgtctacaccaaacaccgtatcccacccacgtctcccgatatacaccaaacaccgtcccacccacgctcccgatctacaccaaacaccgtatcccacccacgctcccgatctacaccaaacaccgtcccacccacgctcccgatctacaccaaacaccgtatcccacccacgctcccgatctacaccaaacaccgtcccacccacgctccccgtcacaccaaacaccgtatcccacccacgctaccgatctacaccaaacaccgtatcccacccacgctcccgatctacaccaaacaccgtcccacccacgctcccgatctacaccaaacaatatatcccacccacgctcccgatctacaccaaacaccgtcccacccacgctcccgatctacaccaaacaccgtattcccacccacgctcccgatctacaccaaacaccgtcccacccacgctccccgtctacaccaaacaccgtatcccacccacgctaccgatctacaccaaacaccgtcccacccacgctccccgtctataccaaaacaacaaccgataatccacccacgctaccgatctacaccaaacaccgtatcccacccacgctaccgatctacaccaaacaccgtcccacccacgctcccgatctacaccaaacaccgtatcccacccacgctcccgatctacaccaaacaccgtcccacccacgctcccgatctacaccaaacaccgtatcccacccacgctcccgatctacaccaaacaccgtatcccacccacgctcccgatctacaccaaacaccgtcccacccacgctcccgatctacaccaaacaccgtatcccacccacgcttaccgtctacaccaaacaccgtatcccacccacgctcccgatctacaccaaacactatcccacccacgttcccgatctacaccactatcccacccacgctcccgatctaaatttaaaaatcactaaacactcaacattcgtctaattcttctccttcaaaacatttctcc

SEQ ID NO: 36037 - DNA, 624 bp, Artificial Sequence
  chemically treated genomic DNA (Homo sapiens) CpG-island No: 36037
acgaagttaaatcggtgaacgtggaagtcgtgcgtgaattggtcgtttttggtgtgatgttgacgtcggacgagaacgtagtgcgcgttgagatgaacgtgtagtatcgcgttattaattcggaaaaatatttgtatagcgtgattagttcggatgatagtttgcgttaggttatcgatagcgttttgcgtggagttatcggtaaatatattatggatcgtattttgacggaaggtcgtatcgtgattcgtagcgatatttagcgcgaattggaagagacgattcgttcgtatgatatgggtattacgttgttggacgttaatttttaggttgttcgttcgtcggaagaagtaaaagcggcgtttgacgatgcgattgtcgcgcgtgaaaacgaatagtaatatattcgtgaagtagaagcgtatattaacgaagtttagtcgcgtgcgaacggttaggcgtaacgtattttcgaagaggcgcgtgcgtataaggtttagattattttggaagtttagggtgaagtggcgcgttttgttaaatttttgtcggaatataaagtcgcgtcggaaattattcgcgagcgtttgtatatcgagacgatggaaaaagtgttgggtaata

SEQ ID NO: 36038 - DNA, 624 bp, Artificial Sequence
  chemically treated genomic DNA (Homo sapiens) CpG-island No: 36038
tattacccaacactttttccatcgtctcgatatacaaacgctcgcgaataatttccgacgcgactttatattccgacaaaaatttaacaaaacgcgccacttcaccctaaacttccaaaataatctaaaccttatacgcacgcgcctcttcgaaaatacgttacgcctaaccgttcgcacgcgactaaacttcgttaatatacgcttctacttcacgaatatattactattcgttttcacgcgcgacaatcgcatcgtcaaacgccgcttttacttcttccgacgaacgaacaacctaaaaattaacgtccaacaacgtaatacccatatcatacgaacgaatcgtctcttccaattcgcgctaaatatcgctacgaatcacgatacgaccttccgtcaaaatacgatccataatatatttaccgataactccacgcaaaacgctatcgataacctaacgcaaactatcatccgaactaatcacgctatacaaatatttttccgaattaataacgcgatactacacgttcatctcaacgcgcactacgttctcgtccgacgtcaacatcacaccaaaaacgaccaattcacgcacgacttccacgttcaccgatttaacttcgt

SEQ ID NO: 36039 - DNA, 624 bp, Artificial Sequence
  chemically treated genomic DNA (Homo sapiens) CpG-island No: 36039
tgttatttaatattttttttatcgtttcgatatatagacgttcgcgagtaattttcggcgcggttttatatttcggtagaagtttagtaaagcgcgttattttattttgagtttttaggatggtttgggttttgtacgtacgcgttttttcgaggatacgttgcgtttgatcgttcgtacgcggttgaatttcgttggtatacgtttttgttttacgaatgtattgttgttcgtttttacgcgcggtaatcgtatcgttaaacgtcgtttttatttttttcggcggacgagtagtttggaagttgacgtttagtagcgtgatatttatgttatacggacgaatcgttttttttagttcgcgttgagtatcgttacgaattacggtacgatttttcgttagaatgcggtttatggtgtatttatcgataattttacgtagggcgttgtcggtagtttgacgtaggttgttattcgggttggttacgttatatagatattttttcggattggtgacgcggtattgtacgtttattttaacgcgtattacgttttcgttcgacgttagtattatattagaagcggttagtttacgtacggtttttacgtttatcggtttgatttcgt

SEQ ID NO: 36040 - DNA, 624 bp, Artificial Sequence
  chemically treated genomic DNA (Homo sapiens) CpG-island No: 36040
acgaaatcaaaccgataaacgtaaaaaccgtacgtaaactaaccgcttctaatataatactaacgtcgaacgaaaacgtaatacgcgttaaaataaacgtacaataccgcgtcaccaatccgaaaaaatatctatataacgtaaccaacccgaataacaacctacgtcaaactaccgacaacgccctacgtaaaattatcgataaatacaccataaaccgcattctaacgaaaaatcgtaccgtaattcgtaacgatactcaacgcgaactaaaaaaaacgattcgtccgtataacataaatatcacgctactaaacgtcaacttccaaactactcgtccgccgaaaaaaataaaaacgacgtttaacgatacgattaccgcgcgtaaaaacgaacaacaatacattcgtaaaacaaaaacgtataccaacgaaattcaaccgcgtacgaacgatcaaacgcaacgtatcctcgaaaaaacgcgtacgtacaaaacccaaaccatcctaaaaactcaaaataaaataacgcgctttactaaacttctaccgaaatataaaaccgcgccgaaaattactcgcgaacgtctatatatcgaaacgataaaaaaaatattaaataaca

SEQ ID NO: 36041 - DNA, 622 bp, Artificial Sequence
  chemically treated genomic DNA (Homo sapiens) CpG-island No: 36041
tattttttcggtttttcggggagcgttcggtagttgcggttttttttcggtattgcggcgtattgcggagtcgtttgttcgttagtttaggtcgtgcggggtttttttcgtcgtttcgcgtcgtcgtagttttttcgtttttttttgtttcgtcgggtcgtcgtttttcgcgttaggcgcgtcgcggggtatttattaatttagagtttttgacgtatatacgcgcgtttttagacggagatttcgtcgtttgttttcgttcgttattttcgttcgtttttcgcgggtttgtatttgtattattcgtatacgtagaaggtgacgcgagcgtttttagtttaggtcgtttaggcggtatttttagttttcgtggtttagttttttttttcgttttcgcgcgtcgtttaaggttttcgtacgtttatagatttgttttcgattgtttatttgtcgtggggtgttggttgttttaagttaagtttattttcgtatttcgtagttttcgtgggtttagttcggggcgtttttcgcgacgttttggagaaaagtttttttagttttagaatttaggcggaaggggaaaagtttattaagagaaagggttagagggtcggttgatggt

SEQ ID NO: 36042 - DNA, 622 bp, Artificial Sequence
  chemically treated genomic DNA (Homo sapiens) CpG-island No: 36042
accatcaaccgaccctctaaccctttctcttaataaacttttccccttccgcctaaattctaaaactaaaaaaacttttctccaaaacgtcgcgaaaaacgccccgaactaaacccacgaaaactacgaaatacgaaaataaacttaacttaaaacaaccaacaccccacgacaaataaacaatcgaaaacaaatctataaacgtacgaaaaccttaaacgacgcgcgaaaacgaaaaaaaaaactaaaccacgaaaactaaaaataccgcctaaacgacctaaactaaaaacgctcgcgtcaccttctacgtatacgaataatacaaatacaaacccgcgaaaaacgaacgaaaataacgaacgaaaacaaacgacgaaatctccgtctaaaaacgcgcgtatatacgtcaaaaactctaaattaataaataccccgcgacgcgcctaacgcgaaaaacgacgacccgacgaaacaaaaaaaaacgaaaaaactacgacgacgcgaaacgacgaaaaaaaccccgcacgacctaaactaacgaacaaacgactccgcaatacgccgcaataccgaaaaaaaaccgcaactaccgaacgctccccgaaaaaccgaaaaaata

SEQ ID NO: 36043 - DNA, 622 bp, Artificial Sequence
  chemically treated genomic DNA (Homo sapiens) CpG-island No: 36043
gttattagtcgattttttgatttttttttttagtgggttttttttttttcgtttgggttttagaattgggaagatttttttttagagcgtcgcggggagcgtttcgggttgggtttacggggattgcggaatacggggatgaatttggtttggggtagttagtattttacggtagatgaataatcgggagtagatttgtgggcgtgcggggattttaggcggcgcgcgggggcggggggaggggttgagttacgggggttagaggtgtcgtttggacggtttgagttgggggcgttcgcgttattttttacgtgtgcgagtgatgtaaatgtagattcgcgaggggcgggcgggggtggcgggcgggggtaggcgacggagttttcgtttgggagcgcgcgtgtgtgcgttaaaagttttgggttgatggatgtttcgcggcgcgtttggcgcggagagcggcgattcggcggggtagaggggggcgggaggattgcggcggcgcggggcggcgaggaaagtttcgtacggtttgggttggcgggtaggcggtttcgtagtgcgtcgtagtgtcgggaaggagtcgtagttatcgggcgtttttcgggggatcgaggagatg

SEQ ID NO: 36044 - DNA, 622 bp, Artificial Sequence
  chemically treated genomic DNA (Homo sapiens) CpG-island No: 36044
catctcctcgatcccccgaaaaacgcccgataactacgactccttcccgacactacgacgcactacgaaaccgcctacccgccaacccaaaccgtacgaaactttcctcgccgccccgcgccgccgcaatcctcccgcccccctctaccccgccgaatcgccgctctccgcgccaaacgcgccgcgaaacatccatcaacccaaaacttttaacgcacacacgcgcgctcccaaacgaaaactccgtcgcctacccccgcccgccacccccgcccgcccctcgcgaatctacatttacatcactcgcacacgtaaaaaataacgcgaacgcccccaactcaaaccgtccaaacgacacctctaacccccgtaactcaacccctccccccgcccccgcgcgccgcctaaaatccccgcacgcccacaaatctactcccgattattcatctaccgtaaaatactaactaccccaaaccaaattcatccccgtattccgcaatccccgtaaacccaacccgaaacgctccccgcgacgctctaaaaaaaaatcttcccaattctaaaacccaaacgaaaaaaaaaaaacccactaaaaaaaaaaatcaaaaaatcgactaataac

SEQ ID NO: 36045 - DNA, 547 bp, Artificial Sequence
  chemically treated genomic DNA (Homo sapiens) CpG-island No: 36045
tgcgttttcgaaaggttgtaaaaatttttttaggttgtagcgttcggttattagtcgggaagagaaatttagtagcgggggaaagttttttcgcggatgttcgttttattttttttatttatcgttttagtcgtcggatatttttgttttgagtggtgttagtattgtagtcgttttagtgcgggcgtcgtttcggttcgttttttcgggttgttttcgtttgttattttcgtttgtagcgcgcggagtggtgatttttttgagcgtgttagcggcgagaggaggggcgggaaagtggttttcggtttgtacgttgcggttttttttttttttttcgtttgttttttttttttggtgttgtagtgtcgggcggcggcgtggcgagagtattagcggtgcgtagggagttacggcgcgcgggggaggcgggattcgcgcgttattcgcggtgtttcggtaagtcgcggtgttgaggcgttgttgcggtgtgggattggggtagggggcggggaaggagagttatttttaagtggtaggtatttttgga

SEQ ID NO: 36046 - DNA, 547 bp, Artificial Sequence
  chemically treated genomic DNA (Homo sapiens) CpG-island No: 36046
tccaaaaatacctaccacttaaaaataactctccttccccgccccctaccccaatcccacaccgcaacaacgcctcaacaccgcgacttaccgaaacaccgcgaataacgcgcgaatcccgcctcccccgcgcgccgtaactccctacgcaccgctaatactctcgccacgccgccgcccgacactacaacaccaaaaaaaaaaaacaaacgaaaaaaaaaaaaaaaaccgcaacgtacaaaccgaaaaccactttcccgcccctcctctcgccgctaacacgctcaaaaaaatcaccactccgcgcgctacaaacgaaaataacaaacgaaaacaacccgaaaaaacgaaccgaaacgacgcccgcactaaaacgactacaatactaacaccactcaaaacaaaaatatccgacgactaaaacgataaataaaaaaaataaaacgaacatccgcgaaaaaactttcccccgctactaaatttctcttcccgactaataaccgaacgctacaacctaaaaaaatttttacaacctttcgaaaacgca

SEQ ID NO: 36047 - DNA, 547 bp, Artificial Sequence
  chemically treated genomic DNA (Homo sapiens) CpG-island No: 36047
tttagaagtatttattatttggaggtggtttttttttttcgttttttgttttagttttatatcgtagtagcgttttagtatcgcgatttgtcggagtatcgcgagtggcgcgcgggtttcgtttttttcgcgcgtcgtgattttttgcgtatcgttggtattttcgttacgtcgtcgttcggtattgtagtattagggggaggaggtaggcggaggagaggaggaggatcgtagcgtgtaagtcgggagttattttttcgttttttttttcgtcgttgatacgtttagaggagttattatttcgcgcgttgtaggcgagagtggtagacggaggtagttcggggaagcgagtcggagcggcgttcgtattgaggcggttgtagtgttgatattatttagggtaagggtgttcgacggttggagcggtgagtgggggaggtgaagcgggtattcgcggggagattttttttcgttgttggattttttttttcgattggtggtcgggcgttgtagtttggggaagtttttgtagtttttcggaagcgta

SEQ ID NO: 36048 - DNA, 547 bp, Artificial Sequence
  chemically treated genomic DNA (Homo sapiens) CpG-island No: 36048
tacgcttccgaaaaactacaaaaacttccccaaactacaacgcccgaccaccaatcgaaaaaaaaaatccaacaacgaaaaaaaatctccccgcgaatacccgcttcacctcccccactcaccgctccaaccgtcgaacacccttaccctaaataatatcaacactacaaccgcctcaatacgaacgccgctccgactcgcttccccgaactacctccgtctaccactctcgcctacaacgcgcgaaataataactcctctaaacgtatcaacgacgaaaaaaaaaacgaaaaaataactcccgacttacacgctacgatcctcctcctctcctccgcctacctcctccccctaatactacaataccgaacgacgacgtaacgaaaataccaacgatacgcaaaaaatcacgacgcgcgaaaaaaacgaaacccgcgcgccactcgcgatactccgacaaatcgcgatactaaaacgctactacgatataaaactaaaacaaaaaacgaaaaaaaaaaaccacctccaaataataaatacttctaaa

SEQ ID NO: 36049 - DNA, 960 bp, Artificial Sequence
  chemically treated genomic DNA (Homo sapiens) CpG-island No: 36049
tcggcgggcgatagatagcggcgggtacgcgggagtcggggtgtaggttgtaaagcggggtttttcggttgtagaagtcgttttcgtgtgtcgttttatagttgcgtacgcgttaggtaatatattttcgttgttcgtcgcggttttgcgttaaagttttttcgggatagtcgtatacgtttttcggattcggcggcgcgtacgtatttagtaatacgtagagtatatcgagggttacgtacggtagtcgcgttttgttaaatatggtttttgttcgggttgttcggtaagggcgatggattgagttgcgggacggcggtcgaggtttttgattttcgagttcgggtcggggttggcgacggtttcgagttacggttttttttagtcggaggaggagagtagtcgagggcgggttgagatcgggcggcgtttttatcgttagtaatggcgttcggggttttttttttatagttttcgcgaatattcggttagtgtcgaggcgttcgtgtgttagtcgcggtagttttgtagttttaggatttttttagtcggtacggtttgtttcggttgtttttcgttcggatttcggcgtttttttttataggcggggcgtttagattttcgttttaaggatggggatcggtagggaggaggaacgcggggtttagtttttttcgttgagtagcgtaggatcgggtagcgcgcgggttcgcgggcggggggagtgtagtaggggcggggttagggaaattttaggtcgcggcggttagttaattagcgtcgtcggttttatttttttcgatttgcggtattcgtttagaagtgcggttttcggtagtcgggcggggcgtgggggcggttttcgtttcgatttagggggttttgttttggatcgtaattgtttaggtggttttcgaattcggtttcggtatttttattaggtattgttgtttttagaga

SEQ ID NO: 36050 - DNA, 960 bp, Artificial Sequence
  chemically treated genomic DNA (Homo sapiens) CpG-island No: 36050
tctctaaaaacaacaatacctaataaaaataccgaaaccgaattcgaaaaccacctaaacaattacgatccaaaacaaaaccccctaaatcgaaacgaaaaccgcccccacgccccgcccgactaccgaaaaccgcacttctaaacgaataccgcaaatcgaaaaaaataaaaccgacgacgctaattaactaaccgccgcgacctaaaatttccctaaccccgcccctactacactccccccgcccgcgaacccgcgcgctacccgatcctacgctactcaacgaaaaaaactaaaccccgcgttcctcctccctaccgatccccatccttaaaacgaaaatctaaacgccccgcctataaaaaaaaacgccgaaatccgaacgaaaaacaaccgaaacaaaccgtaccgactaaaaaaatcctaaaactacaaaactaccgcgactaacacacgaacgcctcgacactaaccgaatattcgcgaaaactataaaaaaaaaaccccgaacgccattactaacgataaaaacgccgcccgatctcaacccgccctcgactactctcctcctccgactaaaaaaaaccgtaactcgaaaccgtcgccaaccccgacccgaactcgaaaatcaaaaacctcgaccgccgtcccgcaactcaatccatcgcccttaccgaacaacccgaacaaaaaccatatttaacaaaacgcgactaccgtacgtaaccctcgatatactctacgtattactaaatacgtacgcgccgccgaatccgaaaaacgtatacgactatcccgaaaaaactttaacgcaaaaccgcgacgaacaacgaaaatatattacctaacgcgtacgcaactataaaacgacacacgaaaacgacttctacaaccgaaaaaccccgctttacaacctacaccccgactcccgcgtacccgccgctatctatcgcccgccga

SEQ ID NO: 36051 - DNA, 960 bp, Artificial Sequence
  chemically treated genomic DNA (Homo sapiens) CpG-island No: 36051
tttttgaaagtagtaatgtttagtgggggtatcgaggtcgagttcggagattatttgagtaattgcggtttagagtaaagttttttggatcggaacgggagtcgtttttacgtttcgttcggttgtcgagagtcgtatttttgggcggatgtcgtaggtcgggagggatgaggtcgacggcgttgattggttgatcgtcgcggtttggggtttttttggtttcgtttttgttgtatttttttcgttcgcgaattcgcgcgttgttcggttttgcgttgtttagcgggaggggttggatttcgcgttttttttttttgtcggtttttatttttaaagcgagagtttggacgtttcgtttgtgggagagagcgtcgggattcggacggggagtaatcggggtaggtcgtgtcggttgaggaggttttgaggttatagagttgtcgcggttggtatacgagcgtttcggtattaatcgagtgttcgcgggggttgtgaggggagggtttcgggcgttattgttggcggtgggagcgtcgttcggttttagttcgttttcggttgtttttttttttcggttgggaggggtcgtagttcggggtcgtcgttagtttcggttcgggttcgagaattaagggtttcggtcgtcgtttcgtagtttagtttatcgtttttgtcgggtagttcgggtagagattatgtttgataagacgcggttgtcgtacgtggttttcgatgtgttttgcgtgttgttgggtacgtacgcgtcgtcgggttcgaggggcgtgtgcggttgtttcgggagggttttagcgtagagtcgcgacgggtagcgggggtgtgttgtttgacgcgtgcgtagttgtggggcgatatacgggggcggtttttgtagtcgagggatttcgttttgtagtttgtatttcggttttcgcgtgttcgtcgttgtttgtcgttcgtcgg

SEQ ID NO: 36052 - DNA, 960 bp, Artificial Sequence
  chemically treated genomic DNA (Homo sapiens) CpG-island No: 36052
ccgacgaacgacaaacaacgacgaacacgcgaaaaccgaaatacaaactacaaaacgaaatccctcgactacaaaaaccgcccccgtatatcgccccacaactacgcacgcgtcaaacaacacacccccgctacccgtcgcgactctacgctaaaaccctcccgaaacaaccgcacacgcccctcgaacccgacgacgcgtacgtacccaacaacacgcaaaacacatcgaaaaccacgtacgacaaccgcgtcttatcaaacataatctctacccgaactacccgacaaaaacgataaactaaactacgaaacgacgaccgaaacccttaattctcgaacccgaaccgaaactaacgacgaccccgaactacgacccctcccaaccgaaaaaaaaaaacaaccgaaaacgaactaaaaccgaacgacgctcccaccgccaacaataacgcccgaaaccctcccctcacaacccccgcgaacactcgattaataccgaaacgctcgtataccaaccgcgacaactctataacctcaaaacctcctcaaccgacacgacctaccccgattactccccgtccgaatcccgacgctctctcccacaaacgaaacgtccaaactctcgctttaaaaataaaaaccgacaaaaaaaaaaaacgcgaaatccaacccctcccgctaaacaacgcaaaaccgaacaacgcgcgaattcgcgaacgaaaaaaatacaacaaaaacgaaaccaaaaaaaccccaaaccgcgacgatcaaccaatcaacgccgtcgacctcatccctcccgacctacgacatccgcccaaaaatacgactctcgacaaccgaacgaaacgtaaaaacgactcccgttccgatccaaaaaactttactctaaaccgcaattactcaaataatctccgaactcgacctcgatacccccactaaacattactactttcaaaaa

SEQ ID NO: 36053 - DNA, 527 bp, Artificial Sequence
  chemically treated genomic DNA (Homo sapiens) CpG-island No: 36053
gttgtttcgtagttaggttggcgtttgtttatattcgcggtagggttacgattagtattaaggcgagtatcgttatcgtttttatcggtgtttagggagggttagcgcgcggcgtttttttttcgtttttttggaattttcgtatttttcgcgcgtttttttttgggtttggtcggtagggggattttcgttcgtttcggggcgcgcgttttttattcgtcggggtttgtcggggtttttggagttttattttagggtttcgcggtcgttggcggttttgaatatcggttttgagtttcgttttgtgttgttgttggaacggtcggcggttaggtaggaaacggttttaggattttttcgaaaggttcgtgtcgaaatttaatttcgtaatttaagggtcgtttttttgacgattttatcgtttatagaaagtggtcggcggttaggtaggggatttttttcgtagaagagtacgggtttatttttgataattcgtttttgaatagtttttagtttattataatatt

SEQ ID NO: 36054 - DNA, 527 bp, Artificial Sequence
  chemically treated genomic DNA (Homo sapiens) CpG-island No: 36054
aatattataataaactaaaaactattcaaaaacgaattatcaaaaataaacccgtactcttctacgaaaaaaatcccctacctaaccgccgaccactttctataaacgataaaatcgtcaaaaaaacgacccttaaattacgaaattaaatttcgacacgaacctttcgaaaaaatcctaaaaccgtttcctacctaaccgccgaccgttccaacaacaacacaaaacgaaactcaaaaccgatattcaaaaccgccaacgaccgcgaaaccctaaaataaaactccaaaaaccccgacaaaccccgacgaataaaaaacgcgcgccccgaaacgaacgaaaatccccctaccgaccaaacccaaaaaaaaacgcgcgaaaaatacgaaaattccaaaaaaacgaaaaaaaaacgccgcgcgctaaccctccctaaacaccgataaaaacgataacgatactcgccttaatactaatcgtaaccctaccgcgaatataaacaaacgccaacctaactacgaaacaac

SEQ ID NO: 36055 - DNA, 527 bp, Artificial Sequence
  chemically treated genomic DNA (Homo sapiens) CpG-island No: 36055
aatattataatgagttaaaagttatttaggggcgagttattagaggtgagttcgtgtttttttgcggagaagattttttatttggtcgtcggttattttttgtgggcggtggggtcgttaaggggacggtttttgggttgcggggttgggtttcgatacgggtttttcggaggggttttggggtcgttttttgtttggtcgtcggtcgttttaatagtagtataaggcgggatttagaatcggtgtttagggtcgttagcggtcgcgaggttttgagatgaggttttaaagatttcgataggtttcggcgggtgggaggcgcgcgtttcggggcgggcgggggtttttttatcggttagatttagggagaggcgcgcggagggtgcgaaggttttagaagggcggggagggggcgtcgcgcgttgattttttttgggtatcggtggggacgatggcggtgttcgttttggtgttggtcgtggttttatcgcgggtgtggatagacgttaatttgattgcgagataat

SEQ ID NO: 36056 - DNA, 527 bp, Artificial Sequence
  chemically treated genomic DNA (Homo sapiens) CpG-island No: 36056
attatctcgcaatcaaattaacgtctatccacacccgcgataaaaccacgaccaacaccaaaacgaacaccgccatcgtccccaccgatacccaaaaaaaatcaacgcgcgacgccccctccccgcccttctaaaaccttcgcaccctccgcgcgcctctccctaaatctaaccgataaaaaaacccccgcccgccccgaaacgcgcgcctcccacccgccgaaacctatcgaaatctttaaaacctcatctcaaaacctcgcgaccgctaacgaccctaaacaccgattctaaatcccgccttatactactattaaaacgaccgacgaccaaacaaaaaacgaccccaaaacccctccgaaaaacccgtatcgaaacccaaccccgcaacccaaaaaccgtccccttaacgaccccaccgcccacaaaaaataaccgacgaccaaataaaaaatcttctccgcaaaaaaacacgaactcacctctaataactcgcccctaaataacttttaactcattataatatt

SEQ ID NO: 36057 - DNA, 969 bp, Artificial Sequence
  chemically treated genomic DNA (Homo sapiens) CpG-island No: 36057
tgtcgtaatttttagtttcggagtaattagtttggttcgatagcggaggtttaagttcgttgggttcgggcgttggaatcgtttcggcggggggaagttcgggtaggacgtagtcgcgttttatagttgaggaaaattcgttgcggcgtagggtaacgtttagaagtcgagagtggtatcgcgacgcgtcggaacgcgttagtattttttatatttaagattagatttttttttttttatttaggacgtttttcgtcgttcgttcggtcgtttttcgtttttatattttttgttagttttatatatagttagataagggaagtaagttagcggcgttcggggacggagtaagcgtagtagtcgtagcgcgcggttttttttttaggtttcggcgttttagttcgtatacgtgtatgcgtatgcgtcgcgttcgggttttttagttttcggtcgtattttttcgcgtagggttagaggtcgtggggcgggttacggtgacgcgcgcggaagcgttttgcggattttcggaaatcgtttcggcggttgagaggttgcggttattgtttggtatttcgacgggaggggtttcggatcgttcggagtcggttgaattttttcggtcgcgagcgatcgtatgagtcgggggattatgttttagttcgaagcgtggttaggcgcgagttgcgtcgagacgtcggcgcgggaggcggcggttacggcgcgggacggcgggaaggcggcggttagcgggtagtcgcggttcgagatgtagtgttcggtcgagtagtgagttcgcgggggcgcggggcgcgggtcgtgggcggcgggttcggtttttttcggaagtcgggttggggtggggagtcgttagcggagggtttttgggcgtttttaattttgagtgaggtcgttggcgataaggaggaattggtagatagtttttttagtgttcgagtgtagatttttaat

SEQ ID NO: 36058 - DNA, 969 bp, Artificial Sequence
  chemically treated genomic DNA (Homo sapiens) CpG-island No: 36058
attaaaaatctacactcgaacactaaaaaaactatctaccaattcctccttatcgccaacgacctcactcaaaattaaaaacgcccaaaaaccctccgctaacgactccccaccccaacccgacttccgaaaaaaaccgaacccgccgcccacgacccgcgccccgcgcccccgcgaactcactactcgaccgaacactacatctcgaaccgcgactacccgctaaccgccgccttcccgccgtcccgcgccgtaaccgccgcctcccgcgccgacgtctcgacgcaactcgcgcctaaccacgcttcgaactaaaacataatcccccgactcatacgatcgctcgcgaccgaaaaaattcaaccgactccgaacgatccgaaacccctcccgtcgaaataccaaacaataaccgcaacctctcaaccgccgaaacgatttccgaaaatccgcaaaacgcttccgcgcgcgtcaccgtaacccgccccacgacctctaaccctacgcgaaaaaatacgaccgaaaactaaaaaacccgaacgcgacgcatacgcatacacgtatacgaactaaaacgccgaaacctaaaaaaaaaaccgcgcgctacgactactacgcttactccgtccccgaacgccgctaacttacttcccttatctaactatatataaaactaacaaaaaatataaaaacgaaaaacgaccgaacgaacgacgaaaaacgtcctaaataaaaaaaaaaaaatctaatcttaaatataaaaaatactaacgcgttccgacgcgtcgcgataccactctcgacttctaaacgttaccctacgccgcaacgaattttcctcaactataaaacgcgactacgtcctacccgaacttccccccgccgaaacgattccaacgcccgaacccaacgaacttaaacctccgctatcgaaccaaactaattactccgaaactaaaaattacgaca

SEQ ID NO: 36059 - DNA, 969 bp, Artificial Sequence
  chemically treated genomic DNA (Homo sapiens) CpG-island No: 36059
gttaaaaatttgtattcggatattgggaaaattgtttgttaatttttttttgtcgttaacggttttatttagaattgaagacgtttagggatttttcgttgacgattttttattttagttcggttttcggaggggatcgagttcgtcgtttacggttcgcgtttcgcgttttcgcggatttattgttcggtcgggtattgtatttcgggtcgcggttgttcgttggtcgtcgttttttcgtcgtttcgcgtcgtggtcgtcgtttttcgcgtcggcgtttcggcgtagttcgcgtttggttacgtttcgggttggggtatagtttttcgatttatgcggtcgttcgcggtcgaaggggtttagtcggtttcgaacgattcggagtttttttcgtcggggtgttaggtagtggtcgtagttttttagtcgtcggggcggttttcgagggttcgtagagcgttttcgcgcgcgttatcgtggttcgttttacggtttttgattttgcgcgaggaggtgcggtcggaggttgaagggttcggacgcggcgtatgcgtatatacgtgtgcgggttgaggcgtcggggtttggagggggaatcgcgcgttgcggttgttgcgtttgtttcgttttcggacgtcgttggtttgttttttttgtttagttgtgtgtgggattggtagagggtgtgagagcgggaaacgatcggacgagcggcggggagcgttttgggtgaggaggaggaagtttggttttaggtgtgaaggatgttgacgcgtttcggcgcgtcgcggtgttattttcggtttttgagcgttgttttacgtcgtagcgggttttttttagttgtgaagcgcggttgcgttttgttcgggttttttttcgtcgggacggttttaacgttcgagtttagcgggtttgggttttcgttgtcgggttaggttagttgtttcggggttgggagttacggta

SEQ ID NO: 36060 - DNA, 969 bp, Artificial Sequence
  chemically treated genomic DNA (Homo sapiens) CpG-island No: 36060
taccgtaactcccaaccccgaaacaactaacctaacccgacaacgaaaacccaaacccgctaaactcgaacgttaaaaccgtcccgacgaaaaaaaacccgaacaaaacgcaaccgcgcttcacaactaaaaaaaacccgctacgacgtaaaacaacgctcaaaaaccgaaaataacaccgcgacgcgccgaaacgcgtcaacatccttcacacctaaaaccaaacttcctcctcctcacccaaaacgctccccgccgctcgtccgatcgtttcccgctctcacaccctctaccaatcccacacacaactaaacaaaaaaaacaaaccaacgacgtccgaaaacgaaacaaacgcaacaaccgcaacgcgcgattccccctccaaaccccgacgcctcaacccgcacacgtatatacgcatacgccgcgtccgaacccttcaacctccgaccgcacctcctcgcgcaaaatcaaaaaccgtaaaacgaaccacgataacgcgcgcgaaaacgctctacgaaccctcgaaaaccgccccgacgactaaaaaactacgaccactacctaacaccccgacgaaaaaaactccgaatcgttcgaaaccgactaaaccccttcgaccgcgaacgaccgcataaatcgaaaaactataccccaacccgaaacgtaaccaaacgcgaactacgccgaaacgccgacgcgaaaaacgacgaccacgacgcgaaacgacgaaaaaacgacgaccaacgaacaaccgcgacccgaaatacaatacccgaccgaacaataaatccgcgaaaacgcgaaacgcgaaccgtaaacgacgaactcgatcccctccgaaaaccgaactaaaataaaaaatcgtcaacgaaaaatccctaaacgtcttcaattctaaataaaaccgttaacgacaaaaaaaaattaacaaacaattttcccaatatccgaatacaaatttttaac

SEQ ID NO: 36061 - DNA, 872 bp, Artificial Sequence
  chemically treated genomic DNA (Homo sapiens) CpG-island No: 36061
tcgttttttttgatattttgtcgggttatatcgaatatgtcgggataacggtattcgtttgtttgtcgtgtggttgacgtacgattcggaatattcggagaatttatttgtcgcgtcgttgtgcgttatggttggacgtttcgcggcgaattggcggcggtgtatgatcgtagtaatatataggtgcgtagttttatttacgatgataatatcggggtcggatggtggcgtatcgttatacgggtcgatcggaaatttgttatcgttacgatagcgacgggcgggtgatagaatagttaaattcggtaggtttaagttatacgtattagtatgagaaggatcgtatgattattatcgatagtttgaatcgtcgtgaagttttgtatacgtagggtgaaggcgggttgaagcgggtggtgaaaaaggaatacgcggacggtagcgttacgtagagttagtttgacgcggtgggtaggtttagggtatagacggatgtcgtaggtaggataatagaatatagttcggatgtggtgacgggttttattacgcgtattattacgtcggatggtagggatcggcgttttattataattattatagttagttaacgttagttatcgggtttgacgggattggaaatacgtcgggaatatgatgaatggggtcgtttgatttaggaaattgtttttgagcggcgatattattcgttatcgttatgataatttatatagtgatttattttgcgtaacggaagatgtaatcggtagtcggaaaattatgacgtggagtcgttacggttagttgttgagttttattgattgtttcggttatgtaattcgttatgattatgatcgttttggttaggtgagcgg

SEQ ID NO: 36062 - DNA, 872 bp, Artificial Sequence
  chemically treated genomic DNA (Homo sapiens) CpG-island No: 36062
ccgctcacctaaccaaaacgatcataatcataacgaattacataaccgaaacaatcaataaaactcaacaactaaccgtaacgactccacgtcataattttccgactaccgattacatcttccgttacgcaaaataaatcactatataaattatcataacgataacgaataatatcgccgctcaaaaacaatttcctaaatcaaacgaccccattcatcatattcccgacgtatttccaatcccgtcaaacccgataactaacgttaactaactataataattataataaaacgccgatccctaccatccgacgtaataatacgcgtaataaaacccgtcaccacatccgaactatattctattatcctacctacgacatccgtctataccctaaacctacccaccgcgtcaaactaactctacgtaacgctaccgtccgcgtattcctttttcaccacccgcttcaacccgccttcaccctacgtatacaaaacttcacgacgattcaaactatcgataataatcatacgatccttctcatactaatacgtataacttaaacctaccgaatttaactattctatcacccgcccgtcgctatcgtaacgataacaaatttccgatcgacccgtataacgatacgccaccatccgaccccgatattatcatcgtaaataaaactacgcacctatatattactacgatcatacaccgccgccaattcgccgcgaaacgtccaaccataacgcacaacgacgcgacaaataaattctccgaatattccgaatcgtacgtcaaccacacgacaaacaaacgaataccgttatcccgacatattcgatataacccgacaaaatatcaaaaaaaacga

SEQ ID NO: 36063 - DNA, 872 bp, Artificial Sequence
  chemically treated genomic DNA (Homo sapiens) CpG-island No: 36063
tcgtttatttgattaaaacggttatggttatagcgggttatataatcggaatagttagtgaagtttagtaattgatcgtaacggttttacgttatggtttttcggttgtcggttgtatttttcgttgcgtagggtaagttattgtgtggattattataacggtagcgggtgatatcgtcgtttaggggtagttttttgaattagacggttttatttattatattttcggcgtatttttagtttcgttaggttcggtggttgacgttaattggttgtggtggttatagtaaaacgtcgatttttgttattcggcgtggtgatgcgcgtgatgaggttcgttattatattcggattgtattttgttgttttgtttgcggtattcgtttgtgttttgagtttgtttatcgcgttaaattgattttgcgtgacgttgtcgttcgcgtgttttttttttattattcgttttagttcgtttttattttgcgtgtgtaggattttacggcggtttaggttgtcggtgatggttatgcggttttttttatattgatacgtgtaatttaagtttgtcgggtttagttgttttgttattcgttcgtcgttgtcgtaacggtaatagattttcggtcggttcgtgtgacggtgcgttattattcggtttcggtattattatcgtaagtaaagttgcgtatttgtgtattgttgcggttatatatcgtcgttagttcgtcgcggggcgtttagttatagcgtatagcggcgcggtaggtaaatttttcgggtatttcgggtcgtgcgttagttatacggtagatagacggatgtcgttgtttcggtatattcggtgtaattcggtagggtattaggaaaagcgg

SEQ ID NO: 36064 - DNA, 872 bp, Artificial Sequence
  chemically treated genomic DNA (Homo sapiens) CpG-island No: 36064
ccgcttttcctaataccctaccgaattacaccgaatataccgaaacaacgacatccgtctatctaccgtataactaacgcacgacccgaaatacccgaaaaatttacctaccgcgccgctatacgctataactaaacgccccgcgacgaactaacgacgatatataaccgcaacaatacacaaatacgcaactttacttacgataataataccgaaaccgaataataacgcaccgtcacacgaaccgaccgaaaatctattaccgttacgacaacgacgaacgaataacaaaacaactaaacccgacaaacttaaattacacgtatcaatataaaaaaaaccgcataaccatcaccgacaacctaaaccgccgtaaaatcctacacacgcaaaataaaaacgaactaaaacgaataataaaaaaaaaacacgcgaacgacaacgtcacgcaaaatcaatttaacgcgataaacaaactcaaaacacaaacgaataccgcaaacaaaacaacaaaatacaatccgaatataataacgaacctcatcacgcgcatcaccacgccgaataacaaaaatcgacgttttactataaccaccacaaccaattaacgtcaaccaccgaacctaacgaaactaaaaatacgccgaaaatataataaataaaaccgtctaattcaaaaaactacccctaaacgacgatatcacccgctaccgttataataatccacacaataacttaccctacgcaacgaaaaatacaaccgacaaccgaaaaaccataacgtaaaaccgttacgatcaattactaaacttcactaactattccgattatataacccgctataaccataaccgttttaatcaaataaacga

SEQ ID NO: 36065 - DNA, 539 bp, Artificial Sequence
  chemically treated genomic DNA (Homo sapiens) CpG-island No: 36065
gcggtcgtgttagattcggtgttgcgggttcggtgtaggatgtaggtcgtgaggttttaggtcgagggttgcgttagcgggtttgtttcggttagtcgggcggtttcgtgtttcggcgtagtttcgttggggtttagatgttcggtttttagggtgcgaggcgcgtatttttcggggaatcgggttgcggagtaggcggttcgttttgggcggcggtggtacgagagggttatttgtttgggtgtcgagaattgtagcgttcgcggtgcgaggcgcggttcgtttcgtttcggtttttagttcggcgcgtacgtatatatttacgtcggtcggcgttcgttgttcgagttttcgtgttaggtttagattttgattaggcgcgggaggcggtgtagggattagaggattttttttttcggcgtttttttcgtttcgttcgaggttgcgaggatttttgggttcgggggtggtgagggagtttcgtttcggttgggttcgggttggggattcggtttttttgggcgggggtcgtacggttg

SEQ ID NO: 36066 - DNA, 539 bp, Artificial Sequence
  chemically treated genomic DNA (Homo sapiens) CpG-island No: 36066
caaccgtacgacccccgcccaaaaaaaccgaatccccaacccgaacccaaccgaaacgaaactccctcaccacccccgaacccaaaaatcctcgcaacctcgaacgaaacgaaaaaaacgccgaaaaaaaaaatcctctaatccctacaccgcctcccgcgcctaatcaaaatctaaacctaacacgaaaactcgaacaacgaacgccgaccgacgtaaatatatacgtacgcgccgaactaaaaaccgaaacgaaacgaaccgcgcctcgcaccgcgaacgctacaattctcgacacccaaacaaataaccctctcgtaccaccgccgcccaaaacgaaccgcctactccgcaacccgattccccgaaaaatacgcgcctcgcaccctaaaaaccgaacatctaaaccccaacgaaactacgccgaaacacgaaaccgcccgactaaccgaaacaaacccgctaacgcaaccctcgacctaaaacctcacgacctacatcctacaccgaacccgcaacaccgaatctaacacgaccgc

SEQ ID NO: 36067 - DNA, 539 bp, Artificial Sequence
  chemically treated genomic DNA (Homo sapiens) CpG-island No: 36067
tagtcgtgcggttttcgtttagggaggtcgagtttttagttcgggtttagtcgggacgaagtttttttattattttcgagtttaggggttttcgtagtttcgggcggggcgaggggaacgtcgggggagggggttttttagtttttgtatcgtttttcgcgtttagttaaggtttgggtttggtacgggggttcgggtagcgggcgtcggtcggcgtgggtatgtgcgtgcgcgtcgggttgggggtcgggacgggacgggtcgcgtttcgtatcgcggacgttgtagttttcggtatttaggtagatggttttttcgtgttatcgtcgtttagagcgggtcgtttgtttcgtagttcggtttttcggggagtgcgcgtttcgtattttgagggtcgggtatttggattttagcggagttgcgtcgggatacgggatcgttcggttggtcgggataagttcgttggcgtagttttcggtttggggttttacggtttgtattttgtatcgggttcgtagtatcgaatttagtacgatcgt

SEQ ID NO: 36068 - DNA, 539 bp, Artificial Sequence
  chemically treated genomic DNA (Homo sapiens) CpG-island No: 36068
acgatcgtactaaattcgatactacgaacccgatacaaaatacaaaccgtaaaaccccaaaccgaaaactacgccaacgaacttatcccgaccaaccgaacgatcccgtatcccgacgcaactccgctaaaatccaaatacccgaccctcaaaatacgaaacgcgcactccccgaaaaaccgaactacgaaacaaacgacccgctctaaacgacgataacacgaaaaaaccatctacctaaataccgaaaactacaacgtccgcgatacgaaacgcgacccgtcccgtcccgacccccaacccgacgcgcacgcacatacccacgccgaccgacgcccgctacccgaacccccgtaccaaacccaaaccttaactaaacgcgaaaaacgatacaaaaactaaaaaaccccctcccccgacgttcccctcgccccgcccgaaactacgaaaacccctaaactcgaaaataataaaaaaacttcgtcccgactaaacccgaactaaaaactcgacctccctaaacgaaaaccgcacgacta

SEQ ID NO: 36069 - DNA, 712 bp, Artificial Sequence
  chemically treated genomic DNA (Homo sapiens) CpG-island No: 36069
ggacgatcggataggttttagtcgcgttaggtgtcgtttgggttggggttcgagacgcgtagggtgcgggagtcgtgtgcggttcgaggttagcgtcgtgtttcgaggtaggtgaggggatcggaatgttatttacgacgttcgtaggtttcgatattttaaggaggcgcgcgaggtttttggggagttcgttttaggtttcgttcgggtagtcgggtcggttcgtaggtttcggtcgcgagcgggcgcgtagggggaggggagggggcggtagcggtagtttcgttgattgggcggcgtttttataagttcgattttattcgttttgaatttcgaagagtgagagaagggaacgcgcgcgttcggtgggggaaggggtgcgcgcgtattcggggtttagtcgtacgcgggtcggcgcgaggcgttcggtcgtacgcgcggtcgcgggggcgcgcgcggtgggggtgtgaggaggaggaggcggcggcggaataggtcggggtaggtcgcgttcgttgtttttttttttgaagagagacgcggggggaggggggtgcggcgagcggttcgttttttttttatcgtttcgtcgtattttaggtgtaatgagggttagttagtttattttaattggtcgcgaggggcgcggggtacggtattagtgcgttggggtgggcggcgggtagcgcgagagaaggaggaggaggtggtt

SEQ ID NO: 36070 - DNA, 712 bp, Artificial Sequence
  chemically treated genomic DNA (Homo sapiens) CpG-island No: 36070
aaccacctcctcctccttctctcgcgctacccgccgcccaccccaacgcactaataccgtaccccgcgcccctcgcgaccaattaaaataaactaactaaccctcattacacctaaaatacgacgaaacgataaaaaaaaaacgaaccgctcgccgcacccccctccccccgcgtctctcttcaaaaaaaaaaacaacgaacgcgacctaccccgacctattccgccgccgcctcctcctcctcacacccccaccgcgcgcgcccccgcgaccgcgcgtacgaccgaacgcctcgcgccgacccgcgtacgactaaaccccgaatacgcgcgcaccccttcccccaccgaacgcgcgcgttcccttctctcactcttcgaaattcaaaacgaataaaatcgaacttataaaaacgccgcccaatcaacgaaactaccgctaccgccccctcccctccccctacgcgcccgctcgcgaccgaaacctacgaaccgacccgactacccgaacgaaacctaaaacgaactccccaaaaacctcgcgcgcctccttaaaatatcgaaacctacgaacgtcgtaaataacattccgatcccctcacctacctcgaaacacgacgctaacctcgaaccgcacacgactcccgcaccctacgcgtctcgaaccccaacccaaacgacacctaacgcgactaaaacctatccgatcgtcc

SEQ ID NO: 36071 - DNA, 712 bp, Artificial Sequence
  chemically treated genomic DNA (Homo sapiens) CpG-island No: 36071
ggttatttttttttttttttttcgcgttgttcgtcgtttattttagcgtattagtatcgtgtttcgcgtttttcgcggttagttggggtgagttggttgatttttattatatttggggtgcgacggagcggtggggagagagcgggtcgttcgtcgtattttttttttttcgcgtttttttttaggggagaaggtagcgagcgcgatttgtttcggtttatttcgtcgtcgtttttttttttttatatttttatcgcgcgcgttttcgcggtcgcgcgtgcgatcgagcgtttcgcgtcggttcgcgtgcggttgggtttcgagtgcgcgcgtatttttttttttatcgagcgcgcgcgttttttttttttatttttcggggtttagggcgggtgaagtcgggtttgtgagagcgtcgtttaattagcggagttgtcgttgtcgtttttttttttttttttgcgcgttcgttcgcggtcggggtttacgggtcggttcggttgttcgggcggggtttgaggcgggttttttaggggtttcgcgcgtttttttggagtgtcggggtttgcgggcgtcgtgggtggtatttcgatttttttatttatttcggggtacggcgttggtttcgggtcgtatacggttttcgtattttacgcgtttcgaattttaatttaggcggtatttggcgcggttgaggtttgttcgatcgttt

SEQ ID NO: 36072 - DNA, 712 bp, Artificial Sequence
  chemically treated genomic DNA (Homo sapiens) CpG-island No: 36072
aaacgatcgaacaaacctcaaccgcgccaaataccgcctaaattaaaattcgaaacgcgtaaaatacgaaaaccgtatacgacccgaaaccaacgccgtaccccgaaataaataaaaaaatcgaaataccacccacgacgcccgcaaaccccgacactccaaaaaaacgcgcgaaacccctaaaaaacccgcctcaaaccccgcccgaacaaccgaaccgacccgtaaaccccgaccgcgaacgaacgcgcaaaaaaaaaaaaaaaaacgacaacgacaactccgctaattaaacgacgctctcacaaacccgacttcacccgccctaaaccccgaaaaataaaaaaaaaaaacgcgcgcgctcgataaaaaaaaaaatacgcgcgcactcgaaacccaaccgcacgcgaaccgacgcgaaacgctcgatcgcacgcgcgaccgcgaaaacgcgcgcgataaaaatataaaaaaaaaaaaacgacgacgaaataaaccgaaacaaatcgcgctcgctaccttctcccctaaaaaaaaacgcgaaaaaaaaaaaatacgacgaacgacccgctctctccccaccgctccgtcgcaccccaaatataataaaaatcaaccaactcaccccaactaaccgcgaaaaacgcgaaacacgatactaatacgctaaaataaacgacgaacaacgcgaaaaaaaaaaaaaaaaataacc

SEQ ID NO: 36073 - DNA, 642 bp, Artificial Sequence
  chemically treated genomic DNA (Homo sapiens) CpG-island No: 36073
attcgagtttatcggcgcgttttttggttattcggtcgtgttgcggtttcggtttcgagcgacgttcggttttgggcgaggcgtcgcgtttttacgcgtaggttaaaggtaagaacgtgcggttggacggttattcgcgtcgggttatacggcgtaatagtttttgtaatggcgttacgtttacgtagcggtttattcggttgtacgagtaggtgcggttgcgtttggtggtcgtgcgtttttggttggagcggcgcgttgcgtttcggttttatcgcgtacgattcgtcgtttatgagcgtttaggatatttttaagtacgtttgttcggatttggttacgcggtcgggttattgggttaaggtattgttcgagaatttggcgttgcgcgatacggtgttggtttattgggtcgatcgttacggtcgcgtgttttatagcgtgaacgacggcgagtcggtgtttttttattgcggcgtggtcgtgggcggttcgttttgggcgtttattgatgtttacggtattatcgacgaggtgtagtttttgggtaggtcgcgggcgcggcgttttttggggatttggtagcggtgtttttgcgcgtgggtgtgtgttttattagtagttatagttatttatggagag

SEQ ID NO: 36074 - DNA, 642 bp, Artificial Sequence
  chemically treated genomic DNA (Homo sapiens) CpG-island No: 36074
ctctccataaataactataactactaataaaacacacacccacgcgcaaaaacaccgctaccaaatccccaaaaaacgccgcgcccgcgacctacccaaaaactacacctcgtcgataataccgtaaacatcaataaacgcccaaaacgaaccgcccacgaccacgccgcaataaaaaaacaccgactcgccgtcgttcacgctataaaacacgcgaccgtaacgatcgacccaataaaccaacaccgtatcgcgcaacgccaaattctcgaacaataccttaacccaataacccgaccgcgtaaccaaatccgaacaaacgtacttaaaaatatcctaaacgctcataaacgacgaatcgtacgcgataaaaccgaaacgcaacgcgccgctccaaccaaaaacgcacgaccaccaaacgcaaccgcacctactcgtacaaccgaataaaccgctacgtaaacgtaacgccattacaaaaactattacgccgtataacccgacgcgaataaccgtccaaccgcacgttcttacctttaacctacgcgtaaaaacgcgacgcctcgcccaaaaccgaacgtcgctcgaaaccgaaaccgcaacacgaccgaataaccaaaaaacgcgccgataaactcgaat

SEQ ID NO: 36075 - DNA, 642 bp, Artificial Sequence
  chemically treated genomic DNA (Homo sapiens) CpG-island No: 36075
ttttttataagtgattgtggttattaatgaaatatatatttacgcgtaaaggtatcgttgttaggtttttagggggcgtcgcgttcgcgatttatttagaagttgtatttcgtcggtgatgtcgtagatattaatgagcgtttagagcgggtcgtttacggttacgtcgtagtggaagagtatcggttcgtcgtcgtttacgttgtagaatacgcggtcgtggcggtcggtttagtaggttagtatcgtgtcgcgtagcgttaggttttcgggtagtgttttggtttagtagttcggtcgcgtgattaggttcgggtaggcgtatttggggatgttttgggcgtttatgagcgacggatcgtgcgcggtgaagtcgaagcgtagcgcgtcgttttagttaggggcgtacggttattaggcgtagtcgtatttgttcgtatagtcggatgggtcgttgcgtgaacgtgacgttattgtagaagttgttgcgtcgtgtggttcggcgcgagtggtcgtttagtcgtacgtttttgtttttggtttgcgcgtggaagcgcggcgtttcgtttaggatcgggcgtcgttcggggtcggggtcgtagtacggtcgggtggttaggaggcgcgtcggtgggttcgggt

SEQ ID NO: 36076 - DNA, 642 bp, Artificial Sequence
  chemically treated genomic DNA (Homo sapiens) CpG-island No: 36076
acccgaacccaccgacgcgcctcctaaccacccgaccgtactacgaccccgaccccgaacgacgcccgatcctaaacgaaacgccgcgcttccacgcgcaaaccaaaaacaaaaacgtacgactaaacgaccactcgcgccgaaccacacgacgcaacaacttctacaataacgtcacgttcacgcaacgacccatccgactatacgaacaaatacgactacgcctaataaccgtacgcccctaactaaaacgacgcgctacgcttcgacttcaccgcgcacgatccgtcgctcataaacgcccaaaacatccccaaatacgcctacccgaacctaatcacgcgaccgaactactaaaccaaaacactacccgaaaacctaacgctacgcgacacgatactaacctactaaaccgaccgccacgaccgcgtattctacaacgtaaacgacgacgaaccgatactcttccactacgacgtaaccgtaaacgacccgctctaaacgctcattaatatctacgacatcaccgacgaaatacaacttctaaataaatcgcgaacgcgacgccccctaaaaacctaacaacgatacctttacgcgtaaatatatatttcattaataaccacaatcacttataaaaaa

SEQ ID NO: 36077 - DNA, 515 bp, Artificial Sequence
  chemically treated genomic DNA (Homo sapiens) CpG-island No: 36077
attttcggtagtagtacgtcgttgtcgttagaaattatttgtcgtacgtcgcgaattcgttgggtgagcgggttattttgtgttttgtttattagcgttattagtttgtaatcgaggtttaaattgataggttcgattagcggaatggttttttaattgatttgttgttcgttggtttcggtgatggtgcgggttagcgtttcgaggtttttttttttcgttttcgtcgttagcggttgtttgtttattcgttagtcggtaaaattaagtagggcgttgaatagtaaaaacggtaggtgcggtattttcggtattatcgttagtacgaatataatttcggtggcggtgtagagtatcgacgggtttgttagtagttggttacgtacgttatgggcgatatcgtcgttgtcgttgacgcgggtgacgataatcgtcgtcgcggtggagagtagtagggaagggatttgcgattaaattaagagattcggttcgttcgaattggttattaggtatat

SEQ ID NO: 36078 - DNA, 515 bp, Artificial Sequence
  chemically treated genomic DNA (Homo sapiens) CpG-island No: 36078
atatacctaataaccaattcgaacgaaccgaatctcttaatttaatcgcaaatcccttccctactactctccaccgcgacgacgattatcgtcacccgcgtcaacgacaacgacgatatcgcccataacgtacgtaaccaactactaacaaacccgtcgatactctacaccgccaccgaaattatattcgtactaacgataataccgaaaataccgcacctaccgtttttactattcaacgccctacttaattttaccgactaacgaataaacaaacaaccgctaacgacgaaaacgaaaaaaaaaaacctcgaaacgctaacccgcaccatcaccgaaaccaacgaacaacaaatcaattaaaaaaccattccgctaatcgaacctatcaatttaaacctcgattacaaactaataacgctaataaacaaaacacaaaataacccgctcacccaacgaattcgcgacgtacgacaaataatttctaacgacaacgacgtactactaccgaaaat

SEQ ID NO: 36079 - DNA, 515 bp, Artificial Sequence
  chemically treated genomic DNA (Homo sapiens) CpG-island No: 36079
atgtgtttgatgattaattcgggcgaatcgggttttttggtttggtcgtagattttttttttgttgttttttatcgcggcggcgattatcgttattcgcgttagcgataacggcgatatcgtttatgacgtgcgtaattagttgttggtaagttcgtcggtgttttatatcgttatcgggattatgttcgtgttggcggtggtatcgggaatgtcgtatttgtcgtttttgttgtttagcgttttgtttggttttatcggttggcggatgagtaaatagtcgttggcggcggaggcggaagagaaaagtttcgaaacgttgattcgtattattatcgaaattagcgagtagtaggttagttgggaaattatttcgttgatcgagtttattagtttaagtttcggttataaattggtggcgttggtggataaagtatagggtaattcgtttatttagcggattcgcggcgtgcggtaggtgatttttgacggtaacggcgtgttgttgtcggagat

SEQ ID NO: 36080 - DNA, 515 bp, Artificial Sequence
  chemically treated genomic DNA (Homo sapiens) CpG-island No: 36080
atctccgacaacaacacgccgttaccgtcaaaaatcacctaccgcacgccgcgaatccgctaaataaacgaattaccctatactttatccaccaacgccaccaatttataaccgaaacttaaactaataaactcgatcaacgaaataatttcccaactaacctactactcgctaatttcgataataatacgaatcaacgtttcgaaacttttctcttccgcctccgccgccaacgactatttactcatccgccaaccgataaaaccaaacaaaacgctaaacaacaaaaacgacaaatacgacattcccgataccaccgccaacacgaacataatcccgataacgatataaaacaccgacgaacttaccaacaactaattacgcacgtcataaacgatatcgccgttatcgctaacgcgaataacgataatcgccgccgcgataaaaaacaacaaaaaaaaaatctacgaccaaaccaaaaaacccgattcgcccgaattaatcatcaaacacat

SEQ ID NO: 36081 - DNA, 738 bp, Artificial Sequence
  chemically treated genomic DNA (Homo sapiens) CpG-island No: 36081
gcgatagtcgttttttttacgcgacgttaaagataattaagttaataatataagtttttgtttgcgtagtaaattggttcgttatcgtattagggatcgtttagagcgtagtgacggtaatttttagttgcgcgtttgtagtaacgttaagcgtcgtcggtttcgttagcgggttacgtagtatttgttgaaatagtacgtttattagttttagattcgcgtttattagtagcgaaatcgttagacgcggtaataagttgtagtgaaaaattatttgttcgatgacgttaatattcggcgattaggtagtttgcgtttattggttacgcggtagcgtttgcgagaagtttatttaggtgagcgtcgtagcgataattattaatagcgttagtaataacgtcgggaaaagcgtaattcgtttatttacgttttattttcgatggcgttatttagaacgcgtataaagtgtattgtcgagagcgtcgtattataaaattagattgtaggtacgcgttgaaagcgttcggcgcggataaacggtatggtttgttatagcggcgttgttattagcgtatttatgtttttgttgttgtcgtgattaaaatagagtatattaacgtttttatacgtcgttagacgatcgatattgacggcggtattgttttagaagttggtttttttttgttaggtatttgggatgtcgtatttattaagaattttttggaataagttgtttgg

SEQ ID NO: 36082 - DNA, 738 bp, Artificial Sequence
  chemically treated genomic DNA (Homo sapiens) CpG-island No: 36082
ccaaacaacttattccaaaaaattcttaataaatacgacatcccaaatacctaacaaaaaaaaaccaacttctaaaacaataccgccgtcaatatcgatcgtctaacgacgtataaaaacgttaatatactctattttaatcacgacaacaacaaaaacataaatacgctaataacaacgccgctataacaaaccataccgtttatccgcgccgaacgctttcaacgcgtacctacaatctaattttataatacgacgctctcgacaatacactttatacgcgttctaaataacgccatcgaaaataaaacgtaaataaacgaattacgcttttcccgacgttattactaacgctattaataattatcgctacgacgctcacctaaataaacttctcgcaaacgctaccgcgtaaccaataaacgcaaactacctaatcgccgaatattaacgtcatcgaacaaataatttttcactacaacttattaccgcgtctaacgatttcgctactaataaacgcgaatctaaaactaataaacgtactatttcaacaaatactacgtaacccgctaacgaaaccgacgacgcttaacgttactacaaacgcgcaactaaaaattaccgtcactacgctctaaacgatccctaatacgataacgaaccaatttactacgcaaacaaaaacttatattattaacttaattatctttaacgtcgcgtaaaaaaaacgactatcgc

SEQ ID NO: 36083 - DNA, 738 bp, Artificial Sequence
  chemically treated genomic DNA (Homo sapiens) CpG-island No: 36083
ttaaatagtttgttttaggaaatttttgatgagtacggtattttaaatgtttggtaaggggaaattaatttttggggtagtatcgtcgttagtatcgatcgtttggcggcgtataaagacgttgatgtgttttgttttgattacgataatagtaaagatatggatgcgttaatggtaacgtcgttgtggtaggttatgtcgtttgttcgcgtcggacgtttttagcgcgtatttgtagtttggttttatggtgcgacgttttcggtaatgtattttgtgcgcgttttggataacgttatcggaggtaaagcgtgagtaaacgaattgcgtttttttcggcgttattgttggcgttgttagtgattgtcgttacggcgtttatttggatgaatttttcgtaggcgttgtcgcgtagttagtgggcgtaggttgtttggtcgtcggatattgacgttatcgagtagatgattttttattatagtttgttgtcgcgtttggcgatttcgttgttggtgggcgcgggtttggggttggtgggcgtgttgttttagtaagtgttgcgtaattcgttggcggagtcgacgacgtttggcgttgttataggcgcgtaattggggattatcgttattacgttttgggcgatttttggtgcgatggcgagttagtttgttgcgtaggtaggggtttgtgttgttggtttaattgtttttggcgtcgcgtgggggaaacggttgtcgt

SEQ ID NO: 36084 - DNA, 738 bp, Artificial Sequence
  chemically treated genomic DNA (Homo sapiens) CpG-island No: 36084
acgacaaccgtttcccccacgcgacgccaaaaacaattaaaccaacaacacaaacccctacctacgcaacaaactaactcgccatcgcaccaaaaatcgcccaaaacgtaataacgataatccccaattacgcgcctataacaacgccaaacgtcgtcgactccgccaacgaattacgcaacacttactaaaacaacacgcccaccaaccccaaacccgcgcccaccaacaacgaaatcgccaaacgcgacaacaaactataataaaaaatcatctactcgataacgtcaatatccgacgaccaaacaacctacgcccactaactacgcgacaacgcctacgaaaaattcatccaaataaacgccgtaacgacaatcactaacaacgccaacaataacgccgaaaaaaacgcaattcgtttactcacgctttacctccgataacgttatccaaaacgcgcacaaaatacattaccgaaaacgtcgcaccataaaaccaaactacaaatacgcgctaaaaacgtccgacgcgaacaaacgacataacctaccacaacgacgttaccattaacgcatccatatctttactattatcgtaatcaaaacaaaacacatcaacgtctttatacgccgccaaacgatcgatactaacgacgatactaccccaaaaattaatttccccttaccaaacatttaaaataccgtactcatcaaaaatttcctaaaacaaactatttaa

SEQ ID NO: 36085 - DNA, 540 bp, Artificial Sequence
  chemically treated genomic DNA (Homo sapiens) CpG-island No: 36085
tgcgtcgttatttgttagcgtcggggttgttcgcgtggacgcggttttttttttggcgtttgtttcgtttgaattttgtaaataaaattcgcggttttagtttcgttagtttgttgtattcgttgttttgcgagtcgtagcgcgcgttttcgggtattagagtttcgttgggcgtggggtcggagattcggattttcgtaattttgggtgttcgcggtttaatagttgatcggtttttttggatcgagggtttattgggtttttttttcgtcgtttttttgttttggtcgtagacggtgattttcggatcggttttggtcgagtttagtgtttgggtagggtttagggcgtacgggttgcgcgcgggttgtggatgtatgacgtcgaatggtttgggaattgatttggagaggagttttcggtggttaagttttcgtttcgtttttttgtcgtttttagttttatttcgcgagttcgggtattgttcggggttgggttttgggagaaagttttttcgttttgtttagtttagagggcgtt

SEQ ID NO: 36086 - DNA, 540 bp, Artificial Sequence
  chemically treated genomic DNA (Homo sapiens) CpG-island No: 36086
aacgccctctaaactaaacaaaacgaaaaaactttctcccaaaacccaaccccgaacaatacccgaactcgcgaaataaaactaaaaacgacaaaaaaacgaaacgaaaacttaaccaccgaaaactcctctccaaatcaattcccaaaccattcgacgtcatacatccacaacccgcgcgcaacccgtacgccctaaaccctacccaaacactaaactcgaccaaaaccgatccgaaaatcaccgtctacgaccaaaacaaaaaaacgacgaaaaaaaaacccaataaaccctcgatccaaaaaaaccgatcaactattaaaccgcgaacacccaaaattacgaaaatccgaatctccgaccccacgcccaacgaaactctaatacccgaaaacgcgcgctacgactcgcaaaacaacgaatacaacaaactaacgaaactaaaaccgcgaattttatttacaaaattcaaacgaaacaaacgccaaaaaaaaaaccgcgtccacgcgaacaaccccgacgctaacaaataacgacgca

SEQ ID NO: 36087 - DNA, 540 bp, Artificial Sequence
  chemically treated genomic DNA (Homo sapiens) CpG-island No: 36087
gacgttttttgagttgggtaaggcgagaggatttttttttagagtttagtttcgagtaatgttcgagttcgcgaggtggggttgggggcgataaggaggcggagcggggatttagttatcggggatttttttttaagttagtttttaaattattcggcgttatgtatttatagttcgcgcgtagttcgtgcgttttggattttatttaagtattaggttcgattagggtcggttcgaaggttatcgtttacggttagggtagaggggcggcgggaaaagggtttagtggattttcggtttaggagggtcggttagttgttgggtcgcgggtatttaaagttgcgggggttcgggttttcgattttacgtttagcggggttttagtattcgagggcgcgcgttgcgattcgtagagtagcgggtgtagtaggttggcggggttgggatcgcgagttttgtttgtaaagtttaggcggggtagacgttagggagggggtcgcgtttacgcgggtagtttcggcgttgataggtagcgacgta

SEQ ID NO: 36088 - DNA, 540 bp, Artificial Sequence
  chemically treated genomic DNA (Homo sapiens) CpG-island No: 36088
tacgtcgctacctatcaacgccgaaactacccgcgtaaacgcgaccccctccctaacgtctaccccgcctaaactttacaaacaaaactcgcgatcccaaccccgccaacctactacacccgctactctacgaatcgcaacgcgcgccctcgaatactaaaaccccgctaaacgtaaaatcgaaaacccgaacccccgcaactttaaatacccgcgacccaacaactaaccgaccctcctaaaccgaaaatccactaaacccttttcccgccgcccctctaccctaaccgtaaacgataaccttcgaaccgaccctaatcgaacctaatacttaaataaaatccaaaacgcacgaactacgcgcgaactataaatacataacgccgaataatttaaaaactaacttaaaaaaaaatccccgataactaaatccccgctccgcctccttatcgcccccaaccccacctcgcgaactcgaacattactcgaaactaaactctaaaaaaaaatcctctcgccttacccaactcaaaaaacgtc

SEQ ID NO: 36089 - DNA, 688 bp, Artificial Sequence
  chemically treated genomic DNA (Homo sapiens) CpG-island No: 36089
cgagtgggttcggagtagggttttgtcgcgaagggtttgggtttaacgttagagcgtggcgcgattttattttggttgtaacgagaggggtgaatgaagtgggcgtcggggattttttagaatcggagttttagacgcgggcgggttaggggtcgtcggaaaattgcgcgcgtttcgttttatttcgttcggtttcgcgtcgcgttttttttttttattgcgtagttttcggttgttttttgtcgtcgtcgggcggattttgtaagtttcgttgttttcgttttcgtatcgtttattttcgttttcggattggcggttttagaaatttttaggttatcggtttttcgttatcggattggttgcgttcgggtgttgaggttcggtttattttttcgggttttttgattacgcgtttgacggttttttcggggttcgggagttaatcgagggcgtttttgtcggggttgtagcggcgggaggtaaggtatggttaggtcggttgggttgtagagcgtcggtacgggtttacgtttcgggtgacgggtttttaggatgttcgggcgcggggcggtttattcgtattttttaatatttttattttcggtttgagttttttagcgtcgtgggaattattttttgttcgttgttgttggttcgtattttagtagcggtttgacgttttttttat

SEQ ID NO: 36090 - DNA, 688 bp, Artificial Sequence
  chemically treated genomic DNA (Homo sapiens) CpG-island No: 36090
ataaaaaaaacgtcaaaccgctactaaaatacgaaccaacaacaacgaacaaaaaataattcccacgacgctaaaaaactcaaaccgaaaataaaaatattaaaaaatacgaataaaccgccccgcgcccgaacatcctaaaaacccgtcacccgaaacgtaaacccgtaccgacgctctacaacccaaccgacctaaccataccttacctcccgccgctacaaccccgacaaaaacgccctcgattaactcccgaaccccgaaaaaaccgtcaaacgcgtaatcaaaaaacccgaaaaaataaaccgaacctcaacacccgaacgcaaccaatccgataacgaaaaaccgataacctaaaaatttctaaaaccgccaatccgaaaacgaaaataaacgatacgaaaacgaaaacaacgaaacttacaaaatccgcccgacgacgacaaaaaacaaccgaaaactacgcaataaaaaaaaaaaacgcgacgcgaaaccgaacgaaataaaacgaaacgcgcgcaattttccgacgacccctaacccgcccgcgtctaaaactccgattctaaaaaatccccgacgcccacttcattcacccctctcgttacaaccaaaataaaatcgcgccacgctctaacgttaaacccaaacccttcgcgacaaaaccctactccgaacccactcg

SEQ ID NO: 36091 - DNA, 688 bp, Artificial Sequence
  chemically treated genomic DNA (Homo sapiens) CpG-island No: 36091
gtggggagggcgttaggtcgttgttaggatgcgggttagtaatagcggataggaggtggtttttacggcgttgggaggtttaggtcggaggtgggggtgttgggggatgcggatgggtcgtttcgcgttcgaatattttggaagttcgttattcgaggcgtggattcgtgtcggcgttttgtagtttagtcggtttggttatgttttatttttcgtcgttgtagtttcgataggaacgttttcggttggttttcgggtttcggaaaagtcgttaggcgcgtgattaaaggattcggggaaatgggtcgggttttagtattcggacgtagttaattcggtagcggaaagtcggtggtttggagatttttggagtcgttaattcggaggcgggggtgggcggtgcgaaggcggggatagcggggtttgtagggttcgttcggcggcggtagggggtagtcgagggttgcgtagtgggggaggagaacgcgacgcggggtcggacggggtagggcggggcgcgcgtagtttttcggcggtttttggttcgttcgcgtttggagtttcgattttgggaggttttcggcgtttattttatttatttttttcgttgtagttagaatagggtcgcgttacgttttaacgttgagtttaggtttttcgcggtaagattttgtttcgggtttattcg

SEQ ID NO: 36092 - DNA, 688 bp, Artificial Sequence
  chemically treated genomic DNA (Homo sapiens) CpG-island No: 36092
cgaataaacccgaaacaaaatcttaccgcgaaaaacctaaactcaacgttaaaacgtaacgcgaccctattctaactacaacgaaaaaaataaataaaataaacgccgaaaacctcccaaaatcgaaactccaaacgcgaacgaaccaaaaaccgccgaaaaactacgcgcgccccgccctaccccgtccgaccccgcgtcgcgttctcctcccccactacgcaaccctcgactaccccctaccgccgccgaacgaaccctacaaaccccgctatccccgccttcgcaccgcccacccccgcctccgaattaacgactccaaaaatctccaaaccaccgactttccgctaccgaattaactacgtccgaatactaaaacccgacccatttccccgaatcctttaatcacgcgcctaacgacttttccgaaacccgaaaaccaaccgaaaacgttcctatcgaaactacaacgacgaaaaataaaacataaccaaaccgactaaactacaaaacgccgacacgaatccacgcctcgaataacgaacttccaaaatattcgaacgcgaaacgacccatccgcatcccccaacacccccacctccgacctaaacctcccaacgccgtaaaaaccacctcctatccgctattactaacccgcatcctaacaacgacctaacgccctccccac

SEQ ID NO: 36093 - DNA, 1262 bp, Artificial Sequence
  chemically treated genomic DNA (Homo sapiens) CpG-island No: 36093
atcgatcggtagggtttaggggcgggtggcgtgattttggtttattttcggtcgcggagacgcggcgtgattttggttaagttttcgtttttttattcgtagatttgcgcggttggatcgttcggttttcgtttcggtcgttaggcgttttgcgtcgttgtttttatttttttcggtttttttcgcgtattttattagttttacgtttacgttgtcggcgtagcggtcgtttggagtcgcgcgtttttttttttttagatgttggtttttatcgcgcgaattgggagggcgcgattcgcgaacgcggtttgcgttgcgagcgcgcggtcgtttcgtaggtcggtgtagttttacgtcgttgacgtatcgcgtttaagatggcggcgcggtcgtcgtcgggggtggcggcggtagagggggcggcggttttggcggtagcggagacggtagtcgtgacggtggtagcggcggcgcgggatttgggtttgggggaatgaggcggtcgcggcgggttagcggcggagtcgtgtagcggagaagttttttttttttgttttttttggtcgagtcgggggcgcgcgcgtacgcggtcgtttagagcgggttttttatttttcgatttttgcgattcgtatcgtatttttattcgggttcggaggatgatgaagtttaagtcgaattagattcgtatttacgacggcgacggttataagaagcgggtcgtatgtttgtgttttcgtagcgagagcgaggaggaggtgaggcggtaggttgggcgggtcggggtcgtcgggttttcggttttttcgggtggaggcgcgaggggcgcggtcgtcggaggagggtgtgttagggtcgtttcgttcgggcggaatgaagtttcgatggaattttttgaggcgaaaaaagggggaaggagaaaggacgttggggttgaggggaagcgggtttgagtgcggttgtatagggcgcgtcgggcggagggggtagtcggtttgtggtcggagcgtttcggtttcgtcgtttgttatcggggagagcggtcgcgggagaaggtagtgggttgggaagagtgcggttttcggtttaggttaacggttttgattttggaagggtcgtttcgtagttgttagttaggtatatgtgtgcggaggtcggcgtgtacgaggcgcgggtcggtttttgtggtagagaaatagtgtattttattggtaggtttggggtttgtcgagggattatatgtttgtgagtttaaagttgag

SEQ ID NO: 36094 - DNA, 1262 bp, Artificial Sequence
  chemically treated genomic DNA (Homo sapiens) CpG-island No: 36094
ctcaactttaaactcacaaacatataatccctcgacaaaccccaaacctaccaataaaatacactatttctctaccacaaaaaccgacccgcgcctcgtacacgccgacctccgcacacatatacctaactaacaactacgaaacgacccttccaaaatcaaaaccgttaacctaaaccgaaaaccgcactcttcccaacccactaccttctcccgcgaccgctctccccgataacaaacgacgaaaccgaaacgctccgaccacaaaccgactaccccctccgcccgacgcgccctatacaaccgcactcaaacccgcttcccctcaaccccaacgtcctttctccttcccccttttttcgcctcaaaaaattccatcgaaacttcattccgcccgaacgaaacgaccctaacacaccctcctccgacgaccgcgcccctcgcgcctccacccgaaaaaaccgaaaacccgacgaccccgacccgcccaacctaccgcctcacctcctcctcgctctcgctacgaaaacacaaacatacgacccgcttcttataaccgtcgccgtcgtaaatacgaatctaattcgacttaaacttcatcatcctccgaacccgaataaaaatacgatacgaatcgcaaaaatcgaaaaataaaaaacccgctctaaacgaccgcgtacgcgcgcgcccccgactcgaccaaaaaaaacaaaaaaaaaaaacttctccgctacacgactccgccgctaacccgccgcgaccgcctcattcccccaaacccaaatcccgcgccgccgctaccaccgtcacgactaccgtctccgctaccgccaaaaccgccgccccctctaccgccgccacccccgacgacgaccgcgccgccatcttaaacgcgatacgtcaacgacgtaaaactacaccgacctacgaaacgaccgcgcgctcgcaacgcaaaccgcgttcgcgaatcgcgccctcccaattcgcgcgataaaaaccaacatctaaaaaaaaaaaaacgcgcgactccaaacgaccgctacgccgacaacgtaaacgtaaaactaataaaatacgcgaaaaaaaccgaaaaaaataaaaacaacgacgcaaaacgcctaacgaccgaaacgaaaaccgaacgatccaaccgcgcaaatctacgaataaaaaaacgaaaacttaaccaaaatcacgccgcgtctccgcgaccgaaaataaaccaaaatcacgccacccgcccctaaaccctaccgatcgat

SEQ ID NO: 36095 - DNA, 1262 bp, Artificial Sequence
  chemically treated genomic DNA (Homo sapiens) CpG-island No: 36095
tttagttttgggtttatagatatataatttttcggtaaattttaaatttgttaatgaagtgtattatttttttgttataaaggtcggttcgcgtttcgtgtacgtcggttttcgtatatatgtgtttggttgataattgcggagcggtttttttaggattaaagtcgttggtttggatcgaaagtcgtattttttttagtttattgttttttttcgcggtcgtttttttcggtaataggcggcggaatcgaagcgtttcggttataagtcggttatttttttcgttcggcgcgttttgtgtagtcgtatttaaattcgtttttttttagttttaacgtttttttttttttttttttttttcgttttaggaaattttatcggaattttatttcgttcgagcggggcggttttggtatattttttttcggcggtcgcgtttttcgcgtttttattcgaaggggtcggagattcggcgatttcggttcgtttagtttgtcgttttatttttttttcgttttcgttgcggaaatataggtatgcggttcgttttttgtagtcgtcgtcgtcgtaggtgcgggtttggttcgatttgagttttattatttttcgggttcgggtgggggtgcggtgcgggtcgtaggagtcgaggggtggggagttcgttttggacggtcgcgtgcgcgcgcgttttcggttcggttaagggaagtagggagggggagttttttcgttatacggtttcgtcgttggttcgtcgcggtcgttttatttttttaggtttaggtttcgcgtcgtcgttgttatcgttacggttgtcgttttcgttgtcgttagggtcgtcgttttttttgtcgtcgttattttcgacgacgatcgcgtcgttattttgggcgcgatgcgttagcggcgtaaggttgtatcggtttgcgggacggtcgcgcgttcgtagcgtaggtcgcgttcgcgaatcgcgtttttttagttcgcgcggtggaaattagtatttgaaaggagagggacgcgcgattttaggcgatcgttacgtcggtagcgtaggcgtagaattggtggggtgcgcggaggaagtcgggggagataagaatagcggcgtaggacgtttagcggtcggagcggagatcgagcggtttagtcgcgtaagtttgcggatggggaagcggggatttggttaaggttacgtcgcgttttcgcggtcgaggatgaattaaggttacgttattcgtttttgggttttgtcggtcggt

SEQ ID NO: 36096 - DNA, 1262 bp, Artificial Sequence
  chemically treated genomic DNA (Homo sapiens) CpG-island No: 36096
accgaccgacaaaacccaaaaacgaataacgtaaccttaattcatcctcgaccgcgaaaacgcgacgtaaccttaaccaaatccccgcttccccatccgcaaacttacgcgactaaaccgctcgatctccgctccgaccgctaaacgtcctacgccgctattcttatctcccccgacttcctccgcgcaccccaccaattctacgcctacgctaccgacgtaacgatcgcctaaaatcgcgcgtccctctcctttcaaatactaatttccaccgcgcgaactaaaaaaacgcgattcgcgaacgcgacctacgctacgaacgcgcgaccgtcccgcaaaccgatacaaccttacgccgctaacgcatcgcgcccaaaataacgacgcgatcgtcgtcgaaaataacgacgacaaaaaaaacgacgaccctaacgacaacgaaaacgacaaccgtaacgataacaacgacgacgcgaaacctaaacctaaaaaaataaaacgaccgcgacgaaccaacgacgaaaccgtataacgaaaaaactccccctccctacttcccttaaccgaaccgaaaacgcgcgcgcacgcgaccgtccaaaacgaactccccacccctcgactcctacgacccgcaccgcacccccacccgaacccgaaaaataataaaactcaaatcgaaccaaacccgcacctacgacgacgacgactacaaaaaacgaaccgcatacctatatttccgcaacgaaaacgaaaaaaaaataaaacgacaaactaaacgaaccgaaatcgccgaatctccgaccccttcgaataaaaacgcgaaaaacgcgaccgccgaaaaaaaatataccaaaaccgccccgctcgaacgaaataaaattccgataaaatttcctaaaacgaaaaaaaaaaaaaaaaaaaaaaacgttaaaactaaaaaaaaacgaatttaaatacgactacacaaaacgcgccgaacgaaaaaaataaccgacttataaccgaaacgcttcgattccgccgcctattaccgaaaaaaacgaccgcgaaaaaaaacaataaactaaaaaaaatacgactttcgatccaaaccaacgactttaatcctaaaaaaaccgctccgcaattatcaaccaaacacatatatacgaaaaccgacgtacacgaaacgcgaaccgacctttataacaaaaaaataatacacttcattaacaaatttaaaatttaccgaaaaattatatatctataaacccaaaactaaa

SEQ ID NO: 36097 - DNA, 873 bp, Artificial Sequence
  chemically treated genomic DNA (Homo sapiens) CpG-island No: 36097
tcgggcgggatttcgggcgatagggttcggcgtttgtaagagcgagacggaggttcgggtaggtcggttgagttaattttttagagtcgaagtggaaggcgcgtttcgagcgttttttttttaggatttcggtgttttttttcgcgtttcgagttcgcgttttttttttttcgtttttagagcgtttttcgtttttttgttttttcgtagttcgttagacgagtcgatggcgcggtttcggagagttcgggagtcgttgttcgtggcgttgttgtcgttggcgtggttggcgtaggcgggtttggcgcgcgcggcgggttttgtgcgtttggcgggcggtttgacgttgggcggtttgttttcggtgtacgcgcggggcgcggcgggtcgggcgtgcgggtagttgaagaaggagtagggcgtgtatcggttggaggttatgttgtacgcgttggatcgcgttaacgtcgatttcgagttgttgttcggcgtgcgtttgggcgcgcggttgttggatatttgttcgcgggatatttacgcgttggagtaggcgttgagtttcgtgtaggcgttgattcgcggtcgcggcgacggcgacgaggtgggcgtgcgttgttcgggaggcgttttttcgttgcgtttcgcgtttttcgagcgcgtcgtggtcgtcgtgggcgtttcggttagtttcgtttttattatggtcgttaacgtgttgcgtttgtttgcggtgagggtcgcggggtcgggttcggtgtttagcgtttttttttcgttttcgttttggggtggtttaagttttttttttttattttttttgaaagagttttcgttttaattattcgaatttatatagcgttaaagaagttttgt

SEQ ID NO: 36098 - DNA, 873 bp, Artificial Sequence
  chemically treated genomic DNA (Homo sapiens) CpG-island No: 36098
acaaaacttctttaacgctatataaattcgaataattaaaacgaaaactctttcaaaaaaaataaaaaaaaaaaacttaaaccaccccaaaacgaaaacgaaaaaaaaacgctaaacaccgaacccgaccccgcgaccctcaccgcaaacaaacgcaacacgttaacgaccataataaaaacgaaactaaccgaaacgcccacgacgaccacgacgcgctcgaaaaacgcgaaacgcaacgaaaaaacgcctcccgaacaacgcacgcccacctcgtcgccgtcgccgcgaccgcgaatcaacgcctacacgaaactcaacgcctactccaacgcgtaaatatcccgcgaacaaatatccaacaaccgcgcgcccaaacgcacgccgaacaacaactcgaaatcgacgttaacgcgatccaacgcgtacaacataacctccaaccgatacacgccctactccttcttcaactacccgcacgcccgacccgccgcgccccgcgcgtacaccgaaaacaaaccgcccaacgtcaaaccgcccgccaaacgcacaaaacccgccgcgcgcgccaaacccgcctacgccaaccacgccaacgacaacaacgccacgaacaacgactcccgaactctccgaaaccgcgccatcgactcgtctaacgaactacgaaaaaacaaaaaaacgaaaaacgctctaaaaacgaaaaaaaaaaaacgcgaactcgaaacgcgaaaaaaaacaccgaaatcctaaaaaaaaaacgctcgaaacgcgccttccacttcgactctaaaaaattaactcaaccgacctacccgaacctccgtctcgctcttacaaacgccgaaccctatcgcccgaaatcccgcccga

SEQ ID NO: 36099 - DNA, 873 bp, Artificial Sequence
  chemically treated genomic DNA (Homo sapiens) CpG-island No: 36099
atagggtttttttgacgttgtgtgaattcgagtgattaaaacggagatttttttagaagaagtaaaggaaggagatttgggttattttagggcgaggacgggagagggacgttggatatcgagttcggtttcgcggtttttatcgtaaataggcgtagtacgttggcgattatgatggagacggagttggtcgaggcgtttacgacggttacgacgcgttcggggggcgcggggcgtagcggagggacgtttttcgggtagcgtacgtttatttcgtcgtcgtcgtcgcggtcgcggattagcgtttgtacgaagtttagcgtttgttttagcgcgtaggtgtttcgcgagtaggtgtttagtagtcgcgcgtttaggcgtacgtcgggtagtagttcggggtcggcgttgacgcggtttagcgcgtatagtatggtttttagtcggtgtacgttttgttttttttttagttgttcgtacgttcggttcgtcgcgtttcgcgcgtgtatcgggaataggtcgtttagcgttaggtcgttcgttaggcgtatagagttcgtcgcgcgcgttaggttcgtttgcgttagttacgttagcggtagtagcgttacgagtagcggttttcgggtttttcggggtcgcgttatcggttcgtttagcgggttgcggggagatagaggggcggggagcgttttgagggcgggggaaggagagcgcgggttcggggcgcggggagggatatcggggttttggggagaaggcgttcggggcgcgttttttatttcggttttggggagttagtttagtcggtttgttcgggttttcgtttcgtttttataagcgtcgaattttgtcgttcggggtttcgttcga

SEQ ID NO: 36100 - DNA, 873 bp, Artificial Sequence
  chemically treated genomic DNA (Homo sapiens) CpG-island No: 36100
tcgaacgaaaccccgaacgacaaaattcgacgcttataaaaacgaaacgaaaacccgaacaaaccgactaaactaactccccaaaaccgaaataaaaaacgcgccccgaacgccttctccccaaaaccccgatatccctccccgcgccccgaacccgcgctctccttcccccgccctcaaaacgctccccgcccctctatctccccgcaacccgctaaacgaaccgataacgcgaccccgaaaaacccgaaaaccgctactcgtaacgctactaccgctaacgtaactaacgcaaacgaacctaacgcgcgcgacgaactctatacgcctaacgaacgacctaacgctaaacgacctattcccgatacacgcgcgaaacgcgacgaaccgaacgtacgaacaactaaaaaaaaaacaaaacgtacaccgactaaaaaccatactatacgcgctaaaccgcgtcaacgccgaccccgaactactacccgacgtacgcctaaacgcgcgactactaaacacctactcgcgaaacacctacgcgctaaaacaaacgctaaacttcgtacaaacgctaatccgcgaccgcgacgacgacgacgaaataaacgtacgctacccgaaaaacgtccctccgctacgccccgcgccccccgaacgcgtcgtaaccgtcgtaaacgcctcgaccaactccgtctccatcataatcgccaacgtactacgcctatttacgataaaaaccgcgaaaccgaactcgatatccaacgtccctctcccgtcctcgccctaaaataacccaaatctccttcctttacttcttctaaaaaaatctccgttttaatcactcgaattcacacaacgtcaaaaaaaccctat

SEQ ID NO: 36101 - DNA, 636 bp, Artificial Sequence
  chemically treated genomic DNA (Homo sapiens) CpG-island No: 36101
tatagttcgatcgcgtttttcgttttcggcgttgtggttttttttcggatatcgtaagtggtggtgtcgtagcgacgtttgggaaatgaagttcggagggataaacgttggcggtttagttagggaaattcgtcggtttttcggcgcgtaggcgtagttgcgttcggtagcgacgggaaacgtttttgaattaggtgtttcgttcgttttttgtgcggtgtggagttgcgcgtttttcgtcgaggcgggtttaggtataggttgtcggtgagggcgggttcggggcgtgcggttgtcgcggcgggattaggacgagggttggtttttgcgcgtgtttgtcgagttttcggtttcgggcgttcgagtcggggcggtttcggtaggtgaattcggtttcggagggggcgtggtttgggaagggtttggcggaggtcgggagggcgtttcgacgtcgttggatttttgggtcgtagtttgggtcggatttcgggggaaacggttttagaatagaaattgtaaaatgtcgtttcggtttagggttcggagtttttcgggcggtttttcgtttttagtgtttgtgggtttaagtttttttttatttcgtttttcggagtttaaattttagatttattcgtt

SEQ ID NO: 36102 - DNA, 636 bp, Artificial Sequence
  chemically treated genomic DNA (Homo sapiens) CpG-island No: 36102
aacgaataaatctaaaatttaaactccgaaaaacgaaataaaaaaaaacttaaacccacaaacactaaaaacgaaaaaccgcccgaaaaactccgaaccctaaaccgaaacgacattttacaatttctattctaaaaccgtttcccccgaaatccgacccaaactacgacccaaaaatccaacgacgtcgaaacgccctcccgacctccgccaaacccttcccaaaccacgccccctccgaaaccgaattcacctaccgaaaccgccccgactcgaacgcccgaaaccgaaaactcgacaaacacgcgcaaaaaccaaccctcgtcctaatcccgccgcgacaaccgcacgccccgaacccgccctcaccgacaacctatacctaaacccgcctcgacgaaaaacgcgcaactccacaccgcacaaaaaacgaacgaaacacctaattcaaaaacgtttcccgtcgctaccgaacgcaactacgcctacgcgccgaaaaaccgacgaatttccctaactaaaccgccaacgtttatccctccgaacttcatttcccaaacgtcgctacgacaccaccacttacgatatccgaaaaaaaaccacaacgccgaaaacgaaaaacgcgatcgaactata

SEQ ID NO: 36103 - DNA, 636 bp, Artificial Sequence
  chemically treated genomic DNA (Homo sapiens) CpG-island No: 36103
aacgagtaaatttaaagtttaaatttcgggaaacggagtagggggaggtttaaatttataaatattaagagcgaaaaatcgttcggagggtttcggattttgaatcgaggcggtattttgtagtttttgttttggagtcgtttttttcggagttcggtttaggttgcggtttaggagtttagcggcgtcgaagcgttttttcggttttcgttaggttttttttaggttacgtttttttcggggtcgggtttatttgtcgaggtcgtttcggttcggacgttcggagtcggggattcggtagatacgcgtagaggttagttttcgttttggtttcgtcgcggtagtcgtacgtttcgggttcgtttttatcggtagtttgtatttgggttcgtttcggcggggggcgcgtagttttatatcgtataagaggcgagcggaatatttaatttagagacgtttttcgtcgttgtcgggcgtaattgcgtttgcgcgtcggagagtcgacgggtttttttggttgaatcgttagcgtttgttttttcggattttattttttagacgtcgttgcggtattattatttacggtgttcgagagagaattatagcgtcgagagcggagaacgcggtcgggttgtg

SEQ ID NO: 36104 - DNA, 636 bp, Artificial Sequence
  chemically treated genomic DNA (Homo sapiens) CpG-island No: 36104
cacaacccgaccgcgttctccgctctcgacgctataattctctctcgaacaccgtaaataataataccgcaacgacgtctaaaaaataaaatccgaaaaaacaaacgctaacgattcaaccaaaaaaacccgtcgactctccgacgcgcaaacgcaattacgcccgacaacgacgaaaaacgtctctaaattaaatattccgctcgcctcttatacgatataaaactacgcgccccccgccgaaacgaacccaaatacaaactaccgataaaaacgaacccgaaacgtacgactaccgcgacgaaaccaaaacgaaaactaacctctacgcgtatctaccgaatccccgactccgaacgtccgaaccgaaacgacctcgacaaataaacccgaccccgaaaaaaacgtaacctaaaaaaaacctaacgaaaaccgaaaaaacgcttcgacgccgctaaactcctaaaccgcaacctaaaccgaactccgaaaaaaacgactccaaaacaaaaactacaaaataccgcctcgattcaaaatccgaaaccctccgaacgatttttcgctcttaatatttataaatttaaacctccccctactccgtttcccgaaatttaaactttaaatttactcgtt

SEQ ID NO: 36105 - DNA, 2165 bp, Artificial Sequence
  chemically treated genomic DNA (Homo sapiens) CpG-island No: 36105
tacgcggggtgcggggtggcggtgatacggaggtaagttaggttagtattttttcggttggtaacggttttattgtataggtgcggggcgtcggggttcgcgcgtttagtttttttcggtttgttcgattttgacgtcgttagttagtaagtgttcgtcgtgttatttttttatgtgtttttttagggtgttgtagacgttgaagggtatttggtagatgtcgtagcggtatatttttttgtcgatttgttcgtgcgtttttatgtggcgcgtgagtttgttgttttgcgcgtacgcgtagttgtatagttcgtatttgtaaggtcgttcgtcggtgtggtttcgtcggtgtatcgttaagttgttgtagtttttgaatattttgtcgtagtattcgtacgtgtcgttgcggcggttttttttggagttgggtcgttcggggttcgggtcgtttaggtgcggggtgttgttttcgttggtcgtgtcgttgcggttcgagaggtcgtcgtttagtaggttttcgggcggcgtggagaagcgtaggttgtcgttttcggacgagtgttcggacgacgtggcgaagggcgattgtcgtgcgttcgtgaagtttaggaaggggttttttatgaagtgtcgcgacgtcgcgtagtttattagttattgcgagtatacgttttcggacgggatgagcgcggcgggcggtagttttaggtttttttttattttgatgcgtttggcggcgttgttgagttcggggttgggtagcggcgcgggtttgcgcgggaagagttcggggaagggttcggtgtttggcgcgaagtcgttttcgcgttcgttgatcgcgtcgttcgcgttcgcgttttcgtagtcgttcgcgtcgtcgtcgtcgttcgcgttttcgtcgttcgtcgtacgttttaggaaggcgtcgcgtttttgtttgtcggttaggagttcgtcgtattgcggtagtgcgtttaggtttacgttttttatgattttgtttagtattagcgttttttcgttagttagcgttttggtcgcgtcgtttttcgcgttcgggatttcgggtattttattatcgtcgttttcgcggttgcggtttagtttcgagtttatgttgaagttcgattcgggtcggttttcgttttttagtagtagttttttttttttttttttttttttttcgtttttttttttcggttcgtggtttagcgacgggtcgttttcgtggtggcggaagttatcgtcggtcgttttgaggttttcgttcgttagttcgttggtgtcgggttcgggggagttggcggtcgagagttcgtcgtcggagcggtcggttagcgagtcggttttgtgtatgtgcgtttttatgtggcgtttgagtttgttggtttgcgagtacgcgtggtcgtatagttggtatttgtagggtttttcgttcgtgtgattgcgtcggtgtacgatgagattgttttggaatttgaaggttttgtcgtagaattcgtacgatttgtttttggttggcggttgcgggggcggcgtgtcgttagggggtatgggcggtagcggcggcgtgtttaggaacggggatttggggttgggttggaaggggtttaggagtcggtgtatagggttgtcgcggttcggggatacgggcggcggcgtggagttgttgttcgttagttcgcggagtcgtcgcgagaagtttatggcgggcgagtcgatggttatggggtttaggcgtatgattcggtcgaaggtattggggtgttgggcgacgagttttattttttcggtattgaggcggtgcgggtttaggtggtggcgcggcgggggattgaagagaggcggcgtgttcggtaggcggttttcgtcgaagttcgggtggtttcgtaggatggggttcgttatgcgtagtaggttgaaggggttgttgtcgtttaggaaatttatgagcggggattgcgttacggttttcggttcgagcggcggcgggatggtgagtcgcggcgtgagcgagttgttggtcggttcgggttttaggtagatgcggaagtcgtgcgtgttttgcgcgtgttgtagtaggaattacgcgttgttgaagggttgtttgtatgttgtgtaaatgtagttggaaggtttatttttatttggggaaatatacg

SEQ ID NO: 36106 - DNA, 2165 bp, Artificial Sequence
  chemically treated genomic DNA (Homo sapiens) CpG-island No: 36106
cgtatatttccccaaataaaaataaaccttccaactacatttacacaacatacaaacaacccttcaacaacgcgtaattcctactacaacacgcgcaaaacacgcacgacttccgcatctacctaaaacccgaaccgaccaacaactcgctcacgccgcgactcaccatcccgccgccgctcgaaccgaaaaccgtaacgcaatccccgctcataaatttcctaaacgacaacaaccccttcaacctactacgcataacgaaccccatcctacgaaaccacccgaacttcgacgaaaaccgcctaccgaacacgccgcctctcttcaatcccccgccgcgccaccacctaaacccgcaccgcctcaataccgaaaaaataaaactcgtcgcccaacaccccaataccttcgaccgaatcatacgcctaaaccccataaccatcgactcgcccgccataaacttctcgcgacgactccgcgaactaacgaacaacaactccacgccgccgcccgtatccccgaaccgcgacaaccctatacaccgactcctaaaccccttccaacccaaccccaaatccccgttcctaaacacgccgccgctaccgcccataccccctaacgacacgccgcccccgcaaccgccaaccaaaaacaaatcgtacgaattctacgacaaaaccttcaaattccaaaacaatctcatcgtacaccgacgcaatcacacgaacgaaaaaccctacaaataccaactatacgaccacgcgtactcgcaaaccaacaaactcaaacgccacataaaaacgcacatacacaaaaccgactcgctaaccgaccgctccgacgacgaactctcgaccgccaactcccccgaacccgacaccaacgaactaacgaacgaaaacctcaaaacgaccgacgataacttccgccaccacgaaaacgacccgtcgctaaaccacgaaccgaaaaaaaaaaacgaaaaaaaaaaaaaaaaaaaaaaaaaactactactaaaaaacgaaaaccgacccgaatcgaacttcaacataaactcgaaactaaaccgcaaccgcgaaaacgacgataataaaatacccgaaatcccgaacgcgaaaaacgacgcgaccaaaacgctaactaacgaaaaaacgctaatactaaacaaaatcataaaaaacgtaaacctaaacgcactaccgcaatacgacgaactcctaaccgacaaacaaaaacgcgacgccttcctaaaacgtacgacgaacgacgaaaacgcgaacgacgacgacgacgcgaacgactacgaaaacgcgaacgcgaacgacgcgatcaacgaacgcgaaaacgacttcgcgccaaacaccgaacccttccccgaactcttcccgcgcaaacccgcgccgctacccaaccccgaactcaacaacgccgccaaacgcatcaaaataaaaaaaaacctaaaactaccgcccgccgcgctcatcccgtccgaaaacgtatactcgcaataactaataaactacgcgacgtcgcgacacttcataaaaaaccccttcctaaacttcacgaacgcacgacaatcgcccttcgccacgtcgtccgaacactcgtccgaaaacgacaacctacgcttctccacgccgcccgaaaacctactaaacgacgacctctcgaaccgcaacgacacgaccaacgaaaacaacaccccgcacctaaacgacccgaaccccgaacgacccaactccaaaaaaaaccgccgcaacgacacgtacgaatactacgacaaaatattcaaaaactacaacaacttaacgatacaccgacgaaaccacaccgacgaacgaccttacaaatacgaactatacaactacgcgtacgcgcaaaacaacaaactcacgcgccacataaaaacgcacgaacaaatcgacaaaaaaatataccgctacgacatctaccaaatacccttcaacgtctacaacaccctaaaaaaacacataaaaaaataacacgacgaacacttactaactaacgacgtcaaaatcgaacaaaccgaaaaaaactaaacgcgcgaaccccgacgccccgcacctatacaataaaaccgttaccaaccgaaaaaatactaacctaacttacctccgtatcaccgccaccccgcaccccgcgta

SEQ ID NO: 36107 - DNA, 2165 bp, Artificial Sequence
  chemically treated genomic DNA (Homo sapiens) CpG-island No: 36107
cgtgtgtttttttaggtaaagatgagttttttagttatatttgtataatatgtaagtagttttttaatagcgcgtggtttttgttgtagtacgcgtagaatacgtacggttttcgtatttatttggagttcgggtcggttagtagttcgtttacgtcgcggtttattatttcgtcgtcgttcgggtcggaggtcgtggcgtagttttcgtttatgaattttttgggcgatagtaatttttttaatttgttgcgtatgacgggttttattttgcgggattattcgggtttcggcgagggtcgtttgtcgggtacgtcgtttttttttagtttttcgtcgcgttattatttggattcgtatcgttttagtgtcgaggagatggggttcgtcgtttagtattttagtgttttcgatcgagttatgcgtttgaattttatggttatcgattcgttcgttatggatttttcgcggcggtttcgcgagttggcgggtaatagttttacgtcgtcgttcgtgttttcgggtcgcggtaattttatgtatcggtttttgaattttttttagtttagttttaagttttcgtttttgagtacgtcgtcgttgtcgtttatgttttttggcggtacgtcgttttcgtagtcgttagttaagagtaagtcgtgcgagttttgcggtaagatttttaagttttagagtaattttatcgtgtatcggcgtagttatacgggcgagaagttttataagtgttagttgtgcgattacgcgtgttcgtaggttagtaagtttaagcgttatatgaagacgtatatgtataaggtcggttcgttggtcggtcgtttcgacgacgggttttcggtcgttagttttttcgagttcggtattagcgagttggcgggcgagggttttaaggcggtcgacggtgattttcgttattacgagagcgattcgtcgttgggttacgagtcggaggaggaggacgaggaggaggaggaggaggaggaggagttgttattggagaacgagagtcggttcgagtcgagttttagtatggattcggagttgagtcgtaatcgcgagaacggcggtggtggggtgttcggggtttcgggcgcggggggcggcgcggttaaggcgttggttgacgagaaggcgttggtgttgggtaaggttatggagaacgtgggtttaggcgtattgtcgtagtacggcgagtttttggtcgataagtagaagcgcggcgtttttttgaagcgtgcggcgggcggcggggacgcgggcgacgacgacgacgcgggcggttgcggggacgcgggcgcgggcggcgcggttaacgggcgcgggggcggtttcgcgttaggtatcgagttttttttcgggtttttttcgcgtaagttcgcgtcgttgtttagtttcgggtttaatagcgtcgttaagcgtattaaggtggagaaggatttggagttgtcgttcgtcgcgtttatttcgttcgagaacgtgtattcgtagtggttggtgggttacgcggcgtcgcggtattttatgaaggatttttttttgggttttacggacgtacgatagtcgtttttcgttacgtcgttcgagtattcgttcgagaacggtagtttgcgtttttttacgtcgttcggggatttgttggacggcggtttttcgggtcgtagcggtacggttagcggaggtagtatttcgtatttgggcggttcgggtttcgggcggtttagttttaaggagggtcgtcgtagcgatacgtgcgagtattgcggtaaggtgtttaagaattgtagtaatttgacggtgtatcggcggagttatatcggcgagcggttttataagtgcgagttgtgtaattacgcgtgcgcgtagagtagtaagtttacgcgttatatgaagacgtacgggtagatcggtaaggaggtgtatcgttgcgatatttgttagatgttttttagcgtttatagtattttggagaaatatatgaaaaagtggtacggcgagtatttgttgattaacgacgttaaaatcgagtaggtcgagaggagttaagcgcgcgggtttcggcgtttcgtatttgtatagtggaatcgttgttaatcgagagaatgttgatttgatttgttttcgtgttatcgttatttcgtatttcgcgtg

SEQ ID NO: 36108 - DNA, 2165 bp, Artificial Sequence
  chemically treated genomic DNA (Homo sapiens) CpG-island No: 36108
cacgcgaaatacgaaataacgataacacgaaaacaaatcaaatcaacattctctcgattaacaacgattccactatacaaatacgaaacgccgaaacccgcgcgcttaactcctctcgacctactcgattttaacgtcgttaatcaacaaatactcgccgtaccactttttcatatatttctccaaaatactataaacgctaaaaaacatctaacaaatatcgcaacgatacacctccttaccgatctacccgtacgtcttcatataacgcgtaaacttactactctacgcgcacgcgtaattacacaactcgcacttataaaaccgctcgccgatataactccgccgatacaccgtcaaattactacaattcttaaacaccttaccgcaatactcgcacgtatcgctacgacgaccctccttaaaactaaaccgcccgaaacccgaaccgcccaaatacgaaatactacctccgctaaccgtaccgctacgacccgaaaaaccgccgtccaacaaatccccgaacgacgtaaaaaaacgcaaactaccgttctcgaacgaatactcgaacgacgtaacgaaaaacgactatcgtacgtccgtaaaacccaaaaaaaaatccttcataaaataccgcgacgccgcgtaacccaccaaccactacgaatacacgttctcgaacgaaataaacgcgacgaacgacaactccaaatccttctccaccttaatacgcttaacgacgctattaaacccgaaactaaacaacgacgcgaacttacgcgaaaaaaacccgaaaaaaaactcgatacctaacgcgaaaccgcccccgcgcccgttaaccgcgccgcccgcgcccgcgtccccgcaaccgcccgcgtcgtcgtcgtcgcccgcgtccccgccgcccgccgcacgcttcaaaaaaacgccgcgcttctacttatcgaccaaaaactcgccgtactacgacaatacgcctaaacccacgttctccataaccttacccaacaccaacgccttctcgtcaaccaacgccttaaccgcgccgccccccgcgcccgaaaccccgaacaccccaccaccgccgttctcgcgattacgactcaactccgaatccatactaaaactcgactcgaaccgactctcgttctccaataacaactcctcctcctcctcctcctcctcctcgtcctcctcctccgactcgtaacccaacgacgaatcgctctcgtaataacgaaaatcaccgtcgaccgccttaaaaccctcgcccgccaactcgctaataccgaactcgaaaaaactaacgaccgaaaacccgtcgtcgaaacgaccgaccaacgaaccgaccttatacatatacgtcttcatataacgcttaaacttactaacctacgaacacgcgtaatcgcacaactaacacttataaaacttctcgcccgtataactacgccgatacacgataaaattactctaaaacttaaaaatcttaccgcaaaactcgcacgacttactcttaactaacgactacgaaaacgacgtaccgccaaaaaacataaacgacaacgacgacgtactcaaaaacgaaaacttaaaactaaactaaaaaaaattcaaaaaccgatacataaaattaccgcgacccgaaaacacgaacgacgacgtaaaactattacccgccaactcgcgaaaccgccgcgaaaaatccataacgaacgaatcgataaccataaaattcaaacgcataactcgatcgaaaacactaaaatactaaacgacgaaccccatctcctcgacactaaaacgatacgaatccaaataataacgcgacgaaaaactaaaaaaaaacgacgtacccgacaaacgaccctcgccgaaacccgaataatcccgcaaaataaaacccgtcatacgcaacaaattaaaaaaattactatcgcccaaaaaattcataaacgaaaactacgccacgacctccgacccgaacgacgacgaaataataaaccgcgacgtaaacgaactactaaccgacccgaactccaaataaatacgaaaaccgtacgtattctacgcgtactacaacaaaaaccacgcgctattaaaaaactacttacatattatacaaatataactaaaaaactcatctttacctaaaaaaacacacg

SEQ ID NO: 36109 - DNA, 638 bp, Artificial Sequence
  chemically treated genomic DNA (Homo sapiens) CpG-island No: 36109
ttggcgtaggtcgagcggatggtggtcgcgcgtagtttttttgtgttttgttatcgcgttttcgttcggtgggttattcgcgcgttcggttcgcggcgtatttgatatttcgggtcgggggcgggagggacgttgtttcggtcgttagttttagtttttggagttcgatatcggttttaagtttcggttcgggcggtagcgagggatgcgtttttttttcggcgcggcgatttatttgtaggcgcgatttcgggtttcggcggcgtttattttcggcggttttaggcggtttttttttatttgattttataggaagcgcgcgtcggaggggcgcggtttagtggcggcgtatatcgttttttgtaggtcgtttgaggaattgtatttgttcggtttagggttgggggcggcgcggggtgttgggggtcggggagatggagcgtgggaaggagtgggaggtggggatggagagaaaagaggatgggaggagaagatacgtggaaaagaaggagaagaaggaggagggagaaaagaaggaaaaggaagcggcgtttacggaggaaaaatttagggggtgggggcgttttggtttgggaggaagggcgggcgtaggtttagatgattagtgttatgtttgt

SEQ ID NO: 36110 - DNA, 638 bp, Artificial Sequence
  chemically treated genomic DNA (Homo sapiens) CpG-island No: 36110
acaaacataacactaatcatctaaacctacgcccgcccttcctcccaaaccaaaacgcccccaccccctaaatttttcctccgtaaacgccgcttccttttccttcttttctccctcctccttcttctccttcttttccacgtatcttctcctcccatcctcttttctctccatccccacctcccactccttcccacgctccatctccccgacccccaacaccccgcgccgcccccaaccctaaaccgaacaaatacaattcctcaaacgacctacaaaaaacgatatacgccgccactaaaccgcgcccctccgacgcgcgcttcctataaaatcaaataaaaaaaaaccgcctaaaaccgccgaaaataaacgccgccgaaacccgaaatcgcgcctacaaataaatcgccgcgccgaaaaaaaaacgcatccctcgctaccgcccgaaccgaaacttaaaaccgatatcgaactccaaaaactaaaactaacgaccgaaacaacgtccctcccgcccccgacccgaaatatcaaatacgccgcgaaccgaacgcgcgaataacccaccgaacgaaaacgcgataacaaaacacaaaaaaactacgcgcgaccaccatccgctcgacctacgccaa

SEQ ID NO: 36111 - DNA, 638 bp, Artificial Sequence
  chemically treated genomic DNA (Homo sapiens) CpG-island No: 36111
gtaaatataatattggttatttgagtttgcgttcgtttttttttttaggttagggcgtttttattttttgggtttttttttcgtggacgtcgtttttttttttttttttttttttttttttttttttttttttttttttacgtgttttttttttttatttttttttttttttatttttattttttatttttttttacgttttattttttcgatttttagtatttcgcgtcgtttttaattttgggtcgggtaggtgtaattttttaggcggtttatagagggcgatgtgcgtcgttattgggtcgcgttttttcggcgcgcgttttttgtgaggttaggtgggaggaaatcgtttggagtcgtcgggagtggacgtcgtcgaggttcggagtcgcgtttgtaggtgagtcgtcgcgtcggggagggagcgtatttttcgttgtcgttcgggtcgggatttggagtcggtgtcgggttttagaggttggggttggcggtcggggtagcgtttttttcgttttcggttcggaatgttaggtgcgtcgcgggtcgggcgcgcgggtggtttatcgggcgggggcgcgatgataaagtataaagggattgcgcgcgattattattcgttcggtttgcgttag

SEQ ID NO: 36112 - DNA, 638 bp, Artificial Sequence
  chemically treated genomic DNA (Homo sapiens) CpG-island No: 36112
ctaacgcaaaccgaacgaataataatcgcgcgcaatccctttatactttatcatcgcgcccccgcccgataaaccacccgcgcgcccgacccgcgacgcacctaacattccgaaccgaaaacgaaaaaaacgctaccccgaccgccaaccccaacctctaaaacccgacaccgactccaaatcccgacccgaacgacaacgaaaaatacgctccctccccgacgcgacgactcacctacaaacgcgactccgaacctcgacgacgtccactcccgacgactccaaacgatttcctcccacctaacctcacaaaaaacgcgcgccgaaaaaacgcgacccaataacgacgcacatcgccctctataaaccgcctaaaaaattacacctacccgacccaaaattaaaaacgacgcgaaatactaaaaatcgaaaaaataaaacgtaaaaaaaaataaaaaataaaaataaaaaaaaaaaaaaataaaaaaaaaaaacacgtaaaaaaaaaaaaaaaaaaaaaaaaaaaaaaaaaaaaaaaaaaaaaaacgacgtccacgaaaaaaaaacccaaaaaataaaaacgccctaacctaaaaaaaaaaacgaacgcaaactcaaataaccaatattatatttac

SEQ ID NO: 36113 - DNA, 592 bp, Artificial Sequence
  chemically treated genomic DNA (Homo sapiens) CpG-island No: 36113
gcgtataagttgtggttcgttatgcgtagcgtttgagttagcgtttagatgtagttgtgggcgaagcgtagcgtttcgattttggtgagtttcgcgtcgtttgggaaggtgggtaggatatcgcgtagggcgtttagtgtcgagttgaggttgtgtattcgattgcgttcgcggtcgttggttttttttcgtcgatttcgtcgttgtttgtttagtgttaattcgtttttaagtcggttgcgtttttcgcgtcgtgttcggagttttttcggggtttttcggtagtttttttttttcgtttttgcgtagttttttcgtgtgcgagtggggttgggcggggcggacgtggggtaggttatttcgtttttcgaggttttggggaaggatcgtttcgttttacgggttatttggatagtgggcgtattcgagggttgaggcgttattttacggcggggttagagggaagggtaagtttgagttcgttattgggcgtagttcgcgatttcgaggttaggtgggaaaaaataaaaatagttatttttttagttttcgttgggttagaggattttttttttttttgttcgtttttcgg

SEQ ID NO: 36114 - DNA, 592 bp, Artificial Sequence
  chemically treated genomic DNA (Homo sapiens) CpG-island No: 36114
ccgaaaaacgaacaaaaaaaaaaaaaatcctctaacccaacgaaaactaaaaaaataactatttttattttttcccacctaacctcgaaatcgcgaactacgcccaataacgaactcaaacttacccttccctctaaccccgccgtaaaataacgcctcaaccctcgaatacgcccactatccaaataacccgtaaaacgaaacgatccttccccaaaacctcgaaaaacgaaataacctaccccacgtccgccccgcccaaccccactcgcacacgaaaaaactacgcaaaaacgaaaaaaaaaaactaccgaaaaaccccgaaaaaactccgaacacgacgcgaaaaacgcaaccgacttaaaaacgaattaacactaaacaaacaacgacgaaatcgacgaaaaaaaaccaacgaccgcgaacgcaatcgaatacacaacctcaactcgacactaaacgccctacgcgatatcctacccaccttcccaaacgacgcgaaactcaccaaaatcgaaacgctacgcttcgcccacaactacatctaaacgctaactcaaacgctacgcataacgaaccacaacttatacgc

SEQ ID NO: 36115 - DNA, 592 bp, Artificial Sequence
  chemically treated genomic DNA (Homo sapiens) CpG-island No: 36115
tcgagggacgggtaggggaaagagggattttttgatttagcgggggttgggaggatggttgtttttgtttttttttatttagtttcggaatcgcggattgcgtttagtgacggatttaaatttatttttttttttgatttcgtcgtaggatgacgttttaattttcgggtgcgtttattgtttaagtgattcgtgagacggagcggtttttttttagagtttcggaagacgaagtgatttgttttacgttcgtttcgtttagttttattcgtatacgggggaattgcgtagaggcggaagagggaggttgtcgaggggtttcgaggaagtttcgggtacggcgcgggggacgtagtcggtttaagagcgagttggtattgagtaagtagcgacggagtcggcgaaagaaggttaacgatcgcgagcgtaatcgaatgtataattttaattcggtattggacgttttgcgcggtgttttgtttatttttttagacgacgcgaagtttattaagatcgagacgttgcgtttcgtttataattatatttgggcgttgatttaaacgttgcgtatagcggattatagtttgtacgt

SEQ ID NO: 36116 - DNA, 592 bp, Artificial Sequence
  chemically treated genomic DNA (Homo sapiens) CpG-island No: 36116
acgtacaaactataatccgctatacgcaacgtttaaatcaacgcccaaatataattataaacgaaacgcaacgtctcgatcttaataaacttcgcgtcgtctaaaaaaataaacaaaacaccgcgcaaaacgtccaataccgaattaaaattatacattcgattacgctcgcgatcgttaaccttctttcgccgactccgtcgctacttactcaataccaactcgctcttaaaccgactacgtcccccgcgccgtacccgaaacttcctcgaaacccctcgacaacctccctcttccgcctctacgcaattcccccgtatacgaataaaactaaacgaaacgaacgtaaaacaaatcacttcgtcttccgaaactctaaaaaaaaaccgctccgtctcacgaatcacttaaacaataaacgcacccgaaaattaaaacgtcatcctacgacgaaatcaaaaaaaaaaataaatttaaatccgtcactaaacgcaatccgcgattccgaaactaaataaaaaaaaacaaaaacaaccatcctcccaacccccgctaaatcaaaaaatccctctttcccctacccgtccctcga

SEQ ID NO: 36117 - DNA, 516 bp, Artificial Sequence
  chemically treated genomic DNA (Homo sapiens) CpG-island No: 36117
gcgtgtcgtcgaggtgtgtatttttagcgatttcgtgttcggtagcgcggacgtatttgttcgtttttttcgttagggatttaattttttgggtttgggcgagaatcgacggcggggaggggttaggtgcgtagggggcggggatagggcgcggggcggggtttacgtgggtgacgcgcggttacgtttttattttgggatatattcggaagcggcgcggcgttttcggggaagatggtttttcggggttgaaggcggtggtgggggaaagtgagtgttttttcggggtcgggttttggcgttcggtgtgggacgggggtcggggacgtacggattttgggattttgggttttatggcggttgggagttgggggtcgggttgggcgttcgagtatttgattttcgagggggcgggcggggacgggtttttagttggacgtttttgtttttcggtgttagaatagaataaaattggggggtcggatttcggggatttaaaggggacgggtagagtgt

SEQ ID NO: 36118 - DNA, 516 bp, Artificial Sequence
  chemically treated genomic DNA (Homo sapiens) CpG-island No: 36118
acactctacccgtcccctttaaatccccgaaatccgaccccccaattttattctattctaacaccgaaaaacaaaaacgtccaactaaaaacccgtccccgcccgccccctcgaaaatcaaatactcgaacgcccaacccgacccccaactcccaaccgccataaaacccaaaatcccaaaatccgtacgtccccgacccccgtcccacaccgaacgccaaaacccgaccccgaaaaaacactcactttcccccaccaccgccttcaaccccgaaaaaccatcttccccgaaaacgccgcgccgcttccgaatatatcccaaaataaaaacgtaaccgcgcgtcacccacgtaaaccccgccccgcgccctatccccgccccctacgcacctaacccctccccgccgtcgattctcgcccaaacccaaaaaattaaatccctaacgaaaaaaacgaacaaatacgtccgcgctaccgaacacgaaatcgctaaaaatacacacctcgacgacacgc

SEQ ID NO: 36119 - DNA, 516 bp, Artificial Sequence
  chemically treated genomic DNA (Homo sapiens) CpG-island No: 36119
atattttattcgttttttttgggttttcggagttcggttttttaattttgttttgttttggtatcggagagtaggggcgtttagttgggaattcgttttcgttcgttttttcgagggttaggtgttcggacgtttagttcggtttttaatttttagtcgttatgaaatttaggattttagagttcgtgcgttttcgattttcgttttatatcggacgttagagttcggtttcggagaggtatttatttttttttattatcgtttttagtttcgaggggttatttttttcgagggcgtcgcgtcgttttcgggtgtgttttaaggtgggggcgtggtcgcgcgttatttacgtggatttcgtttcgcgttttgttttcgttttttgcgtatttggttttttttcgtcgtcggttttcgtttaggtttaggaagttgagtttttggcggggaggacgggtaggtgcgttcgcgttgtcgagtacgaagtcgttggaggtgtatatttcgacgatacgt

SEQ ID NO: 36120 - DNA, 516 bp, Artificial Sequence
  chemically treated genomic DNA (Homo sapiens) CpG-island No: 36120
acgtatcgtcgaaatatacacctccaacgacttcgtactcgacaacgcgaacgcacctacccgtcctccccgccaaaaactcaacttcctaaacctaaacgaaaaccgacgacgaaaaaaaaccaaatacgcaaaaaacgaaaacaaaacgcgaaacgaaatccacgtaaataacgcgcgaccacgcccccaccttaaaacacacccgaaaacgacgcgacgccctcgaaaaaaataacccctcgaaactaaaaacgataataaaaaaaaataaatacctctccgaaaccgaactctaacgtccgatataaaacgaaaatcgaaaacgcacgaactctaaaatcctaaatttcataacgactaaaaattaaaaaccgaactaaacgtccgaacacctaaccctcgaaaaaacgaacgaaaacgaattcccaactaaacgcccctactctccgataccaaaacaaaacaaaattaaaaaaccgaactccgaaaacccaaaaaaaacgaataaaatat

SEQ ID NO: 36121 - DNA, 629 bp, Artificial Sequence
  chemically treated genomic DNA (Homo sapiens) CpG-island No: 36121
acgttgttaatacgagtgatcgtttattttggttcgattatcgattattaatcgttatttattaatgtttcggagattttaggtacgttcgtttttgggggaggggagtagggagattcgtcggacgttttattttttttacgttattttcgtaggttgtgtgtggcgttacgttcgggttagcgttttttattgtttttatttgtttttattgtgcgattttaaggacgggtatttgttggtggacgggtgttacgttaataacgttttaggttagcgagttcgtcggcggttgggttttcggcgtgtttgagcgtgtttgtgcgtgtttgtgtttgtgtgttttatcgcgtaggttttttgtggcggtacgtgcgcgttagtatgacgttgtcgggttatttgttttcgttgtgcgattttaaggacgggtatttatttatggatggcggttatattaataatttgttaggtaagtggtcgttcgtattattcgtatacgtaagtatttttcgtattatatatacgtatacgcgtgggtatatatagataggttcgatgacgggatatatgtttaagttgtttatgtaggggtgtagatatatatgcgtatatatacgattatttgt

SEQ ID NO: 36122 - DNA, 629 bp, Artificial Sequence
  chemically treated genomic DNA (Homo sapiens) CpG-island No: 36122
acaaataatcgtatatatacgcatatatatctacacccctacataaacaacttaaacatatatcccgtcatcgaacctatctatatatacccacgcgtatacgtatatataatacgaaaaatacttacgtatacgaataatacgaacgaccacttacctaacaaattattaatataaccgccatccataaataaatacccgtccttaaaatcgcacaacgaaaacaaataacccgacaacgtcatactaacgcgcacgtaccgccacaaaaaacctacgcgataaaacacacaaacacaaacacgcacaaacacgctcaaacacgccgaaaacccaaccgccgacgaactcgctaacctaaaacgttattaacgtaacacccgtccaccaacaaatacccgtccttaaaatcgcacaataaaaacaaataaaaacaataaaaaacgctaacccgaacgtaacgccacacacaacctacgaaaataacgtaaaaaaaataaaacgtccgacgaatctccctactcccctcccccaaaaacgaacgtacctaaaatctccgaaacattaataaataacgattaataatcgataatcgaaccaaaataaacgatcactcgtattaacaacgt

SEQ ID NO: 36123 - DNA, 629 bp, Artificial Sequence
  chemically treated genomic DNA (Homo sapiens) CpG-island No: 36123
gtaagtgatcgtatgtgtgcgtatgtgtgtttgtatttttgtatgggtagtttgggtatgtgtttcgttatcgagtttgtttgtgtgtgtttacgcgtgtgcgtgtgtgtggtgcgggaggtgtttgcgtgtgcgggtggtgcgggcggttatttgtttggtagattgttgatgtagtcgttatttatgagtaggtgttcgtttttggggtcgtatagcgggggtaggtagttcgatagcgttatgttggcgcgtacgtatcgttatagggagtttgcgcggtgggatatatagatataaatacgtatagatacgtttagatacgtcggaggtttagtcgtcgacgggttcgttgatttgggacgttgttaacgtagtattcgtttattagtaggtgttcgtttttggggtcgtatagtgggggtaggtaggggtagtaggaggcgttggttcggacgtaacgttatatatagtttgcggggatggcgtgaggggggtaaggcgttcgacgagtttttttgttttttttttttaaggacggacgtatttggggttttcggggtattagtgggtggcggttagtggtcggtgatcgggttagggtggacggttattcgtgttaataacgt

SEQ ID NO: 36124 - DNA, 629 bp, Artificial Sequence
  chemically treated genomic DNA (Homo sapiens) CpG-island No: 36124
acgttattaacacgaataaccgtccaccctaacccgatcaccgaccactaaccgccacccactaataccccgaaaaccccaaatacgtccgtccttaaaaaaaaaaaacaaaaaaactcgtcgaacgccttacccccctcacgccatccccgcaaactatatataacgttacgtccgaaccaacgcctcctactacccctacctacccccactatacgaccccaaaaacgaacacctactaataaacgaatactacgttaacaacgtcccaaatcaacgaacccgtcgacgactaaacctccgacgtatctaaacgtatctatacgtatttatatctatatatcccaccgcgcaaactccctataacgatacgtacgcgccaacataacgctatcgaactacctacccccgctatacgaccccaaaaacgaacacctactcataaataacgactacatcaacaatctaccaaacaaataaccgcccgcaccacccgcacacgcaaacacctcccgcaccacacacacgcacacgcgtaaacacacacaaacaaactcgataacgaaacacatacccaaactacccatacaaaaatacaaacacacatacgcacacatacgatcacttac

SEQ ID NO: 36125 - DNA, 500 bp, Artificial Sequence
  chemically treated genomic DNA (Homo sapiens) CpG-island No: 36125
agaaaaaaagagattaggagtttcgtcgttttaggtgggagatatagttcgttcgtttgagttcggggttttacggtgtcgttcgcgtttttatttgagtcgcgcggattcgtcggggttgttatgttggggcgggagcgcgtgacgggcgtcgtacggcggggtagtttgggttcgatcgttcgcgttgttattgcgatttcgttttttcgcggcgcggttttaaatttttcggtattagttgatttgtgtttcggttacgtgattcggtagtttagagttttttacgtgatcgtttttggtttcgttttttgcgttacgataatttttgtcggaatagcgcgtatgtgtttttgtcggcgttttttgggtcgaaggtagtcgttaggttttagcgtcgacgcgttttgggtggcgggggatgggttgattttgagtttggtaacgacgagttttgttttggttttcggttatgtttcgaattcggtgttaggtttgtg

SEQ ID NO: 36126 - DNA, 500 bp, Artificial Sequence
  chemically treated genomic DNA (Homo sapiens) CpG-island No: 36126
cacaaacctaacaccgaattcgaaacataaccgaaaaccaaaacaaaactcgtcgttaccaaactcaaaatcaacccatcccccgccacccaaaacgcgtcgacgctaaaacctaacgactaccttcgacccaaaaaacgccgacaaaaacacatacgcgctattccgacaaaaattatcgtaacgcaaaaaacgaaaccaaaaacgatcacgtaaaaaactctaaactaccgaatcacgtaaccgaaacacaaatcaactaataccgaaaaatttaaaaccgcgccgcgaaaaaacgaaatcgcaataacaacgcgaacgatcgaacccaaactaccccgccgtacgacgcccgtcacgcgctcccgccccaacataacaaccccgacgaatccgcgcgactcaaataaaaacgcgaacgacaccgtaaaaccccgaactcaaacgaacgaactatatctcccacctaaaacgacgaaactcctaatctctttttttct

SEQ ID NO: 36127 - DNA, 500 bp, Artificial Sequence
  chemically treated genomic DNA (Homo sapiens) CpG-island No: 36127
tataagtttggtatcggattcggggtatggtcgggagttagggtagagttcgtcgttgttaaatttagagttagtttatttttcgttatttagagcgcgtcggcgttaggatttagcgattgttttcgatttagagggcgtcggtagaggtatatgcgcgttgtttcggtaggggttgtcgtggcgtagggggcgggattagaggcggttacgtgaggggttttgggttatcgggttacgtgatcgaggtatagattagttgatgtcggagggtttgaagtcgcgtcgcgagggagcgaggtcgtagtgatagcgcgggcgatcggatttaggttgtttcgtcgtacggcgttcgttacgcgttttcgttttagtatgatagtttcggcgggttcgcgcggtttaggtgagggcgcgggcggtatcgtggggtttcgaatttaggcgggcgggttgtgttttttatttggggcggcggagtttttagttttttttttttt

SEQ ID NO: 36128 - DNA, 500 bp, Artificial Sequence
  chemically treated genomic DNA (Homo sapiens) CpG-island No: 36128
aaaaaaaaaaaaactaaaaactccgccgccccaaataaaaaacacaacccgcccgcctaaattcgaaaccccacgataccgcccgcgccctcacctaaaccgcgcgaacccgccgaaactatcatactaaaacgaaaacgcgtaacgaacgccgtacgacgaaacaacctaaatccgatcgcccgcgctatcactacgacctcgctccctcgcgacgcgacttcaaaccctccgacatcaactaatctatacctcgatcacgtaacccgataacccaaaacccctcacgtaaccgcctctaatcccgccccctacgccacgacaacccctaccgaaacaacgcgcatatacctctaccgacgccctctaaatcgaaaacaatcgctaaatcctaacgccgacgcgctctaaataacgaaaaataaactaactctaaatttaacaacgacgaactctaccctaactcccgaccataccccgaatccgataccaaacttata

SEQ ID NO: 36129 - DNA, 709 bp, Artificial Sequence
  chemically treated genomic DNA (Homo sapiens) CpG-island No: 36129
  unsure (606, 674, 690)
cggattgcgggcgagtttttcgtcgtagtttcgggttgagttagtatcgtcgtacgtatagcggcgagaagtcgtatcgttgtttcgattgcgggaagttttttagttacggtgttattttggtttagtatcgtggtatttatattggggcgcggtcgtattagtgcgcggtttgcggtaaggttttcggtggcgttttacgttgttgaaatatcgtagtagttatagcgaggagaagtcgtattattgttcggtgtgtggtaaggttttcgggtacggttcgtttttggtatagtatttgcgtacgtacggcggttcgcggatttataagtgttcggtgtgcgttaagggtttcggttagggttttgcgttgtttaaatatttgcgtattatacgggcgagcggttttattcgtgttcgtagtgcgtaaggttttcgggtagagttcggcgttgttgtagtattagcgtatatatacggtcgagcgttttatcgttgttttattgcggtaaagtttcgggtagagttttaatttgtaatattatttgcgtatttatacgggcgagcggtttacgtttgttcgtattgttttaagggtttcggagnagtttagcgttgttttagtatttgtacgtgtattcgggcgagcgtttttatcgttgttagttttgcgngaagatttttcgaggnttttttagtttattaagta

SEQ ID NO: 36130 - DNA, 709 bp, Artificial Sequence
  chemically treated genomic DNA (Homo sapiens) CpG-island No: 36130
  unsure (20, 36, 104)
tacttaataaactaaaaaancctcgaaaaatcttcncgcaaaactaacaacgataaaaacgctcgcccgaatacacgtacaaatactaaaacaacgctaaactnctccgaaacccttaaaacaatacgaacaaacgtaaaccgctcgcccgtataaatacgcaaataatattacaaattaaaactctacccgaaactttaccgcaataaaacaacgataaaacgctcgaccgtatatatacgctaatactacaacaacgccgaactctacccgaaaaccttacgcactacgaacacgaataaaaccgctcgcccgtataatacgcaaatatttaaacaacgcaaaaccctaaccgaaacccttaacgcacaccgaacacttataaatccgcgaaccgccgtacgtacgcaaatactataccaaaaacgaaccgtacccgaaaaccttaccacacaccgaacaataatacgacttctcctcgctataactactacgatatttcaacaacgtaaaacgccaccgaaaaccttaccgcaaaccgcgcactaatacgaccgcgccccaatataaataccacgatactaaaccaaaataacaccgtaactaaaaaacttcccgcaatcgaaacaacgatacgacttctcgccgctatacgtacgacgatactaactcaacccgaaactacgacgaaaaactcgcccgcaatccg

SEQ ID NO: 36131 - DNA, 709 bp, Artificial Sequence
  chemically treated genomic DNA (Homo sapiens) CpG-island No: 36131
  unsure (20, 36, 104)
tgtttggtgagttggaaagntttcggaaggtttttncgtagagttgatagcgatagggacgttcgttcgaatgtacgtgtaggtgttggagtagcgttgagttntttcgaagtttttggagtagtgcgggtaggcgtaggtcgttcgttcgtgtgaatgcgtaggtggtgttgtaagttggagttttgttcgaagttttgtcgtagtggggtagcggtagggcgttcggtcgtgtgtgtgcgttggtgttgtagtagcgtcgagttttgttcgaaggttttgcgtattgcggatacgggtagggtcgttcgttcgtgtggtgcgtaggtgtttgagtagcgtagagttttggtcgaagtttttggcgtatatcgggtatttgtgggttcgcgggtcgtcgtgcgtgcgtaggtgttgtgttaggagcgagtcgtgttcgaaggttttgttatatatcgggtagtggtgcggttttttttcgttgtggttgttgcgatgttttagtagcgtggagcgttatcgaaggttttgtcgtaggtcgcgtattggtacggtcgcgttttagtgtggatgttacggtgttgagttagggtggtatcgtggttgaaggatttttcgtagtcggggtagcggtacggtttttcgtcgttgtgcgtgcggcgatgttggtttagttcggagttgcggcggaaggttcgttcgtaattcg

SEQ ID NO: 36132 - DNA, 709 bp, Artificial Sequence
  chemically treated genomic DNA (Homo sapiens) CpG-island No: 36132
  unsure (606, 674, 690)
cgaattacgaacgaaccttccgccgcaactccgaactaaaccaacatcgccgcacgcacaacgacgaaaaaccgtaccgctaccccgactacgaaaaatccttcaaccacgataccaccctaactcaacaccgtaacatccacactaaaacgcgaccgtaccaatacgcgacctacgacaaaaccttcgataacgctccacgctactaaaacatcgcaacaaccacaacgaaaaaaaaccgcaccactacccgatatataacaaaaccttcgaacacgactcgctcctaacacaacacctacgcacgcacgacgacccgcgaacccacaaatacccgatatacgccaaaaacttcgaccaaaactctacgctactcaaacacctacgcaccacacgaacgaacgaccctacccgtatccgcaatacgcaaaaccttcgaacaaaactcgacgctactacaacaccaacgcacacacacgaccgaacgccctaccgctaccccactacgacaaaacttcgaacaaaactccaacttacaacaccacctacgcattcacacgaacgaacgacctacgcctacccgcactactccaaaaacttcgaaanaactcaacgctactccaacacctacacgtacattcgaacgaacgtccctatcgctatcaactctacgnaaaaaccttccgaaanctttccaactcaccaaaca

SEQ ID NO: 36133 - DNA, 517 bp, Artificial Sequence
  chemically treated genomic DNA (Homo sapiens) CpG-island No: 36133
  unsure (241)
cgttttttgcgggcgtatttttatatttgtttaggtcgattcgtaagcgagaggagggggtattagagttagggcgagagcgtttcgcgcgtgtgtgttcgtgttatgtgtggtgttcgtgttatgtgcggcgtttatgtttatgtgcgcgcgtgtgtgtatttatgtttttgtatggtgtgatattcgtgtttgcgtgcgcgtttatacgtgagtcgaggacgtagttagcgtttagcgntttatagcgggtgcgttggattagattttaaggtattagattaaatttggagcgtttgttataagggtagaagatcggcgtgatttttttacgcgcgttagtcggtgttgttggtggagggaattgatatttaacgtatgtggtttaggagaataaaattttttattgtattttacgtcgcgattttttttagcgaaaggtgttttttttggaagatcgtacgaagtaaggaagagtttttttttttttttttggatatttttttaggaatattag

SEQ ID NO: 36134 - DNA, 517 bp, Artificial Sequence
  chemically treated genomic DNA (Homo sapiens) CpG-island No: 36134
  unsure (277)
ctaatattcctaaaaaaatatccaaaaaaaaaaaaaaaaactcttccttacttcgtacgatcttccaaaaaaaacacctttcgctaaaaaaaatcgcgacgtaaaatacaataaaaaattttattctcctaaaccacatacgttaaatatcaattccctccaccaacaacaccgactaacgcgcgtaaaaaaatcacgccgatcttctacccttataacaaacgctccaaatttaatctaataccttaaaatctaatccaacgcacccgctataaancgctaaacgctaactacgtcctcgactcacgtataaacgcgcacgcaaacacgaatatcacaccatacaaaaacataaatacacacacgcgcgcacataaacataaacgccgcacataacacgaacaccacacataacacgaacacacacgcgcgaaacgctctcgccctaactctaataccccctcctctcgcttacgaatcgacctaaacaaatataaaaatacgcccgcaaaaaacg

SEQ ID NO: 36135 - DNA, 517 bp, Artificial Sequence
  chemically treated genomic DNA (Homo sapiens) CpG-island No: 36135
  unsure (277)
ttaatatttttggagggatatttaggaagaggaaaagaggtttttttttatttcgtgcggttttttaaaagaagtatttttcgttggggagagtcgcggcgtggggtgtaatggaaggttttgtttttttgggttatatgcgttagatgttagttttttttattagtagtatcggttggcgcgcgtggggagattacgtcggttttttgtttttgtaataaacgttttagatttggtttggtgttttagggtttggtttagcgtattcgttgtgaancgttaggcgttaattgcgttttcggtttacgtgtggacgcgtacgtagatacgagtgttatattatatagagatatgggtgtatatacgcgcgtatatagatatgggcgtcgtatatgatacgggtattatatatgatacgggtatatacgcgcgaagcgttttcgttttggttttaatgtttttttttttcgtttgcggatcggtttgggtaggtgtgggggtacgttcgtagaaagcg

SEQ ID NO: 36136 - DNA, 517 bp, Artificial Sequence
  chemically treated genomic DNA (Homo sapiens) CpG-island No: 36136
  unsure (241)
cgctttctacgaacgtacccccacacctacccaaaccgatccgcaaacgaaaaaaaaaaacattaaaaccaaaacgaaaacgcttcgcgcgtatatacccgtatcatatataatacccgtatcatatacgacgcccatatctatatacgcgcgtatatacacccatatctctatataatataacactcgtatctacgtacgcgtccacacgtaaaccgaaaacgcaattaacgcctaacgnttcacaacgaatacgctaaaccaaaccctaaaacaccaaaccaaatctaaaacgtttattacaaaaacaaaaaaccgacgtaatctccccacgcgcgccaaccgatactactaataaaaaaaactaacatctaacgcatataacccaaaaaaacaaaaccttccattacaccccacgccgcgactctccccaacgaaaaatacttcttttaaaaaaccgcacgaaataaaaaaaaacctcttttcctcttcctaaatatccctccaaaaatattaa

SEQ ID NO: 36137 - DNA, 525 bp, Artificial Sequence
  chemically treated genomic DNA (Homo sapiens) CpG-island No: 36137
gtggtgatggggcgtgtaggtgttgttttgtgtttgagtttcgtggtgatgggtcgtggagcgggtgttgtgtgtgacgtggtgatggggcgtgtagtgttgttttgtgtgtgatttcgtggtgatggggcgtgtagtgttgttgtgtgtgagtttcgtggtgatggggcgtgtagtgttgttttgtgtgtgagtttcgtggtgatggggtcgtgtagtgttgttttgtgtttgagtttcgtggtgatggggttgtgtagcgtgttgttttgtgtgtgagttcgtggtggtggggcgtgtagcggtgttgttttgtgtgtgagttcgtggtggtggggcgtgtaggtgttgtttgtgtttgagttcgtggtgatggggcgtgtagcgggtgttgttttgtgtgtgagtttcgtggtgatggggcgtgtagcgggtgttgttttgtgtgtgagtttcgtggtggtggggttgtggagtaggtgttgttttgtgtgtgagtttttggtggtggggttatgtagcggg

SEQ ID NO: 36138 - DNA, 525 bp, Artificial Sequence
  chemically treated genomic DNA (Homo sapiens) CpG-island No: 36138
cccgctacataaccccaccaccaaaaactcacacacaaaacaacacctactccacaaccccaccaccacgaaactcacacacaaaacaacacccgctacacgccccatcaccacgaaactcacacacaaaacaacacccgctacacgccccatcaccacgaactcaaacacaaacaacacctacacgccccaccaccacgaactcacacacaaaacaacaccgctacacgccccaccaccacgaactcacacacaaaacaacacgctacacaaccccatcaccacgaaactcaaacacaaaacaacactacacgaccccatcaccacgaaactcacacacaaaacaacactacacgccccatcaccacgaaactcacacacaacaacactacacgccccatcaccacgaaatcacacacaaaacaacactacacgccccatcaccacgtcacacacaacacccgctccacgacccatcaccacgaaactcaaacacaaaacaacacctacacgccccatcaccac

SEQ ID NO: 36139 - DNA, 525 bp, Artificial Sequence
  chemically treated genomic DNA (Homo sapiens) CpG-island No: 36139
ttcgttatatgattttattattaagaatttatatataaaatagtatttgttttataattttattattacgaagtttatatataaaatagtattcgttatacgttttattattacgaagtttatatatagaatagtattcgttatacgttttattattacgaatttagatataaatagtatttatacgttttattattacgaatttatatatagaatagtatcgttatacgttttattattacgaatttatatatagaatagtacgttatatagttttattattacgaagtttagatatagaatagtattatacggttttattattacgaagtttatatatagaatagtattatacgttttattattacgaagtttatatataatagtattatacgttttattattacgaagttatatatagaatagtattatacgttttattattacgttatatataatattcgttttacgatttattattacgaagtttagatatagaatagtatttatacgttttattattat

SEQ ID NO: 36140 - DNA, 525 bp, Artificial Sequence
  chemically treated genomic DNA (Homo sapiens) CpG-island No: 36140
ataataataaaacgtataaatactattctatatctaaacttcgtaataataaatcgtaaaacgaatattatatataacgtaataataaaacgtataatactattctatatataacttcgtaataataaaacgtataatactattatatataaacttcgtaataataaaacgtataatactattctatatataaacttcgtaataataaaaccgtataatactattctatatctaaacttcgtaataataaaactatataacgtactattctatatataaattcgtaataataaaacgtataacgatactattctatatataaattcgtaataataaaacgtataaatactatttatatctaaattcgtaataataaaacgtataacgaatactattctatatataaacttcgtaataataaaacgtataacgaatactattttatatataaacttcgtaataataaaattataaaacaaatactattttatatataaattcttaataataaaatcatataacgaa

SEQ ID NO: 36141 - DNA, 536 bp, Artificial Sequence
  chemically treated genomic DNA (Homo sapiens) CpG-island No: 36141
  unsure (147..148, 204, 227, 242..243, 254, 308, 317..318, 327..328)
  unsure (348..349, 351..352, 484..485, 487..488, 520)
tcgaggagacgaagaggaggtatttttttcgtgtttttgtagacggtcggggagggagataggacgtaggagttcggggattttttttttcggcgggaggaagcggtgttttttcgcgtaggttttttttttttttttttcgtcgtnntcgtttcgtttttttttcgattggttgtgtttcggaagtggttataagttgggttncgatgtcgcgagcggaatttcgncgttttcggaagtgnnttgaaggcggngcgttagtttcgagtagtgttcgtttttgttcggggcgttgcggtttcgggcgncgttatgannagtgagttnnntattttcgtggggaatatnnnnnntatcgacgaggacgtgtatcgtttttggttcgatggttattcgggttcgtgaggggcgtgtggggaagttagtcggcggagcggttgtgttgaatgggagagggggcggggttaagatttgggtatttttnnnnnaagtgggcgagcgtttgggaataagaggtgtnataggggtttgggatg

SEQ ID NO: 36142 - DNA, 536 bp, Artificial Sequence
  chemically treated genomic DNA (Homo sapiens) CpG-island No: 36142
  unsure (17, 49..50, 52..53, 184..185, 187..188, 208..209, 219..220)
  unsure (229, 283, 294..295, 310, 333, 389..)
catcccaaacccctatnacacctcttattcccaaacgctcgcccacttnnnnnaaaaatacccaaatcttaaccccgccccctctcccattcaacacaaccgctccgccgactaacttccccacacgcccctcacgaacccgaataaccatcgaaccaaaaacgatacacgtcctcgtcgatannnnnnatattccccacgaaaatannnaactcactnntcataacgncgcccgaaaccgcaacgccccgaacaaaaacgaacactactcgaaactaacgcnccgccttcaanncacttccgaaaacgncgaaattccgctcgcgacatcgnaacccaacttataaccacttccgaaacacaaccaatcgaaaaaaaaacgaaacgannacgacgaaaaaaaaaaaaaaaaaacctacgcgaaaaaacaccgcttcctcccgccgaaaaaaaaaatccccgaactcctacgtcctatctccctccccgaccgtctacaaaaacacgaaaaaaatacctcctcttcgtctcctcga

SEQ ID NO: 36143 - DNA, 536 bp, Artificial Sequence
  chemically treated genomic DNA (Homo sapiens) CpG-island No: 36143
  unsure (17, 49..50, 52..53, 184..185, 187..188, 208..209, 219..220)
  unsure (229, 283, 294..295, 310, 333, 389..)
tattttagatttttatnatattttttatttttaggcgttcgtttatttnnnnnaaggatgtttaagttttagtttcgtttttttttttatttaatataatcgtttcgtcgattggtttttttatacgttttttacggattcgagtaattatcgagttagaggcgatatacgttttcgtcgatannnnnngtgttttttacgaagatgnnnagtttattnnttatggcgncgttcggggtcgtagcgtttcgagtaggagcgagtattgttcgggattggcgtntcgtttttagnntattttcgggagcgncgagatttcgttcgcggtatcgngatttagtttatgattattttcgggatatagttagtcggggaggggacggggcggnngcggcgagggaagagagggggaggtttgcgcggaggagtatcgttttttttcgtcgggagggggagttttcgggtttttgcgttttgttttttttttcggtcgtttgtaggagtacgaagggagtgtttttttttcgttttttcgg

SEQ ID NO: 36144 - DNA, 536 bp, Artificial Sequence
  chemically treated genomic DNA (Homo sapiens) CpG-island No: 36144
  unsure (147..148, 204, 227, 242..243, 254, 308, 317..318, 327..328)
  unsure (348..349, 351..352, 484..485, 487..488, 520)
ccgaaaaaacgaaaaaaaaacactcccttcgtactcctacaaacgaccgaaaaaaaaaacaaaacgcaaaaacccgaaaactccccctcccgacgaaaaaaaacgatactcctccgcgcaaacctccccctctcttccctcgccgcnnccgccccgtcccctccccgactaactatatcccgaaaataatcataaactaaatcncgataccgcgaacgaaatctcgncgctcccgaaaatannctaaaaacganacgccaatcccgaacaatactcgctcctactcgaaacgctacgaccccgaacgncgccataannaataaactnnncatcttcgtaaaaaacacnnnnnntatcgacgaaaacgtatatcgcctctaactcgataattactcgaatccgtaaaaaacgtataaaaaaaccaatcgacgaaacgattatattaaataaaaaaaaaaacgaaactaaaacttaaacatccttnnnnnaaataaacgaacgcctaaaaataaaaaatatnataaaaatctaaaata

SEQ ID NO: 36145 - DNA, 866 bp, Artificial Sequence
  chemically treated genomic DNA (Homo sapiens) CpG-island No: 36145
  unsure (14)
cgtggagtcgaagntcgagttcgtgtttagtatcgaggtttttagtttcggttagaaagatttggaagtcgttggggtcgagagaagtttttgtttagaggtcgtagcgttttcgtcggggtcgcggattcgcgataattttattaaggcgtcgtcgtgggaggcgagcgtttcgtcgtcgtcgcgtaggacgcgggtatttaggcgggcgcgtaggtttgcgttttagtggtcgtgagttttatgttttcgtaggacggcgttgggggttcggtttttagtttttaggcggcgcgcgcgtttagttcgttttcgcgtcgagatgcgggtttgtaggtgtcgttgggcgtcgtcgagacgcgtttcgtggttattgggtttatgatattttaagtcgtcgcgtcgttcgtttttttcgaagtgcgggtgcggttcggtttagcgttggcggtcgttgtagcgttttcggagtcggttgagttcgtgcgagacgtgagttgggacgagaagggtatgacgtgggaggtatacggcgtcgttatggaggtggaggtgttgggtatggttatttagaagtatttggagcgatagatcgaggagtacggtcgttaagggggttcgcgtcgtcgttcgtcgttcgtgtcgtttcggtcgttcgggttcggtgcgtatcggtttttagatggcgtcgttaagcgttcgttcggtttgtttcgcgcgttgttgtagagtgtgcgtcggtcgcggtgttgttcgcgggcgggatttacggtcgagtgatttgtttttattttgtacgttcgagttttcgatttttttaggttttttttttgattataggtttttagaaggggttttttttgcgt

SEQ ID NO: 36146 - DNA, 866 bp, Artificial Sequence
  chemically treated genomic DNA (Homo sapiens) CpG-island No: 36146
  unsure (853)
acgcaaaaaaaaccccttctaaaaacctataatcaaaaaaaaaacctaaaaaaatcgaaaactcgaacgtacaaaataaaaacaaatcactcgaccgtaaatcccgcccgcgaacaacaccgcgaccgacgcacactctacaacaacgcgcgaaacaaaccgaacgaacgcttaacgacgccatctaaaaaccgatacgcaccgaacccgaacgaccgaaacgacacgaacgacgaacgacgacgcgaacccccttaacgaccgtactcctcgatctatcgctccaaatacttctaaataaccatacccaacacctccacctccataacgacgccgtatacctcccacgtcatacccttctcgtcccaactcacgtctcgcacgaactcaaccgactccgaaaacgctacaacgaccgccaacgctaaaccgaaccgcacccgcacttcgaaaaaaacgaacgacgcgacgacttaaaatatcataaacccaataaccacgaaacgcgtctcgacgacgcccaacgacacctacaaacccgcatctcgacgcgaaaacgaactaaacgcgcgcgccgcctaaaaactaaaaaccgaacccccaacgccgtcctacgaaaacataaaactcacgaccactaaaacgcaaacctacgcgcccgcctaaatacccgcgtcctacgcgacgacgacgaaacgctcgcctcccacgacgacgccttaataaaattatcgcgaatccgcgaccccgacgaaaacgctacgacctctaaacaaaaacttctctcgaccccaacgacttccaaatctttctaaccgaaactaaaaacctcgatactaaacacgaactcgancttcgactccacg

SEQ ID NO: 36147 - DNA, 866 bp, Artificial Sequence
  chemically treated genomic DNA (Homo sapiens) CpG-island No: 36147
  unsure (853)
acgtagaggggattttttttaggggtttgtgattaagaagggagtttgagaaggtcggaaattcgggcgtataaaatgggggtagattattcggtcgtgggtttcgttcgcgagtagtatcgcggtcggcgtatattttgtagtagcgcgcggaataggtcgggcggacgtttggcggcgttatttgggggtcggtgcgtatcgagttcgaacggtcggggcggtacgggcggcgggcggcggcgcgggtttttttggcggtcgtgtttttcgatttgtcgttttagatgtttttggatggttatgtttagtatttttatttttatggcggcgtcgtatattttttacgttatgtttttttcgttttagtttacgtttcgtacgggtttagtcggtttcgggggcgttatagcggtcgttagcgttgagtcgggtcgtattcgtatttcggggaaggcgggcggcgcggcggtttgaggtgttatgggtttagtggttacggagcgcgtttcggcggcgtttagcgatatttgtaggttcgtatttcggcgcgagggcgggttgggcgcgcgcgtcgtttggaagttgaaggtcgagtttttagcgtcgttttgcggagatatggggtttacggttattgagacgtaggtttgcgcgttcgtttgagtgttcgcgttttgcgcggcggcggcggggcgttcgttttttacgacggcgttttggtgaagttgtcgcgagttcgcggtttcggcgggggcgttgcggtttttgggtaggggtttttttcggttttagcggtttttaggtttttttggtcgagattggaggtttcggtgttggatacgggttcggntttcggttttacg

SEQ ID NO: 36148 - DNA, 866 bp, Artificial Sequence
  chemically treated genomic DNA (Homo sapiens) CpG-island No: 36148
  unsure (14)
cgtaaaaccgaaanccgaacccgtatccaacaccgaaacctccaatctcgaccaaaaaaacctaaaaaccgctaaaaccgaaaaaaacccctacccaaaaaccgcaacgcccccgccgaaaccgcgaactcgcgacaacttcaccaaaacgccgtcgtaaaaaacgaacgccccgccgccgccgcgcaaaacgcgaacactcaaacgaacgcgcaaacctacgtctcaataaccgtaaaccccatatctccgcaaaacgacgctaaaaactcgaccttcaacttccaaacgacgcgcgcgcccaacccgccctcgcgccgaaatacgaacctacaaatatcgctaaacgccgccgaaacgcgctccgtaaccactaaacccataacacctcaaaccgccgcgccgcccgccttccccgaaatacgaatacgacccgactcaacgctaacgaccgctataacgcccccgaaaccgactaaacccgtacgaaacgtaaactaaaacgaaaaaaacataacgtaaaaaatatacgacgccgccataaaaataaaaatactaaacataaccatccaaaaacatctaaaacgacaaatcgaaaaacacgaccgccaaaaaaacccgcgccgccgcccgccgcccgtaccgccccgaccgttcgaactcgatacgcaccgacccccaaataacgccgccaaacgtccgcccgacctattccgcgcgctactacaaaatatacgccgaccgcgatactactcgcgaacgaaacccacgaccgaataatctacccccattttatacgcccgaatttccgaccttctcaaactcccttcttaatcacaaacccctaaaaaaaatcccctctacgt

SEQ ID NO: 36149 - DNA, 845 bp, Artificial Sequence
  chemically treated genomic DNA (Homo sapiens) CpG-island No: 36149
gggcgcgttcgtgttcgtttcgggaggtttatcgcgtacgcgttgttatttttttcgttttttgttagttaggtcgaagagcgcgcggcgttagcgggggcgttgagtttagtagtgtcgtagcgtcggagtcggagtcggagtcggagcgcgcgagttcgtagggcgcgaggaacgagcggtggttggtacgtattcgagattcgggtattcgtgcgtttttgtttaggattcgcgattcgagcgtttgatttcggttttatttttttttcggtttttggtttattttcggtttggtttagcggagttttcgcgttcgttcgtcgtagtcgtcgttttatttttagtttcggtttcgtatttaggtgaggcggtcgcgcgtcggggatggggaacgggatgaggatggagaggggattggggcgataggagggagttggggaaggggatggaaaatggagggagattcgggggatgcgcgttagtgtgtatttcggagtatgtgagtatgtttcggtgtttgtagttgttcgggcggttgtggggacgtgtgttcgcgtttatgtgggtcggggtattcgtgcgcgttggagcgtttgcgtgttttgtgtgtgtacgtgagtttgttcgtggtgtatgtttgtgtgtatgatcgtgtgattgtgtcgtgcgtgtataggcgggttttggatattcgcgtcgaatttagtatttcggttcgacggggttgtagtttgtagggttcggataatcgaggtagtggtttttttcgcgtttttaggttttaaggacgttaggatttttcgcggttttgaggtttcgtattggggagtggggtgggatgg

SEQ ID NO: 36150 - DNA, 845 bp, Artificial Sequence
  chemically treated genomic DNA (Homo sapiens) CpG-island No: 36150
ccatcccaccccactccccaatacgaaacctcaaaaccgcgaaaaatcctaacgtccttaaaacctaaaaacgcgaaaaaaaccactacctcgattatccgaaccctacaaactacaaccccgtcgaaccgaaatactaaattcgacgcgaatatccaaaacccgcctatacacgcacgacacaatcacacgatcatacacacaaacatacaccacgaacaaactcacgtacacacacaaaacacgcaaacgctccaacgcgcacgaataccccgacccacataaacgcgaacacacgtccccacaaccgcccgaacaactacaaacaccgaaacatactcacatactccgaaatacacactaacgcgcatcccccgaatctccctccattttccatccccttccccaactccctcctatcgccccaatcccctctccatcctcatcccgttccccatccccgacgcgcgaccgcctcacctaaatacgaaaccgaaactaaaaataaaacgacgactacgacgaacgaacgcgaaaactccgctaaaccaaaccgaaaataaaccaaaaaccgaaaaaaaaataaaaccgaaatcaaacgctcgaatcgcgaatcctaaacaaaaacgcacgaatacccgaatctcgaatacgtaccaaccaccgctcgttcctcgcgccctacgaactcgcgcgctccgactccgactccgactccgacgctacgacactactaaactcaacgcccccgctaacgccgcgcgctcttcgacctaactaacaaaaaacgaaaaaaataacaacgcgtacgcgataaacctcccgaaacgaacacgaacgcgccc

SEQ ID NO: 36151 - DNA, 845 bp, Artificial Sequence
  chemically treated genomic DNA (Homo sapiens) CpG-island No: 36151
ttattttattttattttttagtgcgaagttttagggtcgcggagagttttagcgtttttgaaatttggggacgcgggaggggttattgtttcggttattcgggttttgtaaattgtagtttcgtcgaatcggagtgttgggttcggcgcgaatatttaggattcgtttgtatacgtacggtatagttatacggttatgtatataaatatatattacggataagtttacgtgtatatataggatacgtagacgttttaacgcgtacgaatatttcgatttatatgggcgcggatatacgtttttatagtcgttcgggtagttgtaaatatcggagtatatttatatatttcggggtgtatattgacgcgtatttttcgggtttttttttattttttatttttttttttagtttttttttgtcgttttagttttttttttatttttatttcgttttttattttcggcgcgcggtcgttttatttggatgcggggtcggggttggggatggagcggcggttgcggcgggcggacgcgggggtttcgttaggttaggtcggaggtggattaggggtcggaggggggatagggtcgggattaggcgttcgggtcgcgggttttgagtaggagcgtacgagtgttcgggtttcgggtgcgtattagttatcgttcgtttttcgcgttttgcgagttcgcgcgtttcggtttcggtttcggtttcggcgttgcggtattattgagtttagcgttttcgttggcgtcgcgcgtttttcggtttgattgatagggggcggggagggtgatagcgcgtacgcgatgagtttttcggggcgagtacggacgcgttt

SEQ ID NO: 36152 - DNA, 845 bp, Artificial Sequence
  chemically treated genomic DNA (Homo sapiens) CpG-island No: 36152
aaacgcgtccgtactcgccccgaaaaactcatcgcgtacgcgctatcaccctccccgccccctatcaatcaaaccgaaaaacgcgcgacgccaacgaaaacgctaaactcaataataccgcaacgccgaaaccgaaaccgaaaccgaaacgcgcgaactcgcaaaacgcgaaaaacgaacgataactaatacgcacccgaaacccgaacactcgtacgctcctactcaaaacccgcgacccgaacgcctaatcccgaccctatcccccctccgacccctaatccacctccgacctaacctaacgaaacccccgcgtccgcccgccgcaaccgccgctccatccccaaccccgaccccgcatccaaataaaacgaccgcgcgccgaaaataaaaaacgaaataaaaataaaaaaaaaactaaaacgacaaaaaaaaactaaaaaaaaaaataaaaaataaaaaaaaacccgaaaaatacgcgtcaatatacaccccgaaatatataaatatactccgatatttacaactacccgaacgactataaaaacgtatatccgcgcccatataaatcgaaatattcgtacgcgttaaaacgtctacgtatcctatatatacacgtaaacttatccgtaatatatatttatatacataaccgtataactataccgtacgtatacaaacgaatcctaaatattcgcgccgaacccaacactccgattcgacgaaactacaatttacaaaacccgaataaccgaaacaataacccctcccgcgtccccaaatttcaaaaacgctaaaactctccgcgaccctaaaacttcgcactaaaaaataaaataaaataa

SEQ ID NO: 36153 - DNA, 941 bp, Artificial Sequence
  chemically treated genomic DNA (Homo sapiens) CpG-island No: 36153
gaattcgttcgaggacggcgcggaattcgggagtttagcgtcgtagttagggttggttagcgaggggcgtttttttttcgtttttttcggtcgcggttttttcgcggttatagttttttacggttacgaggcggtcgggcggttattgcgtatgtcggggcggtgtcggggcgggagtacggagtcggcgttggggacgcgacgtcgagtttgtaggttttttcgttagttcgtcggatgtagtcgaatcgttcgggcgacggcggcggcggcggcgggagtcggagcgtatttcgtttaggagtcggagtagcggtattgtttggtaagcgtcgcgtttatattcgttgttttttcgggcgggcggcggtagtttttttattcgttcgttgtcgtttcggagtcgttgtttagggttttcgaagttttcggcggcggggttcggatatttcgcgcggtatgagttcgggtgtgtgcgcgcggttgggggcggtgggtgtttgtttttaggtttttcgtcggggcggggcggggcggggcggggcgggggcgggtttttagttttgggtcgaatattagaggggttcggcgggttaggtttatttggttgtggggtcggtttcgcgttcggttttgcgtcgttcgttggttttatacggtatggtcgcgcgggagggggtgtttttcgttattggggggagggcgttttttcgcgttgatttatttttttcggagcgagtttaacgttttattggttttattcgtattattgagtatattcgtcgttatataattagtgtggtatatatttcggggcgcgattatataatatcgcgtttacgcgcgggcgttttattttttcgagtgaggttataggtttatcgtatatatataatggttgttggttattttattagatttatatatacggttatttgtta

SEQ ID NO: 36154 - DNA, 941 bp, Artificial Sequence
  chemically treated genomic DNA (Homo sapiens) CpG-island No: 36154
taacaaataaccgtatatataaatctaataaaataaccaacaaccattatatatatacgataaacctataacctcactcgaaaaaataaaacgcccgcgcgtaaacgcgatattatataatcgcgccccgaaatatataccacactaattatataacgacgaatatactcaataatacgaataaaaccaataaaacgttaaactcgctccgaaaaaaataaatcaacgcgaaaaaacgccctccccccaataacgaaaaacaccccctcccgcgcgaccataccgtataaaaccaacgaacgacgcaaaaccgaacgcgaaaccgaccccacaaccaaataaacctaacccgccgaacccctctaatattcgacccaaaactaaaaacccgcccccgccccgccccgccccgccccgccccgacgaaaaacctaaaaacaaacacccaccgcccccaaccgcgcgcacacacccgaactcataccgcgcgaaatatccgaaccccgccgccgaaaacttcgaaaaccctaaacaacgactccgaaacgacaacgaacgaataaaaaaactaccgccgcccgcccgaaaaaacaacgaatataaacgcgacgcttaccaaacaataccgctactccgactcctaaacgaaatacgctccgactcccgccgccgccgccgccgtcgcccgaacgattcgactacatccgacgaactaacgaaaaaacctacaaactcgacgtcgcgtccccaacgccgactccgtactcccgccccgacaccgccccgacatacgcaataaccgcccgaccgcctcgtaaccgtaaaaaactataaccgcgaaaaaaccgcgaccgaaaaaaacgaaaaaaaaacgcccctcgctaaccaaccctaactacgacgctaaactcccgaattccgcgccgtcctcgaacgaattc

SEQ ID NO: 36155 - DNA, 941 bp, Artificial Sequence
  chemically treated genomic DNA (Homo sapiens) CpG-island No: 36155
tgataggtggtcgtgtgtatgagtttaatggaatgattaatagttattgtgtgtgtgcggtagatttgtggttttattcgaggaaatgaggcgttcgcgcgtgaacgcggtgttgtgtgatcgcgtttcggagtgtgtgttatattggttgtgtgacggcgagtgtgtttagtagtgcgagtggagttagtggagcgttgagttcgtttcggggaagatgaattaacgcgggaggacgttttttttttagtggcgggaagtattttttttcgcgcggttatgtcgtataaagttagcgggcggcgtaaggtcgggcgcggggtcgattttatagttaggtgagtttggttcgtcgggtttttttgatgttcggtttaggattggggattcgttttcgtttcgtttcgtttcgtttcgtttcggcgaggagtttggaaatagatatttatcgtttttagtcgcgcgtatatattcgggtttatgtcgcgcgaggtgttcgagtttcgtcgtcgggggtttcgaggattttggatagcggtttcggggcggtagcgagcggatgaaggggttgtcgtcgttcgttcggaaagatagcgggtgtgggcgcggcgtttattaggtagtgtcgttgtttcggtttttgggcgagatgcgtttcggttttcgtcgtcgtcgtcgtcgtcgttcgagcggttcggttgtattcggcgggttgacgggaggatttgtagattcggcgtcgcgtttttagcgtcggtttcgtgttttcgtttcggtatcgtttcggtatgcgtagtagtcgttcggtcgtttcgtaatcgtgaggggttgtgatcgcggggaaatcgcggtcggagggagcgagggaggggcgtttttcgttggttaattttaattgcggcgttgggttttcgggtttcgcgtcgttttcgagcgggttt

SEQ ID NO: 36156 - DNA, 941 bp, Artificial Sequence
  chemically treated genomic DNA (Homo sapiens) CpG-island No: 36156
aaacccgctcgaaaacgacgcgaaacccgaaaacccaacgccgcaattaaaattaaccaacgaaaaacgcccctccctcgctccctccgaccgcgatttccccgcgatcacaacccctcacgattacgaaacgaccgaacgactactacgcataccgaaacgataccgaaacgaaaacacgaaaccgacgctaaaaacgcgacgccgaatctacaaatcctcccgtcaacccgccgaatacaaccgaaccgctcgaacgacgacgacgacgacgacgaaaaccgaaacgcatctcgcccaaaaaccgaaacaacgacactacctaataaacgccgcgcccacacccgctatctttccgaacgaacgacgacaaccccttcatccgctcgctaccgccccgaaaccgctatccaaaatcctcgaaacccccgacgacgaaactcgaacacctcgcgcgacataaacccgaatatatacgcgcgactaaaaacgataaatatctatttccaaactcctcgccgaaacgaaacgaaacgaaacgaaacgaaaacgaatccccaatcctaaaccgaacatcaaaaaaacccgacgaaccaaactcacctaactataaaatcgaccccgcgcccgaccttacgccgcccgctaactttatacgacataaccgcgcgaaaaaaaatacttcccgccactaaaaaaaaaacgtcctcccgcgttaattcatcttccccgaaacgaactcaacgctccactaactccactcgcactactaaacacactcgccgtcacacaaccaatataacacacactccgaaacgcgatcacacaacaccgcgttcacgcgcgaacgcctcatttcctcgaataaaaccacaaatctaccgcacacacacaataactattaatcattccattaaactcatacacacgaccacctatca

SEQ ID NO: 36157 - DNA, 619 bp, Artificial Sequence
  chemically treated genomic DNA (Homo sapiens) CpG-island No: 36157
gtagtgttagtagcgtgggtattttttattttcggttttatttaacgcgatttttagttttttgagtatttcgttttgttgagtattagttggtttttcgttatagtttgtaacggtagcgtcggaggttaataggataaatcgtaatttatcgtttagcgcggttagtttcgtcgatagtttcggttttgtatataaggttattgtcgtttttagcgagttatttatttttttgtcggtacgcgtttgtttaatgattttgtttatttcgttacgtatttttaatagttcgttttagaacgtatcgtttatcgttttattgtttgttaggttaaataggttttcgtattatttatcggtgaagacgtattttttacgttcgttcggtaggtagttttatattttattagcggtgaaggagaggattggtgttatttagcgtattagcgtttttgcgatgtgatatagcgtagtttggtagttacgacgcgttatattgttcgttttggcggtgtattgacggtttttgatgatgtcgaggtagaaggaatttattttatcggagtagaagcgtattagacgttgtattatttcggtggaatcgtatgtttcgtacggt

SEQ ID NO: 36158 - DNA, 619 bp, Artificial Sequence
  chemically treated genomic DNA (Homo sapiens) CpG-island No: 36158
accgtacgaaacatacgattccaccgaaataatacaacgtctaatacgcttctactccgataaaataaattccttctacctcgacatcatcaaaaaccgtcaatacaccgccaaaacgaacaatataacgcgtcgtaactaccaaactacgctatatcacatcgcaaaaacgctaatacgctaaataacaccaatcctctccttcaccgctaataaaatataaaactacctaccgaacgaacgtaaaaaatacgtcttcaccgataaataatacgaaaacctatttaacctaacaaacaataaaacgataaacgatacgttctaaaacgaactattaaaaatacgtaacgaaataaacaaaatcattaaacaaacgcgtaccgacaaaaaaataaataactcgctaaaaacgacaataaccttatatacaaaaccgaaactatcgacgaaactaaccgcgctaaacgataaattacgatttatcctattaacctccgacgctaccgttacaaactataacgaaaaaccaactaatactcaacaaaacgaaatactcaaaaaactaaaaatcgcgttaaataaaaccgaaaataaaaaatacccacgctactaacactac

SEQ ID NO: 36159 - DNA, 619 bp, Artificial Sequence
  chemically treated genomic DNA (Homo sapiens) CpG-island No: 36159
gtcgtacgaagtatacgattttatcgaagtggtatagcgtttgatgcgtttttgtttcgatgagatgggttttttttatttcgatattattaaagatcgttagtatatcgttaaagcggatagtgtggcgcgtcgtagttgttagattgcgttatattatatcgtagaagcgttggtgcgttggatggtattaatttttttttttatcgttgatgaagtgtggggttatttgtcgggcgaacgtgaaaaatacgtttttatcggtgagtggtacgaaggtttgtttggtttggtagatagtgaagcgatgaacgatgcgttttgggacgagttgttgaaagtgcgtggcgaagtgaataaagttattgagtaagcgcgtgtcgataagaaagtgggtggttcgttggaagcggtagtaattttgtatgtagaatcggaattgtcggcgaaattgatcgcgttgggcgatgaattacgatttgttttgttgattttcggcgttatcgttgtagattataacgaagaattagttgatgtttagtagagcgaagtatttaaagggttgaaagtcgcgttgagtaaagtcgaaggtgagaagtgtttacgttgttggtattat

SEQ ID NO: 36160 - DNA, 619 bp, Artificial Sequence
  chemically treated genomic DNA (Homo sapiens) CpG-island No: 36160
ataataccaacaacgtaaacacttctcaccttcgactttactcaacgcgactttcaaccctttaaatacttcgctctactaaacatcaactaattcttcgttataatctacaacgataacgccgaaaatcaacaaaacaaatcgtaattcatcgcccaacgcgatcaatttcgccgacaattccgattctacatacaaaattactaccgcttccaacgaaccacccactttcttatcgacacgcgcttactcaataactttattcacttcgccacgcactttcaacaactcgtcccaaaacgcatcgttcatcgcttcactatctaccaaaccaaacaaaccttcgtaccactcaccgataaaaacgtatttttcacgttcgcccgacaaataaccccacacttcatcaacgataaaaaaaaaaattaataccatccaacgcaccaacgcttctacgatataatataacgcaatctaacaactacgacgcgccacactatccgctttaacgatatactaacgatctttaataatatcgaaataaaaaaaacccatctcatcgaaacaaaaacgcatcaaacgctataccacttcgataaaatcgtatacttcgtacgac

SEQ ID NO: 36161 - DNA, 521 bp, Artificial Sequence
  chemically treated genomic DNA (Homo sapiens) CpG-island No: 36161
  unsure (40)
tttcgcgagattaggggatagtaacgttttgtcgacgttngggttgtgtcgggacgcggtttattagtgataggagaagtagtagtagtagtagtagtcggggcgcgtttggcggttttggttgaaagttggtggagttgtttgttcggcgcgaggataattcgggagtttcggttgagtgtatggtttcggtgttcgggtttggataggttagtttgagagtatgcgaagtcggttttcgggtagataataagagatatcgtcgggaagtgttaggaatttcgcgcgttgttcgcggggtttttttgtagtcggggttgggttagaaggatggtaaagttgcgcggcgtcgttcgggttggagtcgtagtcgaggagtcgaagtttttttaggtcgtttagtttcgtcgttagcgttttaatcgcgcggagaattgaatttttttatttttattttttaggttttcggattttgggttttgagggaaattttttcgttcgtattttttattttagttttt

SEQ ID NO: 36162 - DNA, 521 bp, Artificial Sequence
  chemically treated genomic DNA (Homo sapiens) CpG-island No: 36162
  unsure (482)
aaaaactaaaataaaaaatacgaacgaaaaaatttccctcaaaacccaaaatccgaaaacctaaaaaataaaaataaaaaaattcaattctccgcgcgattaaaacgctaacgacgaaactaaacgacctaaaaaaacttcgactcctcgactacgactccaacccgaacgacgccgcgcaactttaccatccttctaacccaaccccgactacaaaaaaaccccgcgaacaacgcgcgaaattcctaacacttcccgacgatatctcttattatctacccgaaaaccgacttcgcatactctcaaactaacctatccaaacccgaacaccgaaaccatacactcaaccgaaactcccgaattatcctcgcgccgaacaaacaactccaccaactttcaaccaaaaccgccaaacgcgccccgactactactactactactacttctcctatcactaataaaccgcgtcccgacacaacccnaacgtcgacaaaacgttactatcccctaatctcgcgaaa

SEQ ID NO: 36163 - DNA, 521 bp, Artificial Sequence
  chemically treated genomic DNA (Homo sapiens) CpG-island No: 36163
  unsure (482)
gaggattggagtaaggggtgcgagcggagggattttttttaaagtttagggttcggggatttggaaagtagaagtggagggatttaatttttcgcgcgattgaggcgttagcggcggagttggacggtttgggaaggtttcggtttttcggttgcggttttagttcggacggcgtcgcgtaattttgttatttttttggtttagtttcggttataggaggatttcgcgggtaacgcgcggagtttttggtatttttcggcggtgttttttgttgtttgttcggggatcgatttcgtatgtttttaggttgatttgtttaagttcgaatatcgggattatgtatttagtcgggattttcgggttattttcgcgtcggataggtaattttattagtttttaattaggatcgttaagcgcgtttcggttgttgttgttgttgttgttttttttgttattggtaagtcgcgtttcggtatagtttnagcgtcggtagggcgttgttgttttttggtttcgcgggg

SEQ ID NO: 36164 - DNA, 521 bp, Artificial Sequence
  chemically treated genomic DNA (Homo sapiens) CpG-island No: 36164
  unsure (40)
ccccgcgaaaccaaaaaacaacaacgccctaccgacgctnaaactataccgaaacgcgacttaccaataacaaaaaaaacaacaacaacaacaacaaccgaaacgcgcttaacgatcctaattaaaaactaataaaattacctatccgacgcgaaaataacccgaaaatcccgactaaatacataatcccgatattcgaacttaaacaaatcaacctaaaaacatacgaaatcgatccccgaacaaacaacaaaaaacaccgccgaaaaataccaaaaactccgcgcgttacccgcgaaatcctcctataaccgaaactaaaccaaaaaaataacaaaattacgcgacgccgtccgaactaaaaccgcaaccgaaaaaccgaaaccttcccaaaccgtccaactccgccgctaacgcctcaatcgcgcgaaaaattaaatccctccacttctactttccaaatccccgaaccctaaactttaaaaaaaatccctccgctcgcaccccttactccaatcctc

SEQ ID NO: 36165 - DNA, 547 bp, Artificial Sequence
  chemically treated genomic DNA (Homo sapiens) CpG-island No: 36165
gattcgtcgtttcgtgtcgttcgtttgtttgggaagcggggtcgttcgggtcgcgtcgtggattttttttataggaaggtcgcgaataggcgagtcgtatcgtttatttcggttttaaaggttatcggcgtcgtcgttttttttattcggtcgcgagtttcgagcgacgttgcgttgacgtggttattttcgcggggagggtcgggtcgggaattgggtatcgttcgttttttagttgttcgcgtttcggcgattttttaggaagacggtttggcggttgtggtagggtatcgtttggtaaagggtacgtaaagttagcggttttttttggtgcgtttagtagggagttagcgttttagttttagtcgagtaggtcggcgtacggtttattattagtagttcgtttttacggtttaattatattatcgcggggagtagttttttttcgggatttcgtttttaaatggaaaattaaatagttcgtttttagattttcgttttttagtaatatagtcgtattttgtaggaagttatattatttgaggtt

SEQ ID NO: 36166 - DNA, 547 bp, Artificial Sequence
  chemically treated genomic DNA (Homo sapiens) CpG-island No: 36166
aacctcaaataatataacttcctacaaaatacgactatattactaaaaaacgaaaatctaaaaacgaactatttaattttccatttaaaaacgaaatcccgaaaaaaaactactccccgcgataatataattaaaccgtaaaaacgaactactaataataaaccgtacgccgacctactcgactaaaactaaaacgctaactccctactaaacgcaccaaaaaaaaccgctaactttacgtaccctttaccaaacgataccctaccacaaccgccaaaccgtcttcctaaaaaatcgccgaaacgcgaacaactaaaaaacgaacgatacccaattcccgacccgaccctccccgcgaaaataaccacgtcaacgcaacgtcgctcgaaactcgcgaccgaataaaaaaaacgacgacgccgataacctttaaaaccgaaataaacgatacgactcgcctattcgcgaccttcctataaaaaaaatccacgacgcgacccgaacgaccccgcttcccaaacaaacgaacgacacgaaacgacgaatc

SEQ ID NO: 36167 - DNA, 547 bp, Artificial Sequence
  chemically treated genomic DNA (Homo sapiens) CpG-island No: 36167
aattttaggtagtgtagttttttgtagaatgcggttgtgttgttaaggaacgaggatttgagagcgggttgtttggttttttatttagaggcgaggtttcgggagaaggttgtttttcgcggtggtgtggttgggtcgtggagacgagttgttgatgatggatcgtacgtcgatttattcggttggaattggggcgttggttttttgttgaacgtattagagggagtcgttggttttgcgtattttttgttagacgatgttttgttatagtcgttaggtcgtttttttggggagtcgtcggagcgcgggtaattgggagacgggcggtgtttagttttcggttcggtttttttcgcggaggtggttacgttagcgtagcgtcgttcggagttcgcggtcggatggggaaggcggcggcgtcggtggtttttggggtcgaagtgggcgatgcggttcgtttgttcgcggtttttttgtaagaaagatttacggcgcggttcgggcggtttcgttttttaggtaggcgggcggtacggggcggcgggtt

SEQ ID NO: 36168 - DNA, 547 bp, Artificial Sequence
  chemically treated genomic DNA (Homo sapiens) CpG-island No: 36168
aacccgccgccccgtaccgcccgcctacctaaaaaacgaaaccgcccgaaccgcgccgtaaatctttcttacaaaaaaaccgcgaacaaacgaaccgcatcgcccacttcgaccccaaaaaccaccgacgccgccgccttccccatccgaccgcgaactccgaacgacgctacgctaacgtaaccacctccgcgaaaaaaaccgaaccgaaaactaaacaccgcccgtctcccaattacccgcgctccgacgactccccaaaaaaacgacctaacgactataacaaaacatcgtctaacaaaaaatacgcaaaaccaacgactccctctaatacgttcaacaaaaaaccaacgccccaattccaaccgaataaatcgacgtacgatccatcatcaacaactcgtctccacgacccaaccacaccaccgcgaaaaacaaccttctcccgaaacctcgcctctaaataaaaaaccaaacaacccgctctcaaatcctcgttccttaacaacacaaccgcattctacaaaaaactacactacctaaaatt

SEQ ID NO: 36169 - DNA, 1238 bp, Artificial Sequence
  chemically treated genomic DNA (Homo sapiens) CpG-island No: 36169
taggtttggttatgtcggtattgtcgggttttttgcgggatatcgtttatttcgatagtatcgttagttattatggcgtgttgttagcgttatatgcgttgatgtaatttttatgcgtattcgttttcggagtattgttcgatcgttttggtcgtcgtttagttttgttcgtttcgttatttggagttattatcgattacgcgattatggcgattatattcgttttgtggattttttacgtcggacgtatcgtggtcggtattatcggcgttataggtgcggttgttggcgtttatatcgtcgatattatcgatggggaagatcgggttcgttatttcgggtttatgagcgtttgtttcggcgtgggtatggtggtaggtttcgtggtcgggggattgttgggcgttatttttttgtatgtattattttttgcggcggcggtgtttaacggttttaatttattattgggttgttttttaatgtaggagtcgtataagggagagcgtcgatcgatgtttttgagagtttttaatttagttagtttttttcggtgggcgcggggtatgattatcgtcgtcgtatttatgattgttttttttattatgtaattcgtaggataggtgtcggtagcgttttgggttattttcggcgaggatcgttttcgttggagcgcgacgatgatcggtttgtcgtttgcggtattcggaattttgtacgttttcgtttaagttttcgttattggtttcgttattaaacgtttcggcgagaagtaggttattatcgtcggtatggcggtcgacgcgttgggttacgttttgttggcgttcgcgacgcgaggttggatggttttttttattatgatttttttcgttttcggcggtatcgggatgttcgcgttgtaggttatgttgtttaggtaggtagatgacgattattagggatagttttaaggatcgttcgcggtttttattagtttaatttcgattattggatcgttgatcgttacggcgatttatgtcgtttcggcgagtatatggaacgggttggtatggattgtaggcgtcgttttatattttgtttgttttttcgcgttgcgtcgcggtgtatggagtcgggttatttcgatttgaatggaagtcggcggtatttcgttaacggatttattattttaagaattggagttaattaatttttgcggagaattgtgaatgcgtaaattaatttttggtagaatatat

SEQ ID NO: 36170 - DNA, 1238 bp, Artificial Sequence
  chemically treated genomic DNA (Homo sapiens) CpG-island No: 36170
atatattctaccaaaaattaatttacgcattcacaattctccgcaaaaattaattaactccaattcttaaaataataaatccgttaacgaaataccgccgacttccattcaaatcgaaataacccgactccatacaccgcgacgcaacgcgaaaaaacaaacaaaatataaaacgacgcctacaatccataccaacccgttccatatactcgccgaaacgacataaatcgccgtaacgatcaacgatccaataatcgaaattaaactaataaaaaccgcgaacgatccttaaaactatccctaataatcgtcatctacctacctaaacaacataacctacaacgcgaacatcccgataccgccgaaaacgaaaaaaatcataataaaaaaaaccatccaacctcgcgtcgcgaacgccaacaaaacgtaacccaacgcgtcgaccgccataccgacgataataacctacttctcgccgaaacgtttaataacgaaaccaataacgaaaacttaaacgaaaacgtacaaaattccgaataccgcaaacgacaaaccgatcatcgtcgcgctccaacgaaaacgatcctcgccgaaaataacccaaaacgctaccgacacctatcctacgaattacataataaaaaaaacaatcataaatacgacgacgataatcataccccgcgcccaccgaaaaaaactaactaaattaaaaactctcaaaaacatcgatcgacgctctcccttatacgactcctacattaaaaaacaacccaataataaattaaaaccgttaaacaccgccgccgcaaaaaataatacatacaaaaaaataacgcccaacaatcccccgaccacgaaacctaccaccatacccacgccgaaacaaacgctcataaacccgaaataacgaacccgatcttccccatcgataatatcgacgatataaacgccaacaaccgcacctataacgccgataataccgaccacgatacgtccgacgtaaaaaatccacaaaacgaatataatcgccataatcgcgtaatcgataataactccaaataacgaaacgaacaaaactaaacgacgaccaaaacgatcgaacaatactccgaaaacgaatacgcataaaaattacatcaacgcatataacgctaacaacacgccataataactaacgatactatcgaaataaacgatatcccgcaaaaaacccgacaataccgacataaccaaaccta

SEQ ID NO: 36171 - DNA, 1238 bp, Artificial Sequence
  chemically treated genomic DNA (Homo sapiens) CpG-island No: 36171
atatgttttgttaagggttggtttgcgtatttatagtttttcgtaagaattgattggttttaatttttggagtggtgaattcgttagcgaggtgtcgtcggtttttatttaggtcgaggtggttcggttttatgtatcgcgacgtaacgcggggaggtagataaggtatagggcggcgtttataatttatgttaattcgttttatgtgttcgtcgaggcggtataaatcgtcgtgacgattagcggtttaatgatcgaagttaggttggtaagagtcgcgagcgatttttgaagttgtttttgatggtcgttatttatttgtttggatagtatggtttgtaacgcgggtatttcgatgtcgtcggaagcgagaagaattataatggggaaggttatttagtttcgcgtcgcgaacgttagtaagacgtagtttagcgcgtcggtcgttatgtcggcgataatggtttgtttttcgtcgaaacgtttggtggcgggattagtgacgaaggtttgagcgagggcgtgtaagatttcgaatatcgtaagcgataggtcgattatcgtcgcgttttagcgaaagcggttttcgtcgaaaatgatttagagcgttgtcggtatttgttttacgagttgtatgataaagaagatagttataagtgcggcgacgatagttatgtttcgcgtttatcggaaggagttgattgggttgaaggtttttaagggtatcggtcgacgtttttttttatgcgatttttgtattaggaagtagtttagtagtaggttgaggtcgttgagtatcgtcgtcgtaaggaatggtgtatgtaaggagatggcgtttaatagtttttcggttacggggtttgttattatatttacgtcgaaataagcgtttatgagttcgaagtggcgagttcgattttttttatcggtgatgtcggcgatataggcgttagtaatcgtatttgtggcgtcggtgatgtcggttacgatgcgttcggcgtagaggatttataggacgggtgtggtcgttatgatcgcgtagtcgatagtggttttaagtagcgaagcgagtaggattgggcggcggttaaagcggtcggatagtgtttcgagaacgggtgcgtatagaaattgtattaacgtatatagcgttagtagtacgttatagtgattggcgatgttgtcggaatggacgatatttcgtaagaggttcggtagtatcggtataattaagttta

SEQ ID NO: 36172 - DNA, 1238 bp, Artificial Sequence
  chemically treated genomic DNA (Homo sapiens) CpG-island No: 36172
taaacttaattataccgatactaccgaacctcttacgaaatatcgtccattccgacaacatcgccaatcactataacgtactactaacgctatatacgttaatacaatttctatacgcacccgttctcgaaacactatccgaccgctttaaccgccgcccaatcctactcgcttcgctacttaaaaccactatcgactacgcgatcataacgaccacacccgtcctataaatcctctacgccgaacgcatcgtaaccgacatcaccgacgccacaaatacgattactaacgcctatatcgccgacatcaccgataaaaaaaatcgaactcgccacttcgaactcataaacgcttatttcgacgtaaatataataacaaaccccgtaaccgaaaaactattaaacgccatctccttacatacaccattccttacgacgacgatactcaacgacctcaacctactactaaactacttcctaatacaaaaatcgcataaaaaaaaacgtcgaccgatacccttaaaaaccttcaacccaatcaactccttccgataaacgcgaaacataactatcgtcgccgcacttataactatcttctttatcatacaactcgtaaaacaaataccgacaacgctctaaatcattttcgacgaaaaccgctttcgctaaaacgcgacgataatcgacctatcgcttacgatattcgaaatcttacacgccctcgctcaaaccttcgtcactaatcccgccaccaaacgtttcgacgaaaaacaaaccattatcgccgacataacgaccgacgcgctaaactacgtcttactaacgttcgcgacgcgaaactaaataaccttccccattataattcttctcgcttccgacgacatcgaaatacccgcgttacaaaccatactatccaaacaaataaataacgaccatcaaaaacaacttcaaaaatcgctcgcgactcttaccaacctaacttcgatcattaaaccgctaatcgtcacgacgatttataccgcctcgacgaacacataaaacgaattaacataaattataaacgccgccctataccttatctacctccccgcgttacgtcgcgatacataaaaccgaaccacctcgacctaaataaaaaccgacgacacctcgctaacgaattcaccactccaaaaattaaaaccaatcaattcttacgaaaaactataaatacgcaaaccaacccttaacaaaacatat

SEQ ID NO: 36173 - DNA, 708 bp, Artificial Sequence
  chemically treated genomic DNA (Homo sapiens) CpG-island No: 36173
ggaatatacgtatataatggtcgaggtatattttagagtatttatagtgagttcggaatatacgtatataatggtcgaggtatattttagaatatttatagtgagtcgggaatatacgtatataatggtcgaggtatattttagaatatttatagtgagtcgggaatatacgtatataatggtcgaggtatattttagaatatttatagtgagtcgggaatatacgtatataatggtcgaggtatattttagaatatttatagtgagtcgggaatatacgtatataatggtcgaggtatattttagagtatttatagtgagtcgggaatatacgtatataatggtcgaggtatattttagaatatttatagtgagtcgggaatatacgtataaaatggtcgaggtatattttagagtatttatagtgagtttggaatatacgtatataatggtcgaggtatattttagaatatttatagtgagtcgggaatatacgtatataatggtcgaggtatattttagagtatttatagtgagttcggaatatatgtatataatggtcgaggtatattttagaatatttatagtgagtcgggaatatacgtatataatggtcgaggtatattttagagtatttatagtgagatcggaatatacgtatataatggttaagatatattttagaatatttatagtgagtcgggaata

SEQ ID NO: 36174 - DNA, 708 bp, Artificial Sequence
  chemically treated genomic DNA (Homo sapiens) CpG-island No: 36174
tattcccgactcactataaatattctaaaatatatcttaaccattatatacgtatattccgatctcactataaatactctaaaatatacctcgaccattatatacgtatattcccgactcactataaatattctaaaatatacctcgaccattatatacatatattccgaactcactataaatactctaaaatatacctcgaccattatatacgtatattcccgactcactataaatattctaaaatatacctcgaccattatatacgtatattccaaactcactataaatactctaaaatatacctcgaccattttatacgtatattcccgactcactataaatattctaaaatatacctcgaccattatatacgtatattcccgactcactataaatactctaaaatatacctcgaccattatatacgtatattcccgactcactataaatattctaaaatatacctcgaccattatatacgtatattcccgactcactataaatattctaaaatatacctcgaccattatatacgtatattcccgactcactataaatattctaaaatatacctcgaccattatatacgtatattcccgactcactataaatattctaaaatatacctcgaccattatatacgtatattccgaactcactataaatactctaaaatatacctcgaccattatatacgtatattcc

SEQ ID NO: 36175 - DNA, 708 bp, Artificial Sequence
  chemically treated genomic DNA (Homo sapiens) CpG-island No: 36175
tgttttcgatttattgtgaatgttttagagtgtattttggttattgtgtgcgtgtgtttcggttttattgtgaatgttttagagtgtatttcggttattgtgtgcgtgtgttttcgatttattgtgagtgttttagagtgtatttcggttattgtgtgtatgtgtttcgaatttattgtgaatgttttagagtgtatttcggttattgtgtgcgtgtgttttcgatttattgtgagtgttttagagtgtatttcggttattgtgtgcgtgtgttttagatttattgtgaatgttttagagtgtatttcggttattttgtgcgtgtgttttcgatttattgtgagtgttttagagtgtatttcggttattgtgtgcgtgtgttttcgatttattgtgaatgttttagagtgtatttcggttattgtgtgcgtgtgttttcgatttattgtgagtgttttagagtgtatttcggttattgtgtgcgtgtgttttcgatttattgtgagtgttttagagtgtatttcggttattgtgtgcgtgtgttttcgatttattgtgagtgttttagagtgtatttcggttattgtgtgcgtgtgttttcgatttattgtgagtgttttagagtgtatttcggttattgtgtgcgtgtgtttcggatttattgtgaatgttttagagtgtatttcggttattgtgtgcgtgtgtttt

SEQ ID NO: 36176 - DNA, 708 bp, Artificial Sequence
  chemically treated genomic DNA (Homo sapiens) CpG-island No: 36176
aaaacacacgcacacaataaccgaaatacactctaaaacattcacaataaatccgaaacacacgcacacaataaccgaaatacactctaaaacactcacaataaatcgaaaacacacgcacacaataaccgaaatacactctaaaacactcacaataaatcgaaaacacacgcacacaataaccgaaatacactctaaaacactcacaataaatcgaaaacacacgcacacaataaccgaaatacactctaaaacactcacaataaatcgaaaacacacgcacacaataaccgaaatacactctaaaacattcacaataaatcgaaaacacacgcacacaataaccgaaatacactctaaaacactcacaataaatcgaaaacacacgcacaaaataaccgaaatacactctaaaacattcacaataaatctaaaacacacgcacacaataaccgaaatacactctaaaacactcacaataaatcgaaaacacacgcacacaataaccgaaatacactctaaaacattcacaataaattcgaaacacatacacacaataaccgaaatacactctaaaacactcacaataaatcgaaaacacacgcacacaataaccgaaatacactctaaaacattcacaataaaaccgaaacacacgcacacaataaccaaaatacactctaaaacattcacaataaatcgaaaaca

SEQ ID NO: 36177 - DNA, 980 bp, Artificial Sequence
  chemically treated genomic DNA (Homo sapiens) CpG-island No: 36177
acggggacgtttattattttagtatcgacgtggggacgtttattattgtagtatcgataaggggtattaatacggggatgtttataattttagtatcgatatggggacgtttattattttagtatcgatacggggatgtttattattttagtatcgacgtggggacgttcgttattttagtatcgataaggggtatcgatacggggacgtttattattttagtatcgataaggggtatcgatacggggatatttattattttagtatcgatacggggacgtttattattttagtatcgatacggggacgattattattttagtatcgatacggggacgtttattattttagtatcgatacggggacgattattattttagtatcgatacggggacgtttattattttagtatcgataaggggtatcgatatggggatgtttattattttagtattgataaggggtatcgatacggggacgtttattttattagtatcgatacggggacgtttattattgtagtatcgataaggggtatcgatatggggacgtttattattttagtatcgatacggggtatcgatatggggacgtttattattttagtatcgatacggggtcgtttattattttagtatcgatacggggatatttattattttagtatcgatacggggtatcgatacggggacgtttattattttagtatcgatacggggacgtttattattttagtatcgatacggggtatcgatacggggacgtttattgttttagtatcgatacggggtattaatatgaggacgtttattattgtagtatcgatatagggatgtttattattttagcgttaatacggggacgtttattattttagtatcgatacggggacgtttatttttttagtattaatacggggacgtttattattttagtatcgataaggggtattgataggggaatgtatattattttagtat

SEQ ID NO: 36178 - DNA, 980 bp, Artificial Sequence
  chemically treated genomic DNA (Homo sapiens) CpG-island No: 36178
atactaaaataatatacattcccctatcaataccccttatcgatactaaaataataaacgtccccgtattaatactaaaaaaataaacgtccccgtatcgatactaaaataataaacgtccccgtattaacgctaaaataataaacatccctatatcgatactacaataataaacgtcctcatattaataccccgtatcgatactaaaacaataaacgtccccgtatcgataccccgtatcgatactaaaataataaacgtccccgtatcgatactaaaataataaacgtccccgtatcgataccccgtatcgatactaaaataataaatatccccgtatcgatactaaaataataaacgaccccgtatcgatactaaaataataaacgtccccatatcgataccccgtatcgatactaaaataataaacgtccccatatcgataccccttatcgatactacaataataaacgtccccgtatcgatactaataaaataaacgtccccgtatcgataccccttatcaatactaaaataataaacatccccatatcgataccccttatcgatactaaaataataaacgtccccgtatcgatactaaaataataatcgtccccgtatcgatactaaaataataaacgtccccgtatcgatactaaaataataatcgtccccgtatcgatactaaaataataaacgtccccgtatcgatactaaaataataaatatccccgtatcgataccccttatcgatactaaaataataaacgtccccgtatcgataccccttatcgatactaaaataacgaacgtccccacgtcgatactaaaataataaacatccccgtatcgatactaaaataataaacgtccccatatcgatactaaaattataaacatccccgtattaataccccttatcgatactacaataataaacgtccccacgtcgatactaaaataataaacgtccccgt

SEQ ID NO: 36179 - DNA, 980 bp, Artificial Sequence
  chemically treated genomic DNA (Homo sapiens) CpG-island No: 36179
gtgttggaatagtgtgtatttttttgttagtgttttttgtcggtgttggaatagtaaacgttttcgtgttggtgttggaagggtgaacgttttcgtgtcggtgttggaatagtgaacgttttcgtattagcgttggaatagtgagtatttttgtatcggtgttgtaatagtgagcgtttttatgttggtgtttcgtatcggtgttggaatagtgagcgttttcgtgtcggtgtttcgtgtcggtgttggaatagtgagcgttttcgtgtcggtgttggaatagtgagcgttttcgtgtcggtgtttcgtgtcggtgttggaatagtgagtgttttcgtgtcggtgttggaatagtgagcgatttcgtgtcggtgttggaatagtgagcgtttttatgtcggtgtttcgtgtcggtgttggaatagtgagcgtttttatgtcggtgttttttgtcggtgttgtaatagtgagcgttttcgtgtcggtgttggtagagtgggcgttttcgtatcggtgttttttgttagtgttggaatagtgagtatttttatgtcggtgttttttgtcggtgttggaatagtgagcgttttcgtgtcggtgttggaatagtgatcgttttcgtgtcggtgttgaaatagtgaacgttttcgtgtcggtgttggaatagtgatcgttttcgtgtcggtgttgaaatagtgaacgttttcgtgtcggtgttggaatagtgagtgttttcgtgtcggtgttttttgtcggtgttggaatagtgagcgttttcgtgtcggtgttttttgtcggtgttgaaatagcgagcgtttttacgtcggtgttggaatagtgagtattttcgtgtcggtgttggaatagtgagcgtttttatgtcggtgttggaattgtgaatattttcgtgttggtgttttttgtcggtgttgtaatagtgagcgtttttacgtcggtgttggaatagtgagcgttttcgt

SEQ ID NO: 36180 - DNA, 980 bp, Artificial Sequence
  chemically treated genomic DNA (Homo sapiens) CpG-island No: 36180
acgaaaacgctcactattccaacaccgacgtaaaaacgctcactattacaacaccgacaaaaaacaccaacacgaaaatattcacaattccaacaccgacataaaaacgctcactattccaacaccgacacgaaaatactcactattccaacaccgacgtaaaaacgctcgctatttcaacaccgacaaaaaacaccgacacgaaaacgctcactattccaacaccgacaaaaaacaccgacacgaaaacactcactattccaacaccgacacgaaaacgttcactatttcaacaccgacacgaaaacgatcactattccaacaccgacacgaaaacgttcactatttcaacaccgacacgaaaacgatcactattccaacaccgacacgaaaacgctcactattccaacaccgacaaaaaacaccgacataaaaatactcactattccaacactaacaaaaaacaccgatacgaaaacgcccactctaccaacaccgacacgaaaacgctcactattacaacaccgacaaaaaacaccgacataaaaacgctcactattccaacaccgacacgaaacaccgacataaaaacgctcactattccaacaccgacacgaaatcgctcactattccaacaccgacacgaaaacactcactattccaacaccgacacgaaacaccgacacgaaaacgctcactattccaacaccgacacgaaaacgctcactattccaacaccgacacgaaacaccgacacgaaaacgctcactattccaacaccgatacgaaacaccaacataaaaacgctcactattacaacaccgatacaaaaatactcactattccaacgctaatacgaaaacgttcactattccaacaccgacacgaaaacgttcacccttccaacaccaacacgaaaacgtttactattccaacaccgacaaaaaacactaacaaaaaaatacacactattccaacac

SEQ ID NO: 36181 - DNA, 509 bp, Artificial Sequence
  chemically treated genomic DNA (Homo sapiens) CpG-island No: 36181
acgcggggaaatagttgtatagttcggtttagagcgttaagcgtatatatcgagtatatttttatacgcgtatatacgcgtttatattcgtttttttttcgggtttcggttttggattcgcgggcgcggattcggtcgttcgttttgggagtcgttatatcgcgcgcgtcgcgttcgtttttttcgtatttttacgcgcgttcggttgggggatttttttcgcgtgttcgaaagggggatatgttatttggatatgtaattgttagtacgggatttgagatttttaaaaaatgaagtcggcgataggattttgggtttgggtgagttttttcgtggcggcggggatcgtttagtttagcgatttttagttaggtgggttttttttggtatttcggtcgtcgaatttgtagtcgtcggcggggttgtttcgagtggtttttttgttttttttatttatttcgggaggcgtggagggatcgtttgatcggggttttttttttgggttttcg

SEQ ID NO: 36182 - DNA, 509 bp, Artificial Sequence
  chemically treated genomic DNA (Homo sapiens) CpG-island No: 36182
cgaaaacccaaaaaaaaaaccccgatcaaacgatccctccacgcctcccgaaataaataaaaaaaacaaaaaaaccactcgaaacaaccccgccgacgactacaaattcgacgaccgaaataccaaaaaaaacccacctaactaaaaatcgctaaactaaacgatccccgccgccacgaaaaaactcacccaaacccaaaatcctatcgccgacttcattttttaaaaatctcaaatcccgtactaacaattacatatccaaataacatatccccctttcgaacacgcgaaaaaaatcccccaaccgaacgcgcgtaaaaatacgaaaaaaacgaacgcgacgcgcgcgatataacgactcccaaaacgaacgaccgaatccgcgcccgcgaatccaaaaccgaaacccgaaaaaaaaacgaatataaacgcgtatatacgcgtataaaaatatactcgatatatacgcttaacgctctaaaccgaactatacaactatttccccgcgt

SEQ ID NO: 36183 - DNA, 509 bp, Artificial Sequence
  chemically treated genomic DNA (Homo sapiens) CpG-island No: 36183
cgaaagtttagggaagaggtttcggttaagcggtttttttacgtttttcgggatgggtgaagagggtaggggagttattcgaggtagtttcgtcggcggttgtaggttcggcgatcggagtgttagaaggaatttatttgattgagaatcgttgggttggacggttttcgtcgttacgagaaggtttatttagatttaaagttttgtcgtcggttttattttttggaagttttagatttcgtgttgataattatatgtttaaatggtatatttttttttcgggtacgcggaggagattttttagtcgggcgcgcgtgggggtgcgaggggggcgggcgcggcgcgcgcggtgtggcgatttttagggcgggcgatcgagttcgcgttcgcgggtttagggtcggggttcgaggagggggcgagtgtgagcgcgtgtgtgcgcgtgtgggagtgtgttcggtgtgtgcgtttggcgttttgggtcggattgtgtagttattttttcgcgt

SEQ ID NO: 36184 - DNA, 509 bp, Artificial Sequence
  chemically treated genomic DNA (Homo sapiens) CpG-island No: 36184
acgcgaaaaaataactacacaatccgacccaaaacgccaaacgcacacaccgaacacactcccacacgcgcacacacgcgctcacactcgccccctcctcgaaccccgaccctaaacccgcgaacgcgaactcgatcgcccgccctaaaaatcgccacaccgcgcgcgccgcgcccgcccccctcgcacccccacgcgcgcccgactaaaaaatctcctccgcgtacccgaaaaaaaaatataccatttaaacatataattatcaacacgaaatctaaaacttccaaaaaataaaaccgacgacaaaactttaaatctaaataaaccttctcgtaacgacgaaaaccgtccaacccaacgattctcaatcaaataaattccttctaacactccgatcgccgaacctacaaccgccgacgaaactacctcgaataactcccctaccctcttcacccatcccgaaaaacgtaaaaaaaccgcttaaccgaaacctcttccctaaactttcg

SEQ ID NO: 36185 - DNA, 1084 bp, Artificial Sequence
  chemically treated genomic DNA (Homo sapiens) CpG-island No: 36185
gcgcgagacgagattaattttcgggataggggagagcggggttattgaacgtaggggatttcgttgagtttttagtttttgagcgtttattttcggtttagttgggggacgcggtttcgggaagaaagttcggaatttcgagtcggttagtcgcgagtagcgagtatcggagcgcgtgggtaggcgcgcggaggtagaggcgggtcggcggttgtttttttaaggggtcggtttttcggcgtcgtcgtttagacgttaggacgtgtcgggttcgtttcgtttcgtttcgaagtcgttcgttttttgtcgagcggcgcgacggtatttgagcgattgcggcggcggcggcggcggcggcggcgtttcggagcgggcggttcgggttgtagtgtcggcgtcgtcgcgttttttcggttttttttttcggtcgtatagggtgagggagagtaggtcgtatcgggacgggcgtcggcggcggggagcgcggggggaggcggcgtcggttcgcgggttttggggtaggcgggagggtcgcgtcgggcgggggggcgcggtcgcggggttcggacgtcgttcgttgggtaggtttcgggtattcggttgtcgtcgcggggtttttgttggggtcgggacgtcgtagggggcgggttcggagggattttttcggtttcgcggggtcgttttgggttcgatttcggttttgtcgcggtattcggggcgcggtcgagggatattttttattttttttaaggacgattttttcgaaggcgaggtcgattcgagcgggttttggggtgatcgaggtatttatttttagttaagtttgagggttttcgggagggaaggcggattatcgttttttcggtcggtggacggaggtagcgcgttttcggcggcgttttcgggtcggagttgggttatatttacgttatgttggagttttagttttcgtcgttgttttcggcggtttgggcgttcgttttttttttcggcgtttttttcgttgttttttgcgagtttttaggttagggcgggaggcggttgggtacggaaagtagtatgaggggggattttggaaaaattt

SEQ ID NO: 36186 - DNA, 1084 bp, Artificial Sequence
  chemically treated genomic DNA (Homo sapiens) CpG-island No: 36186
aaatttttccaaaatcccccctcatactactttccgtacccaaccgcctcccgccctaacctaaaaactcgcaaaaaacaacgaaaaaaacgccgaaaaaaaaaacgaacgcccaaaccgccgaaaacaacgacgaaaactaaaactccaacataacgtaaatataacccaactccgacccgaaaacgccgccgaaaacgcgctacctccgtccaccgaccgaaaaaacgataatccgccttccctcccgaaaaccctcaaacttaactaaaaataaatacctcgatcaccccaaaacccgctcgaatcgacctcgccttcgaaaaaatcgtccttaaaaaaaataaaaaatatccctcgaccgcgccccgaataccgcgacaaaaccgaaatcgaacccaaaacgaccccgcgaaaccgaaaaaatccctccgaacccgccccctacgacgtcccgaccccaacaaaaaccccgcgacgacaaccgaatacccgaaacctacccaacgaacgacgtccgaaccccgcgaccgcgcccccccgcccgacgcgaccctcccgcctaccccaaaacccgcgaaccgacgccgcctccccccgcgctccccgccgccgacgcccgtcccgatacgacctactctccctcaccctatacgaccgaaaaaaaaaaccgaaaaaacgcgacgacgccgacactacaacccgaaccgcccgctccgaaacgccgccgccgccgccgccgccgccgcaatcgctcaaataccgtcgcgccgctcgacaaaaaacgaacgacttcgaaacgaaacgaaacgaacccgacacgtcctaacgtctaaacgacgacgccgaaaaaccgaccccttaaaaaaacaaccgccgacccgcctctacctccgcgcgcctacccacgcgctccgatactcgctactcgcgactaaccgactcgaaattccgaactttcttcccgaaaccgcgtcccccaactaaaccgaaaataaacgctcaaaaactaaaaactcaacgaaatcccctacgttcaataaccccgctctcccctatcccgaaaattaatctcgtctcgcgc

SEQ ID NO: 36187 - DNA, 1084 bp, Artificial Sequence
  chemically treated genomic DNA (Homo sapiens) CpG-island No: 36187
ggatttttttaaagtttttttttatgttgtttttcgtgtttaatcgtttttcgttttgatttggggattcgtaaagggtagcgggaggggcgtcggggaagggggcgagcgtttagatcgtcggaggtagcggcgaggattggaattttagtatggcgtaagtgtggtttagtttcggttcggggacgtcgtcggagacgcgttgttttcgtttatcggtcgaggaggcggtaattcgttttttttttcgggggtttttaggtttggttaaaaataggtgtttcggttattttagggttcgttcgggtcgatttcgttttcgggagagtcgtttttggggagggtggggggtgtttttcggtcgcgtttcgggtgtcgcgatagagtcggggtcgggtttagagcggtttcgcgaggtcgaggaggttttttcgagttcgttttttgcggcgtttcggttttaataagagtttcgcggcggtaatcggatgttcgaggtttatttagcgggcggcgttcgggtttcgcggtcgcgttttttcgttcggcgcggttttttcgtttgttttaggattcgcgggtcggcgtcgttttttttcgcgtttttcgtcgtcggcgttcgtttcggtgcggtttgtttttttttattttgtgcggtcgggaaaggagatcgggaagacgcggcggcgtcggtattatagttcgggtcgttcgtttcgaggcgtcgtcgtcgtcgtcgtcgtcgtcgtagtcgtttaggtgtcgtcgcgtcgttcggtaggaaacgggcggtttcggggcggggcggggcggattcggtacgttttggcgtttgggcggcggcgtcgggagatcggttttttaaagggatagtcgtcggttcgtttttgttttcgcgcgtttgtttacgcgtttcggtattcgttgttcgcggttggtcggttcgggatttcgggtttttttttcgagatcgcgttttttagttgggtcgaaggtggacgtttaggggttggaggtttagcggaattttttgcgtttagtagtttcgtttttttttgtttcgaaggttggtttcgtttcgcgt

SEQ ID NO: 36188 - DNA, 1084 bp, Artificial Sequence
  chemically treated genomic DNA (Homo sapiens) CpG-island No: 36188
acgcgaaacgaaaccaaccttcgaaacaaaaaaaaacgaaactactaaacgcaaaaaattccgctaaacctccaacccctaaacgtccaccttcgacccaactaaaaaacgcgatctcgaaaaaaaaacccgaaatcccgaaccgaccaaccgcgaacaacgaataccgaaacgcgtaaacaaacgcgcgaaaacaaaaacgaaccgacgactatccctttaaaaaaccgatctcccgacgccgccgcccaaacgccaaaacgtaccgaatccgccccgccccgccccgaaaccgcccgtttcctaccgaacgacgcgacgacacctaaacgactacgacgacgacgacgacgacgacgacgcctcgaaacgaacgacccgaactataataccgacgccgccgcgtcttcccgatctcctttcccgaccgcacaaaataaaaaaaaacaaaccgcaccgaaacgaacgccgacgacgaaaaacgcgaaaaaaaacgacgccgacccgcgaatcctaaaacaaacgaaaaaaccgcgccgaacgaaaaaacgcgaccgcgaaacccgaacgccgcccgctaaataaacctcgaacatccgattaccgccgcgaaactcttattaaaaccgaaacgccgcaaaaaacgaactcgaaaaaacctcctcgacctcgcgaaaccgctctaaacccgaccccgactctatcgcgacacccgaaacgcgaccgaaaaacaccccccaccctccccaaaaacgactctcccgaaaacgaaatcgacccgaacgaaccctaaaataaccgaaacacctatttttaaccaaacctaaaaacccccgaaaaaaaaaacgaattaccgcctcctcgaccgataaacgaaaacaacgcgtctccgacgacgtccccgaaccgaaactaaaccacacttacgccatactaaaattccaatcctcgccgctacctccgacgatctaaacgctcgcccccttccccgacgcccctcccgctaccctttacgaatccccaaatcaaaacgaaaaacgattaaacacgaaaaacaacataaaaaaaaactttaaaaaaatcc

SEQ ID NO: 36189 - DNA, 734 bp, Artificial Sequence
  chemically treated genomic DNA (Homo sapiens) CpG-island No: 36189
gttcgcggagtttttgttcgtgtcgtacgttcgggatcgcgaaagtcggggtcgtttcggtttgcgttcgcgtttttaggcgttaatttttttatgggatcggttcgaattttttcgaatcgtatttggcggcgtcgcggttaaggtttcgcgaggatttttcgggcgtcgcgaacgttcgttcgttcgttcgttcgttcgtttcggtcgtcgtcgtcgggcgggttttgggtcggggaggggagtttcgaggagtttttcgaggtcgtttagattttcgggtttcggcggagtttcggtttcgagacgtagggacgattcgcgagcgcggcgggtttcgtttttttttttttcgtttttcgcgggttttagtttgatttttatttggttttcgggcggggcgtgagtagtagtcgggggcgcggaggtttcgcgcgcgacgagggcggcgggggttgggacgatagcggttcgcgcggtttttacgttttcgttgtagttaggagttgaatatttcgtttttttgtacggcgttaatgaggaagatagttacggtaatagtattatttatttttcggcgcgaaacggttgggtcgttttttttttatacgcgcgggcgagcggggcgtggggaaggcgttcgggtttttttggtttgcgttcggggggtattattcgtttcgcgtttcggtattcgtcgaggtttttagatatatttgttttgttgtgggggg

SEQ ID NO: 36190 - DNA, 734 bp, Artificial Sequence
  chemically treated genomic DNA (Homo sapiens) CpG-island No: 36190
ccccccacaacaaaacaaatatatctaaaaacctcgacgaataccgaaacgcgaaacgaataataccccccgaacgcaaaccaaaaaaacccgaacgccttccccacgccccgctcgcccgcgcgtataaaaaaaaaacgacccaaccgtttcgcgccgaaaaataaataatactattaccgtaactatcttcctcattaacgccgtacaaaaaaacgaaatattcaactcctaactacaacgaaaacgtaaaaaccgcgcgaaccgctatcgtcccaacccccgccgccctcgtcgcgcgcgaaacctccgcgcccccgactactactcacgccccgcccgaaaaccaaataaaaatcaaactaaaacccgcgaaaaacgaaaaaaaaaaaaacgaaacccgccgcgctcgcgaatcgtccctacgtctcgaaaccgaaactccgccgaaacccgaaaatctaaacgacctcgaaaaactcctcgaaactcccctccccgacccaaaacccgcccgacgacgacgaccgaaacgaacgaacgaacgaacgaacgaacgttcgcgacgcccgaaaaatcctcgcgaaaccttaaccgcgacgccgccaaatacgattcgaaaaaattcgaaccgatcccataaaaaaattaacgcctaaaaacgcgaacgcaaaccgaaacgaccccgactttcgcgatcccgaacgtacgacacgaacaaaaactccgcgaac

SEQ ID NO: 36191 - DNA, 734 bp, Artificial Sequence
  chemically treated genomic DNA (Homo sapiens) CpG-island No: 36191
ttttttatagtaaggtaggtgtgtttgggggtttcggcgggtgtcggggcgcggggcggatggtgtttttcgggcgtaggttagggaggttcgagcgttttttttacgtttcgttcgttcgcgcgtgtgaggggagggcggtttagtcgtttcgcgtcgggaggtaggtggtgttgttgtcgtgattgttttttttattggcgtcgtgtagagaggcggaatgtttaatttttaattgtagcggaaacgtgggagtcgcgcgggtcgttgtcgttttaattttcgtcgttttcgtcgcgcgcggggttttcgcgttttcggttgttgtttacgtttcgttcgggagttaggtaggggttaggttggagttcgcggagggcggggagggagggggcgaggttcgtcgcgttcgcgagtcgtttttgcgtttcggggtcgaggtttcgtcggagttcgggagtttaggcggtttcgggaggtttttcggggttttttttttcgatttagggttcgttcggcggcggcggtcggagcgagcgggcgggcgagcgagcgagcgttcgcggcgttcgggaagttttcgcgggattttggtcgcggcgtcgttaagtgcggttcgggagagttcgggtcggttttatggagaagttggcgtttggaggcgcgggcgtaggtcggagcggtttcggttttcgcggtttcgggcgtgcggtacgggtaggggtttcgcgagt

SEQ ID NO: 36192 - DNA, 734 bp, Artificial Sequence
  chemically treated genomic DNA (Homo sapiens) CpG-island No: 36192
actcgcgaaacccctacccgtaccgcacgcccgaaaccgcgaaaaccgaaaccgctccgacctacgcccgcgcctccaaacgccaacttctccataaaaccgacccgaactctcccgaaccgcacttaacgacgccgcgaccaaaatcccgcgaaaacttcccgaacgccgcgaacgctcgctcgctcgcccgcccgctcgctccgaccgccgccgccgaacgaaccctaaatcgaaaaaaaaaaccccgaaaaacctcccgaaaccgcctaaactcccgaactccgacgaaacctcgaccccgaaacgcaaaaacgactcgcgaacgcgacgaacctcgccccctccctccccgccctccgcgaactccaacctaacccctacctaactcccgaacgaaacgtaaacaacaaccgaaaacgcgaaaaccccgcgcgcgacgaaaacgacgaaaattaaaacgacaacgacccgcgcgactcccacgtttccgctacaattaaaaattaaacattccgcctctctacacgacgccaataaaaaaaacaatcacgacaacaacaccacctacctcccgacgcgaaacgactaaaccgccctcccctcacacgcgcgaacgaacgaaacgtaaaaaaaacgctcgaacctccctaacctacgcccgaaaaacaccatccgccccgcgccccgacacccgccgaaacccccaaacacacctaccttactataaaaaa

SEQ ID NO: 36193 - DNA, 1179 bp, Artificial Sequence
  chemically treated genomic DNA (Homo sapiens) CpG-island No: 36193
  unsure (1130)
cgcggggtttcggagaggggtagtttagaggggtcgggtttgggagtgagattatagcgcgcgttcggtttaggtaaagttcgcggttttcgttttcgtcgtttagtgtattcgcgggaaaggtagtaaagcgagcggcgttttagtgattgtgcggttcgttcggcggggtgtgtgcgtgtgtgtgtgtgcgtgtgtgtgcgtggtgtgtgtgatgtgagtgtggtgcgtatacgggtgtcgtcggggcgtaggcggtgttttcggcgggtgttttgtggttttattaggtagtggttgggttcggttggggcgttcgcgcgggtttcggcgttgacgggcgttttttggcggtcgcgcggacgaggtgcggtttcggcgaggtattggcgcgacgttcgtttcggtttttggcgtttttttgcggcggttttcgggtagcgcgtttgtttgggacgaggtcggttcggaggggttttcggtattttgtaggttggcgattttttcgggttggtgggttttcgcgggtcgcgaggaggtttaggcgtcggggcggggaggtcgcgtatggggttcgtagcggcgggacgggtcgcgggggagaagcggtttttagaggggttttgagtttttcgttcggtttcgtagttgatagggtcgtgtcgtgtcgagggttgtgttattcggcgtagaacggggtggggcgggggtagtaagaggggaaagggggatgggcgagggggaggagaggatgaggaggggaggaggggaagggggatgggcgagggggaggagaggacgaggaggagaggaggggaagggggatgggcgagggggaggagaggatgaggaggggaggaggggaagggggatgggcgagggggaggggaggggaggaggggaagggggatgggcgagggggaggagaggatgaggaggggaggaggggaagggggatgggcgagggggaggagaggattaggaggggaggaggggaaacggggatgggcgagggggaggataggatgaggaggaaaagaggcgaagggggatggtcgaaggggatgagatgatgatgaagagaagatgggaaaggggatgggttatggcgaaagagaggatgaagaggngaggacggggtatgaggatggtttatcggggagtatatgattatgaagt

SEQ ID NO: 36194 - DNA, 1179 bp, Artificial Sequence
  chemically treated genomic DNA (Homo sapiens) CpG-island No: 36194
  unsure (50)
acttcataatcatatactccccgataaaccatcctcataccccgtcctcncctcttcatcctctctttcgccataacccatcccctttcccatcttctcttcatcatcatctcatccccttcgaccatcccccttcgcctcttttcctcctcatcctatcctccccctcgcccatccccgtttcccctcctcccctcctaatcctctcctccccctcgcccatcccccttcccctcctcccctcctcatcctctcctccccctcgcccatcccccttcccctcctcccctcccctccccctcgcccatcccccttcccctcctcccctcctcatcctctcctccccctcgcccatcccccttcccctcctctcctcctcgtcctctcctccccctcgcccatcccccttcccctcctcccctcctcatcctctcctccccctcgcccatccccctttcccctcttactacccccgccccaccccgttctacgccgaataacacaaccctcgacacgacacgaccctatcaactacgaaaccgaacgaaaaactcaaaacccctctaaaaaccgcttctcccccgcgacccgtcccgccgctacgaaccccatacgcgacctccccgccccgacgcctaaacctcctcgcgacccgcgaaaacccaccaacccgaaaaaatcgccaacctacaaaataccgaaaacccctccgaaccgacctcgtcccaaacaaacgcgctacccgaaaaccgccgcaaaaaaacgccaaaaaccgaaacgaacgtcgcgccaatacctcgccgaaaccgcacctcgtccgcgcgaccgccaaaaaacgcccgtcaacgccgaaacccgcgcgaacgccccaaccgaacccaaccactacctaataaaaccacaaaacacccgccgaaaacaccgcctacgccccgacgacacccgtatacgcaccacactcacatcacacacaccacgcacacacacgcacacacacacacgcacacaccccgccgaacgaaccgcacaatcactaaaacgccgctcgctttactacctttcccgcgaatacactaaacgacgaaaacgaaaaccgcgaactttacctaaaccgaacgcgcgctataatctcactcccaaacccgacccctctaaactacccctctccgaaaccccgcg

SEQ ID NO: 36195 - DNA, 1179 bp, Artificial Sequence
  chemically treated genomic DNA (Homo sapiens) CpG-island No: 36195
  unsure (50)
gttttatgattatgtgtttttcgatggattatttttatgtttcgtttttntttttttattttttttttcgttatagtttatttttttttttattttttttttattattattttatttttttcgattattttttttcgtttttttttttttttattttgttttttttttcgtttattttcgtttttttttttttttttttaatttttttttttttttcgtttatttttttttttttttttttttttttatttttttttttttttcgtttattttttttttttttttttttttttttttttttcgtttatttttttttttttttttttttttttatttttttttttttttcgtttattttttttttttttttttttttttcgtttttttttttttttcgtttatttttttttttttttttttttttttatttttttttttttttcgtttatttttttttttttttttattattttcgttttatttcgttttgcgtcgagtggtatagttttcggtacggtacggttttgttagttacgaagtcgggcgagaggtttaaggtttttttggagatcgtttttttttcgcggttcgtttcgtcgttgcggattttatgcgcggttttttcgtttcggcgtttgggttttttcgcggttcgcgggggtttattaattcggagaggtcgttagtttgtagggtgtcgggggttttttcgagtcgatttcgttttaggtagacgcgttgttcggagatcgtcgtaagggggcgttaggggtcggggcggacgtcgcgttagtgtttcgtcgggatcgtatttcgttcgcgcggtcgttagagggcgttcgttagcgtcggagttcgcgcggacgttttagtcgagtttagttattgtttggtggagttatagggtattcgtcggaaatatcgtttgcgtttcgacggtattcgtgtgcgtattatatttatattatatatattacgtatatatacgtatatatatatacgtatatatttcgtcgagcgggtcgtatagttattggggcgtcgttcgttttgttgtttttttcgcgggtgtattgagcggcgggagcgggagtcgcgggttttgtttgagtcgggcgcgcgttgtggttttatttttagattcgatttttttgagttgttttttttcgaggtttcgcg

SEQ ID NO: 36196 - DNA, 1179 bp, Artificial Sequence
  chemically treated genomic DNA (Homo sapiens) CpG-island No: 36196
  unsure (1130)
cgcgaaacctcgaaaaaaaacaactcaaaaaaatcgaatctaaaaataaaaccacaacgcgcgcccgactcaaacaaaacccgcgactcccgctcccgccgctcaatacacccgcgaaaaaaacaacaaaacgaacgacgccccaataactatacgacccgctcgacgaaatatatacgtatatatatatacgtatatatacgtaatatatataatataaatataatacgcacacgaataccgtcgaaacgcaaacgatatttccgacgaataccctataactccaccaaacaataactaaactcgactaaaacgtccgcgcgaactccgacgctaacgaacgccctctaacgaccgcgcgaacgaaatacgatcccgacgaaacactaacgcgacgtccgccccgacccctaacgcccccttacgacgatctccgaacaacgcgtctacctaaaacgaaatcgactcgaaaaaacccccgacaccctacaaactaacgacctctccgaattaataaacccccgcgaaccgcgaaaaaacccaaacgccgaaacgaaaaaaccgcgcataaaatccgcaacgacgaaacgaaccgcgaaaaaaaaacgatctccaaaaaaaccttaaacctctcgcccgacttcgtaactaacaaaaccgtaccgtaccgaaaactataccactcgacgcaaaacgaaataaaacgaaaataataaaaaaaaaaaaaaaaataaacgaaaaaaaaaaaaaaataaaaaaaaaaaaaaaaaaaaaaaaataaacgaaaaaaaaaaaaaaacgaaaaaaaaaaaaaaaaaaaaaaaataaacgaaaaaaaaaaaaaaataaaaaaaaaaaaaaaaaaaaaaaaataaacgaaaaaaaaaaaaaaaaaaaaaaaaaaaaaaaataaacgaaaaaaaaaaaaaaataaaaaaaaaaaaaaaaaaaaaaaaataaacgaaaaaaaaaaaaaaattaaaaaaaaaaaaaaaaaaacgaaaataaacgaaaaaaaaaacaaaataaaaaaaaaaaaaaacgaaaaaaaataatcgaaaaaaataaaataataataaaaaaaaaataaaaaaaaaaataaactataacgaaaaaaaaaataaaaaaanaaaaacgaaacataaaaataatccatcgaaaaacacataatcataaaac

SEQ ID NO: 36197 - DNA, 667 bp, Artificial Sequence
  chemically treated genomic DNA (Homo sapiens) CpG-island No: 36197
ttagatacggcgtttagttttcgggtttcgggtttagttgagttagggcggcgttttagtcgagtgcggcgtcggaaattcgttcggttgcgttcgaattttcggttagaggttagcgttggaagtttagattatagtattcgggtttaaataggagcggaggcgtcgggaagggtcgggggggtcggttagggtcggttagtttggaagtcgtattttcgcggttttagacgtcggtagggcggagttacgcggtcgtagttttagtcgagacgcgagttcgtggttcgggcgtatgggggttttaacgggagcggttgcgtcgttcggtcgggttaacgtcgtgcgtatgcgtcgattcggcgttattttggtggtcgggcgcggaggtgattttatattgaggcgagcgcggcggtcggggtggtagtggtagtgttcgtgtgtttaggtttgaatcgtcgagggaggaggcggtggaggaagaggtggcggcggtggcggtggtcgtagcggtggcggaggaggcgggtacgaattagttgcgggcggagatatggttaatatcgcggtgtagcgaattaagcgggagtttaaggaggtgttgaagagcgaggaggttagaaatgaattttcggatattttttatttttgtttggggcgggag

SEQ ID NO: 36198 - DNA, 667 bp, Artificial Sequence
  chemically treated genomic DNA (Homo sapiens) CpG-island No: 36198
ctcccgccccaaacaaaaataaaaaatatccgaaaattcatttctaacctcctcgctcttcaacacctccttaaactcccgcttaattcgctacaccgcgatattaaccatatctccgcccgcaactaattcgtacccgcctcctccgccaccgctacgaccaccgccaccgccgccacctcttcctccaccgcctcctccctcgacgattcaaacctaaacacacgaacactaccactaccaccccgaccgccgcgctcgcctcaatataaaatcacctccgcgcccgaccaccaaaataacgccgaatcgacgcatacgcacgacgttaacccgaccgaacgacgcaaccgctcccgttaaaacccccatacgcccgaaccacgaactcgcgtctcgactaaaactacgaccgcgtaactccgccctaccgacgtctaaaaccgcgaaaatacgacttccaaactaaccgaccctaaccgacccccccgacccttcccgacgcctccgctcctatttaaacccgaatactataatctaaacttccaacgctaacctctaaccgaaaattcgaacgcaaccgaacgaatttccgacgccgcactcgactaaaacgccgccctaactcaactaaacccgaaacccgaaaactaaacgccgtatctaa

SEQ ID NO: 36199 - DNA, 667 bp, Artificial Sequence
  chemically treated genomic DNA (Homo sapiens) CpG-island No: 36199
ttttcgttttaggtagaggtgggggatattcgggagtttatttttgattttttcgttttttagtatttttttgaattttcgtttgattcgttgtatcgcgatgttggttatgttttcgttcgtagttgattcgtattcgtttttttcgttatcgttacgattatcgttatcgtcgttatttttttttttatcgttttttttttcggcgatttagatttgagtatacgaatattgttattattatttcggtcgtcgcgttcgttttagtgtggaattattttcgcgttcggttattaaaatggcgtcgggtcggcgtatgcgtacgacgttgattcggtcgggcggcgtagtcgttttcgttggagtttttatacgttcgagttacgagttcgcgtttcggttggggttgcggtcgcgtggtttcgttttgtcggcgtttggggtcgcgagggtgcggtttttaagttggtcggttttagtcggttttttcggtttttttcggcgttttcgtttttgtttaaattcgggtgttgtggtttgggtttttagcgttggtttttgatcgaaggttcgggcgtaatcgaacgggttttcgacgtcgtattcggttggaacgtcgttttgatttagttagattcggaattcggaggttgaacgtcgtgtttag

SEQ ID NO: 36200 - DNA, 667 bp, Artificial Sequence
  chemically treated genomic DNA (Homo sapiens) CpG-island No: 36200
ctaaacacgacgttcaacctccgaattccgaatctaactaaatcaaaacgacgttccaaccgaatacgacgtcgaaaacccgttcgattacgcccgaaccttcgatcaaaaaccaacgctaaaaacccaaaccacaacacccgaatttaaacaaaaacgaaaacgccgaaaaaaaccgaaaaaaccgactaaaaccgaccaacttaaaaaccgcaccctcgcgaccccaaacgccgacaaaacgaaaccacgcgaccgcaaccccaaccgaaacgcgaactcgtaactcgaacgtataaaaactccaacgaaaacgactacgccgcccgaccgaatcaacgtcgtacgcatacgccgacccgacgccattttaataaccgaacgcgaaaataattccacactaaaacgaacgcgacgaccgaaataataataacaatattcgtatactcaaatctaaatcgccgaaaaaaaaaacgataaaaaaaaaaataacgacgataacgataatcgtaacgataacgaaaaaaacgaatacgaatcaactacgaacgaaaacataaccaacatcgcgatacaacgaatcaaacgaaaattcaaaaaaatactaaaaaacgaaaaaatcaaaaataaactcccgaatatcccccacctctacctaaaacgaaaa

SEQ ID NO: 36201 - DNA, 531 bp, Artificial Sequence
  chemically treated genomic DNA (Homo sapiens) CpG-island No: 36201
tttttcgattttttaaaggcgttttttttttagtttttttcgattttagggatttgtaatttgggatttaaagttttcgagagggtagaacgattatttaaaacgaattgcgttagcgagtgttgtcgttttttttaacggttttggaagattatcgtttcgggttttaggcgcgttttgtttcgtgtttattttcgatattatttttaagagcgttatcgcggagcgggcgttttttggacgttgcggggttattcgggttcggtaggttattcgggttcggtagatttcgggcgggttttgagggttgagttaggtttaagagggcgggcggggtcgcggggtatcgataggtcgagggtagggaattgattcggtttacgtagattttcgcgtcgtttttttttcgtttatcgtagttattggtcgattttcgattcgttttttgttttttggggtcgtttatttaatttattagttttttaaattttttttgggattttagtggcgagtattcgtcgttggtttttt

SEQ ID NO: 36202 - DNA, 531 bp, Artificial Sequence
  chemically treated genomic DNA (Homo sapiens) CpG-island No: 36202
aaaaaaccaacgacgaatactcgccactaaaatcccaaaaaaaatttaaaaaactaataaattaaataaacgaccccaaaaaacaaaaaacgaatcgaaaatcgaccaataactacgataaacgaaaaaaaaacgacgcgaaaatctacgtaaaccgaatcaattccctaccctcgacctatcgataccccgcgaccccgcccgccctcttaaacctaactcaaccctcaaaacccgcccgaaatctaccgaacccgaataacctaccgaacccgaataaccccgcaacgtccaaaaaacgcccgctccgcgataacgctcttaaaaataatatcgaaaataaacacgaaacaaaacgcgcctaaaacccgaaacgataatcttccaaaaccgttaaaaaaaacgacaacactcgctaacgcaattcgttttaaataatcgttctaccctctcgaaaactttaaatcccaaattacaaatccctaaaatcgaaaaaaactaaaaaaaaaacgcctttaaaaaatcgaaaaa

SEQ ID NO: 36203 - DNA, 531 bp, Artificial Sequence
  chemically treated genomic DNA (Homo sapiens) CpG-island No: 36203
agaaggttagcggcgagtgttcgttattagggttttagggagggtttggaaaattgatgagttaagtgagcgattttaggggatagagggcgagtcgagagtcggttaatggttgcggtgggcggggagaagacgacgcggggatttgcgtgggtcgggttaattttttattttcgatttgtcgatgtttcgcggtttcgttcgtttttttaagtttggtttagtttttagggttcgttcgaagtttatcgagttcgagtggtttatcgagttcgagtggtttcgtagcgtttaggaggcgttcgtttcgcggtggcgtttttggaggtggtgtcggaggtaggtacgggataggacgcgtttggggttcggggcggtggttttttagggtcgttggggagggcggtagtattcgttggcgtagttcgttttggatggtcgttttgttttttcgggggttttgaattttaagttgtagatttttgaggtcggaggaggttaggagaagggcgtttttggaggatcgggagg

SEQ ID NO: 36204 - DNA, 531 bp, Artificial Sequence
  chemically treated genomic DNA (Homo sapiens) CpG-island No: 36204
cctcccgatcctccaaaaacgcccttctcctaacctcctccgacctcaaaaatctacaacttaaaattcaaaacccccgaaaaaacaaaacgaccatccaaaacgaactacgccaacgaatactaccgccctccccaacgaccctaaaaaaccaccgccccgaaccccaaacgcgtcctatcccgtacctacctccgacaccacctccaaaaacgccaccgcgaaacgaacgcctcctaaacgctacgaaaccactcgaactcgataaaccactcgaactcgataaacttcgaacgaaccctaaaaactaaaccaaacttaaaaaaacgaacgaaaccgcgaaacatcgacaaatcgaaaataaaaaattaacccgacccacgcaaatccccgcgtcgtcttctccccgcccaccgcaaccattaaccgactctcgactcgccctctatcccctaaaatcgctcacttaactcatcaattttccaaaccctccctaaaaccctaataacgaacactcgccgctaaccttct

SEQ ID NO: 36205 - DNA, 591 bp, Artificial Sequence
  chemically treated genomic DNA (Homo sapiens) CpG-island No: 36205
atggtcggtacgcgttgggtattcggggcgttgtttcggggttgcggttgtaattgtagtagttgtcggcgtatcggcgtcgtttgtttgtttttttatttcgtcgttggttttatttcgtcgggcgtttcgggtcgtcgtcgtttgttgttgttgttcggggtcgtcgcggtcgttgttttttagacgcgtggtttttagatcgggtttgtgtttttcgggaggttggcggggtttttcgttgtggttatttttgtcgcggtcgcggtcgtcgcgttttattttgtttttcgtgtttttttgttgtcgtagtcgttggcggcggcggtcgtcgtttcgacgcgtagttatagttaggtacgtgggcgtcgtgagggatttggcgcgagatttttttcgggtcgcgtgtacgcgttttcgcgttttttcgttttttcgtgtgcgtttcgcgggtacgttcggggattcgcgatattcgtcgtatattcgttttcgtttattttgtgtttttattgggttttggaataagggaagtttttttaggcgtcgggttttttgtttgttttgttttcgtttcgagtttttggtcgg

SEQ ID NO: 36206 - DNA, 591 bp, Artificial Sequence
  chemically treated genomic DNA (Homo sapiens) CpG-island No: 36206
ccgaccaaaaactcgaaacgaaaacaaaacaaacaaaaaacccgacgcctaaaaaaacttcccttattccaaaacccaataaaaacacaaaataaacgaaaacgaatatacgacgaatatcgcgaatccccgaacgtacccgcgaaacgcacacgaaaaaacgaaaaaacgcgaaaacgcgtacacgcgacccgaaaaaaatctcgcgccaaatccctcacgacgcccacgtacctaactataactacgcgtcgaaacgacgaccgccgccgccaacgactacgacaacaaaaaaacacgaaaaacaaaataaaacgcgacgaccgcgaccgcgacaaaaataaccacaacgaaaaaccccgccaacctcccgaaaaacacaaacccgatctaaaaaccacgcgtctaaaaaacaacgaccgcgacgaccccgaacaacaacaacaaacgacgacgacccgaaacgcccgacgaaataaaaccaacgacgaaataaaaaaacaaacaaacgacgccgatacgccgacaactactacaattacaaccgcaaccccgaaacaacgccccgaatacccaacgcgtaccgaccat

SEQ ID NO: 36207 - DNA, 591 bp, Artificial Sequence
  chemically treated genomic DNA (Homo sapiens) CpG-island No: 36207
tcgattagagattcgaggcgagaataaaataagtagaagattcgacgtttgggagagttttttttgttttagggtttaataggagtatagggtggacgggggcgggtgtgcggcgagtgtcgcggattttcgggcgtgttcgcgaggcgtatacggagggacggaggggcgcgggggcgcgtgtacgcggttcgggagggatttcgcgttaggttttttacggcgtttacgtatttggttgtagttgcgcgtcgggacggcggtcgtcgtcgttagcgattgcggtagtagagaggtacggagggtagagtaggacgcggcggtcgcggtcgcggtagaggtggttatagcgggaggtttcgttagtttttcgggaggtataggttcggtttggaggttacgcgtttgggaggtagcggtcgcggcggtttcgagtagtagtagtaggcggcggcggttcgagacgttcgacgggatagagttagcggcggagtagaagggtaggtaggcggcgtcggtgcgtcggtagttgttgtagttatagtcgtagtttcggagtagcgtttcgagtatttagcgcgtgtcggttat

SEQ ID NO: 36208 - DNA, 591 bp, Artificial Sequence
  chemically treated genomic DNA (Homo sapiens) CpG-island No: 36208
ataaccgacacgcgctaaatactcgaaacgctactccgaaactacgactataactacaacaactaccgacgcaccgacgccgcctacctacccttctactccgccgctaactctatcccgtcgaacgtctcgaaccgccgccgcctactactactactcgaaaccgccgcgaccgctacctcccaaacgcgtaacctccaaaccgaacctatacctcccgaaaaactaacgaaacctcccgctataaccacctctaccgcgaccgcgaccgccgcgtcctactctaccctccgtacctctctactaccgcaatcgctaacgacgacgaccgccgtcccgacgcgcaactacaaccaaatacgtaaacgccgtaaaaaacctaacgcgaaatccctcccgaaccgcgtacacgcgcccccgcgcccctccgtccctccgtatacgcctcgcgaacacgcccgaaaatccgcgacactcgccgcacacccgcccccgtccaccctatactcctattaaaccctaaaacaaaaaaaactctcccaaacgtcgaatcttctacttattttattctcgcctcgaatctctaatcga

SEQ ID NO: 36209 - DNA, 882 bp, Artificial Sequence
  chemically treated genomic DNA (Homo sapiens) CpG-island No: 36209
tcgattttattcgttcgttgttttgtacgttattgaagtgatcgttttttttgaatttcggtatttaataattcggaagttggacgtttgaagtttatgcggtttagcgtttttatttcggttcgtgttgggggcggggagagaagttcgtagggtttttggcgcggggttcgggtagtcgcggtggcgcggtttatgttcggggttatttttcgcgtttcggggtttcgtaggcgcgagcgcggcgagcggcgcgcggttgagttcgtaggacgttttttagtttcgtcggcggcgcgtcgcgagttttttatttttcgtttatcggcggttgcgcgtattgtatattcgtttgtcgtcgtcgtcgtacgtcgtttgttttttgcgcgtcgtcgtcgcgtttagcgttcgggttcgcgatatcgttcgttaagcgtcgggtcgagtttacgtagtcgcggtttggcggtttcgcggcggcggcgggtgcgggcggtttggtcggtgtcggttaaagggacgagttgtaaatattttaggaagtgataagtcgattttttttttttcgggagtcgttcgtataaagcgttcggcgtcggtaggcgagcgtgcgcgcggcggacgcgcggcgggtatttcggacgatttggcgagcgttggcggtgacggcgcggggttcgcgttcggagcgtttcgtcgcgtatagtaagcgattcggggtcgggcggcggcggcggtggtcggggggttggtttcgagcgaggttcgggtcgtgtgcgtttcggtcgttggttggagggagttcggttcgcgtgcgtaatgggtttgttttttttttttttttttttttaatgttgttggttttttttttttttgttttgt

SEQ ID NO: 36210 - DNA, 882 bp, Artificial Sequence
  chemically treated genomic DNA (Homo sapiens) CpG-island No: 36210
acaaaacaaaaaaaaaaaaaaccaacaacattaaaaaaaaaaaaaaaaaaaaaacaaacccattacgcacgcgaaccgaactccctccaaccaacgaccgaaacgcacacgacccgaacctcgctcgaaaccaaccccccgaccaccgccgccgccgcccgaccccgaatcgcttactatacgcgacgaaacgctccgaacgcgaaccccgcgccgtcaccgccaacgctcgccaaatcgtccgaaatacccgccgcgcgtccgccgcgcgcacgctcgcctaccgacgccgaacgctttatacgaacgactcccgaaaaaaaaaaaatcgacttatcacttcctaaaatatttacaactcgtccctttaaccgacaccgaccaaaccgcccgcacccgccgccgccgcgaaaccgccaaaccgcgactacgtaaactcgacccgacgcttaacgaacgatatcgcgaacccgaacgctaaacgcgacgacgacgcgcaaaaaacaaacgacgtacgacgacgacgacaaacgaatatacaatacgcgcaaccgccgataaacgaaaaataaaaaactcgcgacgcgccgccgacgaaactaaaaaacgtcctacgaactcaaccgcgcgccgctcgccgcgctcgcgcctacgaaaccccgaaacgcgaaaaataaccccgaacataaaccgcgccaccgcgactacccgaaccccgcgccaaaaaccctacgaacttctctccccgcccccaacacgaaccgaaataaaaacgctaaaccgcataaacttcaaacgtccaacttccgaattattaaataccgaaattcaaaaaaaacgatcacttcaataacgtacaaaacaacgaacgaataaaatcga

SEQ ID NO: 36211 - DNA, 882 bp, Artificial Sequence
  chemically treated genomic DNA (Homo sapiens) CpG-island No: 36211
ataaggtagaaaaaaaggaaattagtaatattaggaaaaaagaaaaaaaaaaggtaagtttattgcgtacgcgagtcgggttttttttagttagcggtcgggacgtatacggttcggatttcgttcggggttagtttttcggttatcgtcgtcgtcgttcggtttcgggtcgtttattgtgcgcggcggggcgtttcgggcgcggatttcgcgtcgttatcgttagcgttcgttaagtcgttcggggtgttcgtcgcgcgttcgtcgcgcgtacgttcgtttgtcggcgtcgagcgttttgtacgagcgattttcggggaggaggaaatcgatttgttattttttgaagtgtttgtaattcgtttttttaatcggtatcggttaggtcgttcgtattcgtcgtcgtcgcggagtcgttagatcgcggttgcgtgaattcggttcggcgtttagcgggcggtgtcgcgggttcgggcgttaggcgcggcggcggcgcgtaggaggtaggcggcgtgcggcggcggcggtaggcgagtgtgtagtgcgcgtagtcgtcgatgggcggggagtgagggattcgcggcgcgtcgtcggcggggttagagggcgttttgcgggtttagtcgcgcgtcgttcgtcgcgttcgcgtttgcgaggtttcgggacgcgggaagtggtttcgggtatgggtcgcgttatcgcggttgttcgggtttcgcgttagaggttttacgggttttttttttcgtttttagtacgagtcgggatgaaaacgttgggtcgtataggttttaggcgtttagttttcgggttgttagatgtcgaggtttaaaagaaacgattattttagtggcgtgtaggatagcgggcgggtggggtcgg

SEQ ID NO: 36212 - DNA, 882 bp, Artificial Sequence
  chemically treated genomic DNA (Homo sapiens) CpG-island No: 36212
ccgaccccacccgcccgctatcctacacgccactaaaataatcgtttcttttaaacctcgacatctaacaacccgaaaactaaacgcctaaaacctatacgacccaacgttttcatcccgactcgtactaaaaacgaaaaaaaaaacccgtaaaacctctaacgcgaaacccgaacaaccgcgataacgcgacccatacccgaaaccacttcccgcgtcccgaaacctcgcaaacgcgaacgcgacgaacgacgcgcgactaaacccgcaaaacgccctctaaccccgccgacgacgcgccgcgaatccctcactccccgcccatcgacgactacgcgcactacacactcgcctaccgccgccgccgcacgccgcctacctcctacgcgccgccgccgcgcctaacgcccgaacccgcgacaccgcccgctaaacgccgaaccgaattcacgcaaccgcgatctaacgactccgcgacgacgacgaatacgaacgacctaaccgataccgattaaaaaaacgaattacaaacacttcaaaaaataacaaatcgatttcctcctccccgaaaatcgctcgtacaaaacgctcgacgccgacaaacgaacgtacgcgcgacgaacgcgcgacgaacaccccgaacgacttaacgaacgctaacgataacgacgcgaaatccgcgcccgaaacgccccgccgcgcacaataaacgacccgaaaccgaacgacgacgacgataaccgaaaaactaaccccgaacgaaatccgaaccgtatacgtcccgaccgctaactaaaaaaaacccgactcgcgtacgcaataaacttaccttttttttttcttttttcctaatattactaatttcctttttttctaccttat

SEQ ID NO: 36213 - DNA, 607 bp, Artificial Sequence
  chemically treated genomic DNA (Homo sapiens) CpG-island No: 36213
attgttcgcgggtttttagcgtcgacgggacgaaatcgtttttttcgggattgtttttgttcgatcgcgtcgttatcgtagcgttatcgtcgtcgttagcgttcgagtttatttcgttttacgttttggacggtcgttggggtcgttatagagacggggtataggtagagcggacgagcggatcggcgtttttaggcggcgggaggtcgttttttcgattgttttagttttcgcgttggggttgggatggggacgcgacgttttttgttttattttcggttttttgcgtcggcggggatcgtgcgttttttttatagcgttagtggtatttttttcgtcgaggtttaagagcggttgtatttggggattgttgttcgtgagggattattagaggtattgtattttggaaaacggttggttttcgtatcgtggatatttaaagtcgacgtcgttttatttaaacgtagaaattattttatttttttattgcgtgcgtttgtttgcgaagcgggtgcgagcgtttatttagttatttggttttttggtaagaggttaatttcgtttttggttaagattttgatttgaaaattgcgttttggttttttgt

SEQ ID NO: 36214 - DNA, 607 bp, Artificial Sequence
  chemically treated genomic DNA (Homo sapiens) CpG-island No: 36214
acaaaaaaccaaaacgcaattttcaaatcaaaatcttaaccaaaaacgaaattaacctcttaccaaaaaaccaaataactaaataaacgctcgcacccgcttcgcaaacaaacgcacgcaataaaaaaataaaataatttctacgtttaaataaaacgacgtcgactttaaatatccacgatacgaaaaccaaccgttttccaaaatacaatacctctaataatccctcacgaacaacaatccccaaatacaaccgctcttaaacctcgacgaaaaaaataccactaacgctataaaaaaaacgcacgatccccgccgacgcaaaaaaccgaaaataaaacaaaaaacgtcgcgtccccatcccaaccccaacgcgaaaactaaaacaatcgaaaaaacgacctcccgccgcctaaaaacgccgatccgctcgtccgctctacctataccccgtctctataacgaccccaacgaccgtccaaaacgtaaaacgaaataaactcgaacgctaacgacgacgataacgctacgataacgacgcgatcgaacaaaaacaatcccgaaaaaaacgatttcgtcccgtcgacgctaaaaacccgcgaacaat

SEQ ID NO: 36215 - DNA, 607 bp, Artificial Sequence
  chemically treated genomic DNA (Homo sapiens) CpG-island No: 36215
ataagaggttagaacgtagtttttaagttagaattttagttagaaacgaagttggttttttgttaaggagttaaataattggatggacgttcgtattcgtttcgtagataggcgtacgtagtggagaggtgaagtgatttttgcgtttgggtagagcggcgtcggttttaggtgtttacggtgcggaagttagtcgttttttaaaatgtaatatttttaatggttttttacgaatagtagtttttaaatatagtcgtttttggatttcgacgaaggggatgttattaacgttgtggggagagcgtacggttttcgtcggcgtagggagtcgggggtagagtagagggcgtcgcgtttttattttagttttagcgcgggggttggagtagtcgagagggcggtttttcgtcgtttagaggcgtcggttcgttcgttcgttttgtttgtgtttcgtttttatggcggttttaacggtcgtttaggacgtggagcgaaatgagttcgggcgttgacggcggcggtggcgttgcggtggcggcgcggtcggataagggtagtttcggggaggacggtttcgtttcgtcggcgttggggattcgcgagtagt

SEQ ID NO: 36216 - DNA, 607 bp, Artificial Sequence
  chemically treated genomic DNA (Homo sapiens) CpG-island No: 36216
actactcgcgaatccccaacgccgacgaaacgaaaccgtcctccccgaaactacccttatccgaccgcgccgccaccgcaacgccaccgccgccgtcaacgcccgaactcatttcgctccacgtcctaaacgaccgttaaaaccgccataaaaacgaaacacaaacaaaacgaacgaacgaaccgacgcctctaaacgacgaaaaaccgccctctcgactactccaacccccgcgctaaaactaaaataaaaacgcgacgccctctactctacccccgactccctacgccgacgaaaaccgtacgctctccccacaacgttaataacatccccttcgtcgaaatccaaaaacgactatatttaaaaactactattcgtaaaaaaccattaaaaatattacattttaaaaaacgactaacttccgcaccgtaaacacctaaaaccgacgccgctctacccaaacgcaaaaatcacttcacctctccactacgtacgcctatctacgaaacgaatacgaacgtccatccaattatttaactccttaacaaaaaaccaacttcgtttctaactaaaattctaacttaaaaactacgttctaacctcttat

SEQ ID NO: 36217 - DNA, 588 bp, Artificial Sequence
  chemically treated genomic DNA (Homo sapiens) CpG-island No: 36217
acgcgggcgaacgatgcggttaatcgttataaattgttgaaaaaagatgcgcgtattatcgtcgtttagtaggtagtaaggttggaattcgttatgtgtttgcgtcgtcgttggtcgttggaaaatttttagttttttttggttgagtattcgttggttcgttatttaattcgtcgtttgatttggggcgtttatagcgtcgaaaattagttattggtttgttttcgcgtagtagaagataatagttttagtatcgttgacgatgatttttttattttgtcggaaggcgatatttttatcggtattttttacgttttggaaatattattaacggatgttgtcgttttggttagttttttgtcgattacgaattgttattatcgtttcgttagttcgatcgtaatagttacgttttgatagaagtcgagcgtaatgttagtgaattgattcgttgggtaggtagaaaatgttcgagtggtcgggttatggggttggcgaataaaggttggataaagggcgaattataggatggaggttggatcggatggatgattaaatttttgggtcgttggtcgttaattatggaaa

SEQ ID NO: 36218 - DNA, 588 bp, Artificial Sequence
  chemically treated genomic DNA (Homo sapiens) CpG-island No: 36218
tttccataattaacgaccaacgacccaaaaatttaatcatccatccgatccaacctccatcctataattcgccctttatccaacctttattcgccaaccccataacccgaccactcgaacattttctacctacccaacgaatcaattcactaacattacgctcgacttctatcaaaacgtaactattacgatcgaactaacgaaacgataataacaattcgtaatcgacaaaaaactaaccaaaacgacaacatccgttaataatatttccaaaacgtaaaaaataccgataaaaatatcgccttccgacaaaataaaaaaatcatcgtcaacgatactaaaactattatcttctactacgcgaaaacaaaccaataactaattttcgacgctataaacgccccaaatcaaacgacgaattaaataacgaaccaacgaatactcaaccaaaaaaaactaaaaattttccaacgaccaacgacgacgcaaacacataacgaattccaaccttactacctactaaacgacgataatacgcgcatcttttttcaacaatttataacgattaaccgcatcgttcgcccgcgt

SEQ ID NO: 36219 - DNA, 588 bp, Artificial Sequence
  chemically treated genomic DNA (Homo sapiens) CpG-island No: 36219
tttttatgattaacgattagcgatttaaaggtttgattatttattcgatttagtttttattttgtggttcgttttttatttagtttttattcgttagttttatgattcgattattcgggtattttttgtttgtttagcgggttagtttattggtattgcgttcggtttttgttagggcgtagttgttacggtcgagttggcggaacggtggtagtagttcgtagtcggtaaaaagttgattaaggcggtagtattcgttggtgatatttttagaacgtgaggagtgtcgatagagatatcgtttttcggtagggtgaaaagattatcgttagcggtgttggagttgttattttttgttacgcgaaagtaagttagtagttggttttcggcgttataaacgttttaaattagacggcgggttaagtgacgaattagcggatgtttaattaggaagagttggaagttttttagcgattagcggcggcgtaggtatatggcggattttagttttgttatttgttgggcggcgatggtacgcgtatttttttttagtaatttgtagcggttaatcgtatcgttcgttcgcgt

SEQ ID NO: 36220 - DNA, 588 bp, Artificial Sequence
  chemically treated genomic DNA (Homo sapiens) CpG-island No: 36220
acgcgaacgaacgatacgattaaccgctacaaattactaaaaaaaaatacgcgtaccatcgccgcccaacaaataacaaaactaaaatccgccatatacctacgccgccgctaatcgctaaaaaacttccaactcttcctaattaaacatccgctaattcgtcacttaacccgccgtctaatttaaaacgtttataacgccgaaaaccaactactaacttactttcgcgtaacaaaaaataacaactccaacaccgctaacgataatcttttcaccctaccgaaaaacgatatctctatcgacactcctcacgttctaaaaatatcaccaacgaatactaccgccttaatcaactttttaccgactacgaactactaccaccgttccgccaactcgaccgtaacaactacgccctaacaaaaaccgaacgcaataccaataaactaacccgctaaacaaacaaaaaatacccgaataatcgaatcataaaactaacgaataaaaactaaataaaaaacgaaccacaaaataaaaactaaatcgaataaataatcaaacctttaaatcgctaatcgttaatcataaaaa

SEQ ID NO: 36221 - DNA, 508 bp, Artificial Sequence
  chemically treated genomic DNA (Homo sapiens) CpG-island No: 36221
cgtttttattgttcggggatggggagtaagtttagttagtcgttgttttcgggtgtcgcgtgcgtagttgtacgttatttttagacgaatcgatgattggatggatggtcgtcgtagtcgttatattgatgatacggatgtgttttttcgtatatattatgttatcggagagttgttaacgtatggttatcgtcgggtatgggcgttgtttcgtagataggtagaatttgatggtatgtttgcgattaatgttaaacgtgtttatcggattatgcgttagaatgcgttgttgtttgagcgaaaatttgttgtatcgttatcgaaacgggtatatataggtagagtggtcgtgaaagaaagtaattagcgatggtgttttgacgggttcgagttttgttgtgataacggagagagaattgcgtgttacgttcggcgttggattgtttgtgattcgtgagtattggattgggcgggtattatttcgcggggtttaatagtgtaaatcgtt

SEQ ID NO: 36222 - DNA, 508 bp, Artificial Sequence
  chemically treated genomic DNA (Homo sapiens) CpG-island No: 36222
aacgatttacactattaaaccccgcgaaataatacccgcccaatccaatactcacgaatcacaaacaatccaacgccgaacgtaacacgcaattctctctccgttatcacaacaaaactcgaacccgtcaaaacaccatcgctaattactttctttcacgaccactctacctatatatacccgtttcgataacgatacaacaaattttcgctcaaacaacaacgcattctaacgcataatccgataaacacgtttaacattaatcgcaaacataccatcaaattctacctatctacgaaacaacgcccatacccgacgataaccatacgttaacaactctccgataacataatatatacgaaaaaacacatccgtatcatcaatataacgactacgacgaccatccatccaatcatcgattcgtctaaaaataacgtacaactacgcacgcgacacccgaaaacaacgactaactaaacttactccccatccccgaacaataaaaacg

SEQ ID NO: 36223 - DNA, 508 bp, Artificial Sequence
  chemically treated genomic DNA (Homo sapiens) CpG-island No: 36223
aacggtttatattgttgaatttcgcgggatagtgttcgtttagtttagtgtttacggattataagtagtttagcgtcgaacgtgatacgtagtttttttttcgttattatagtagaattcgaattcgttagagtattatcgttgattgtttttttttacggttattttgtttgtatgtgttcgtttcgatggcggtatagtaggttttcgtttaagtaatagcgtattttggcgtatgattcggtaaatacgtttggtattgatcgtaggtatattattaagttttgtttgtttgcgaagtagcgtttatattcgacgataattatacgttggtagtttttcgataatatggtgtatacggagaagtatattcgtattattagtgtgacgattgcggcggttatttatttagttatcggttcgtttgagaatgacgtgtaattgcgtacgcgatattcggagataacggttgattaagtttattttttattttcgggtaataagggcg

SEQ ID NO: 36224 - DNA, 508 bp, Artificial Sequence
  chemically treated genomic DNA (Homo sapiens) CpG-island No: 36224
cgcccttattacccgaaaataaaaaataaacttaatcaaccgttatctccgaatatcgcgtacgcaattacacgtcattctcaaacgaaccgataactaaataaataaccgccgcaatcgtcacactaataatacgaatatacttctccgtatacaccatattatcgaaaaactaccaacgtataattatcgtcgaatataaacgctacttcgcaaacaaacaaaacttaataatatacctacgatcaataccaaacgtatttaccgaatcatacgccaaaatacgctattacttaaacgaaaacctactataccgccatcgaaacgaacacatacaaacaaaataaccgtaaaaaaaaacaatcaacgataatactctaacgaattcgaattctactataataacgaaaaaaaaactacgtatcacgttcgacgctaaactacttataatccgtaaacactaaactaaacgaacactatcccgcgaaattcaacaatataaaccgtt

SEQ ID NO: 36225 - DNA, 1092 bp, Artificial Sequence
  chemically treated genomic DNA (Homo sapiens) CpG-island No: 36225
tttgcgttcgcgattttatttcgtcggtttgttggatatcgtttattagtttatcgttcgttacgttcgtagcgttaaagaggatatcgtttttttttattagtttatcgagcgagtatatacggttaacgttaacgtttattgttttgtaacgtttgcgtttttgttttgtaatttgtcgatttttcgtgtaattttttttagtttggtaaaagttaattagttcggtttgtatattttcgtttaatgttttaacggtataggtagaaattacgttttttggcgtatcgtcgatggtgtatattatatcgtaaggattattttgttagtaggttagtacgttggcggcgatatcgttattcggtagggtaaaaatttttacgtttagttgtgttgtttttttaatcgcggtatttaggcgcggtttatttagcgtaattatgcgtagtttatttagcggtttgtttaacgttttcgttacgttgcgtaggttgttcgttagaggtaaagatagattaatcgcgttcgtcgttagtcgattaataattagtttttttatatatatatcgggcgtatgtaataggttatttcgaggggcgaaagttatgatcgttagcgtattgttttgttttatcgttattattcgcgtgtttttaatgggattaatcgcgatatcgatttttggtttatcgtttttgtttattttttcgttaatttatagtatcggcgtatggttaatttttttttcgtcgataattattcgtttacgaaaagcgacgtcgtttaatgtttggcgtatcgcggtgatcgttaggttattaattttattttgtcgttatattcggtttgcggttaggtagttaacgttgtttgtttcgtaacgcgaaataatggttacgttaggatattattgcgcggttttttcgatattaacgttaaattgtgttagtagatatttttcggtttgtttattttagatgtcgtgcgtttttttaattagtcgcgttaattttttaaatagcggatcggttttgtttttttcggtaaaatcggtaatggtagtgagcggtatggttacgtcgttataaatga

SEQ ID NO: 36226 - DNA, 1092 bp, Artificial Sequence
  chemically treated genomic DNA (Homo sapiens) CpG-island No: 36226
tcatttataacgacgtaaccataccgctcactaccattaccgattttaccgaaaaaaacaaaaccgatccgctatttaaaaaattaacgcgactaattaaaaaaacgcacgacatctaaaataaacaaaccgaaaaatatctactaacacaatttaacgttaatatcgaaaaaaccgcgcaataatatcctaacgtaaccattatttcgcgttacgaaacaaacaacgttaactacctaaccgcaaaccgaatataacgacaaaataaaattaataacctaacgatcaccgcgatacgccaaacattaaacgacgtcgcttttcgtaaacgaataattatcgacgaaaaaaaaattaaccatacgccgatactataaattaacgaaaaaataaacaaaaacgataaaccaaaaatcgatatcgcgattaatcccattaaaaacacgcgaataataacgataaaacaaaacaatacgctaacgatcataactttcgcccctcgaaataacctattacatacgcccgatatatatataaaaaaactaattattaatcgactaacgacgaacgcgattaatctatctttacctctaacgaacaacctacgcaacgtaacgaaaacgttaaacaaaccgctaaataaactacgcataattacgctaaataaaccgcgcctaaataccgcgattaaaaaaacaacacaactaaacgtaaaaatttttaccctaccgaataacgatatcgccgccaacgtactaacctactaacaaaataatccttacgatataatatacaccatcgacgatacgccaaaaaacgtaatttctacctataccgttaaaacattaaacgaaaatatacaaaccgaactaattaacttttaccaaactaaaaaaaattacacgaaaaatcgacaaattacaaaacaaaaacgcaaacgttacaaaacaataaacgttaacgttaaccgtatatactcgctcgataaactaataaaaaaaaacgatatcctctttaacgctacgaacgtaacgaacgataaactaataaacgatatccaacaaaccgacgaaataaaatcgcgaacgcaaa

SEQ ID NO: 36227 - DNA, 1092 bp, Artificial Sequence
  chemically treated genomic DNA (Homo sapiens) CpG-island No: 36227
ttatttataacggcgtgattatgtcgtttattgttattgtcgattttgtcgaaaaaggtaaaatcgattcgttgtttaaagagttggcgcggttggttgaggaaacgtacggtatttggaatgaataggtcgagaaatatttgttggtataatttggcgttgatatcggggaggtcgcgtaatgatgttttggcgtggttattatttcgcgttacggaataggtagcgttggttgtttggtcgtaaatcggatgtggcgataaaataaaattgatggtttggcggttatcgcgatgcgttaggtattaaacgacgtcgtttttcgtggacgagtggttatcggcgaaggagaaattgattatgcgtcgatgttgtggattggcgaagaggtgggtaaaggcgatgggttagaagtcgatatcgcggttgattttattgaaggtacgcggatggtggcgatggggtagagtaatgcgttggcggttatggttttcgtttttcgagatagtttgttatatgcgttcgatatgtatatgaaaaagttggttgttaatcggttggcggcgggcgcgattgatttgtttttgtttttgacggataatttgcgtaacgtggcgaaagcgttaggtaaatcgttggataagttgcgtatggttacgttggataaatcgcgtttgagtgtcgcgattgaggaagtaatatagttgggcgtgaaggtttttgttttgtcggatggcgatgtcgtcgttagcgtgttgatttgttggtaggataatttttacgatgtgatgtatattatcggcggtgcgttagaaggcgtgatttttgtttgtgtcgttaaagtattaggcggggatatgtaggtcgagttgattgatttttgttaggttaaaggggattatacggaaaatcggtagattgtagagtaggagcgtaagcgttgtaaggtaatgggcgttgacgttaatcgtgtgtattcgttcgatgaattggtgagggggaacgatattttttttagcgttacgggcgtgacgggcggtgagttggtgaacggtatttaatagatcggcgaagtggggtcgcggacgtaga

SEQ ID NO: 36228 - DNA, 1092 bp, Artificial Sequence
  chemically treated genomic DNA (Homo sapiens) CpG-island No: 36228
tctacgtccgcgaccccacttcgccgatctattaaataccgttcaccaactcaccgcccgtcacgcccgtaacgctaaaaaaaatatcgttccccctcaccaattcatcgaacgaatacacacgattaacgtcaacgcccattaccttacaacgcttacgctcctactctacaatctaccgattttccgtataatcccctttaacctaacaaaaatcaatcaactcgacctacatatccccgcctaatactttaacgacacaaacaaaaatcacgccttctaacgcaccgccgataatatacatcacatcgtaaaaattatcctaccaacaaatcaacacgctaacgacgacatcgccatccgacaaaacaaaaaccttcacgcccaactatattacttcctcaatcgcgacactcaaacgcgatttatccaacgtaaccatacgcaacttatccaacgatttacctaacgctttcgccacgttacgcaaattatccgtcaaaaacaaaaacaaatcaatcgcgcccgccgccaaccgattaacaaccaactttttcatatacatatcgaacgcatataacaaactatctcgaaaaacgaaaaccataaccgccaacgcattactctaccccatcgccaccatccgcgtaccttcaataaaatcaaccgcgatatcgacttctaacccatcgcctttacccacctcttcgccaatccacaacatcgacgcataatcaatttctccttcgccgataaccactcgtccacgaaaaacgacgtcgtttaatacctaacgcatcgcgataaccgccaaaccatcaattttattttatcgccacatccgatttacgaccaaacaaccaacgctacctattccgtaacgcgaaataataaccacgccaaaacatcattacgcgacctccccgatatcaacgccaaattataccaacaaatatttctcgacctattcattccaaataccgtacgtttcctcaaccaaccgcgccaactctttaaacaacgaatcgattttacctttttcgacaaaatcgacaataacaataaacgacataatcacgccgttataaataa

SEQ ID NO: 36229 - DNA, 762 bp, Artificial Sequence
  chemically treated genomic DNA (Homo sapiens) CpG-island No: 36229
tgtacgttcgtttgtttaatatgttttatgatgtcgttaattagtattatttcgtcgtcgtagatggtatttacgttaatttttatcgcgttatcgaggaagtggtttagtaatattggcgtatcgttagatacgttgatcgtcgtttggaagtagcgacgtaggttagtttcgttatagacgatttttatcgttcgatcgtcgagaacgtaagacggacgtattattagcgggtagttaatttttttcgttttttttatcgttattttaatagcggtaacggtggcgttcgtcggttgttttagttttagacgtttaatcgtatgttggaagcgtttacggttttttgtacggtcgatagtattcgggttggtgtcgataatcggtacgttagtagtttttagcgcgcgcgttagttttagcggggtttgatcgtcgtattggacgataacgtttttcggtttttcgatacgtacgatttttagtatattttttagagttatcggttcgaagtagaggcggtcggaagtgtcgtagtcggtggagacggttttcgggttatagttaattataatggtttcgtaatcgttttcgcgtagcgttagcgagcgtgtacgtaatagtagtcgaattcgatattttgatcgatatcggttcgggttatcgttaagtattatgaatttttttacggttcggtagaacggattacgtttcgtattgttatttttattaagtggacgtatagtgtaacgacggtgtacg

SEQ ID NO: 36230 - DNA, 762 bp, Artificial Sequence
  chemically treated genomic DNA (Homo sapiens) CpG-island No: 36230
cgtacaccgtcgttacactatacgtccacttaataaaaataacaatacgaaacgtaatccgttctaccgaaccgtaaaaaaattcataatacttaacgataacccgaaccgatatcgatcaaaatatcgaattcgactactattacgtacacgctcgctaacgctacgcgaaaacgattacgaaaccattataattaactataacccgaaaaccgtctccaccgactacgacacttccgaccgcctctacttcgaaccgataactctaaaaaatatactaaaaatcgtacgtatcgaaaaaccgaaaaacgttatcgtccaatacgacgatcaaaccccgctaaaactaacgcgcgcgctaaaaactactaacgtaccgattatcgacaccaacccgaatactatcgaccgtacaaaaaaccgtaaacgcttccaacatacgattaaacgtctaaaactaaaacaaccgacgaacgccaccgttaccgctattaaaataacgataaaaaaaacgaaaaaaattaactacccgctaataatacgtccgtcttacgttctcgacgatcgaacgataaaaatcgtctataacgaaactaacctacgtcgctacttccaaacgacgatcaacgtatctaacgatacgccaatattactaaaccacttcctcgataacgcgataaaaattaacgtaaataccatctacgacgacgaaataatactaattaacgacatcataaaacatattaaacaaacgaacgtaca

SEQ ID NO: 36231 - DNA, 762 bp, Artificial Sequence
  chemically treated genomic DNA (Homo sapiens) CpG-island No: 36231
cgtatatcgtcgttatattgtacgtttatttaatgaagatagtagtgcgaagcgtaattcgttttatcgagtcgtgaaagaatttatggtgtttggcggtggttcgaatcgatatcggttagggtatcgaattcgattattgttgcgtatacgttcgttggcgttgcgcgaagacggttacgaaattattatggttaattgtaattcggaaatcgtttttatcgattacgatattttcgatcgtttttatttcgagtcggtaattttggaagatgtgttggaaatcgtgcgtatcgagaagtcgaaaggcgttatcgtttagtacggcggttagatttcgttgaaattggcgcgcgcgttggaagttgttggcgtatcggttatcggtattagttcggatgttatcgatcgtgtagaagatcgtgaacgtttttagtatgcggttgagcgtttgaaattgaaataatcggcgaacgttatcgttatcgttattgaaatggcggtagagaaggcgaaagagattggttattcgttggtggtacgttcgttttacgttttcggcggtcgggcgatggaaatcgtttatgacgaagttgatttgcgtcgttatttttagacggcggttagcgtgtttaacgatgcgttagtgttgttggattattttttcgatgacgcggtagaagttgacgtggatgttatttgcgacggcgaaatggtgttgattggcggtattatggagtatattgagtaggcgggcgtgta

SEQ ID NO: 36232 - DNA, 762 bp, Artificial Sequence
  chemically treated genomic DNA (Homo sapiens) CpG-island No: 36232
tacacgcccgcctactcaatatactccataataccgccaatcaacaccatttcgccgtcgcaaataacatccacgtcaacttctaccgcgtcatcgaaaaaataatccaacaacactaacgcatcgttaaacacgctaaccgccgtctaaaaataacgacgcaaatcaacttcgtcataaacgatttccatcgcccgaccgccgaaaacgtaaaacgaacgtaccaccaacgaataaccaatctctttcgccttctctaccgccatttcaataacgataacgataacgttcgccgattatttcaatttcaaacgctcaaccgcatactaaaaacgttcacgatcttctacacgatcgataacatccgaactaataccgataaccgatacgccaacaacttccaacgcgcgcgccaatttcaacgaaatctaaccgccgtactaaacgataacgcctttcgacttctcgatacgcacgatttccaacacatcttccaaaattaccgactcgaaataaaaacgatcgaaaatatcgtaatcgataaaaacgatttccgaattacaattaaccataataatttcgtaaccgtcttcgcgcaacgccaacgaacgtatacgcaacaataatcgaattcgataccctaaccgatatcgattcgaaccaccgccaaacaccataaattctttcacgactcgataaaacgaattacgcttcgcactactatcttcattaaataaacgtacaatataacgacgatatacg

SEQ ID NO: 36233 - DNA, 578 bp, Artificial Sequence
  chemically treated genomic DNA (Homo sapiens) CpG-island No: 36233
acgttcgtcgtcggaatatcgtcggtagtattatagttaattgatagaaaaatcgattattttagaataagatgggtttgttgcggcgtagaaagtattttgcgtatcgcgtttattattcgttgcggtttacgtaggaatgcgtagatttgtattgtatatagcggtaatgtttaaatcgttcggtatcggtaagttcgatattcgtaattaatagagtaatattcgttcggcggatatttttattcgttaaacgatttttcgtttttagcgcgttttgagttttaatgttgattttttatttttttaataggtataatttttttagtcgtttcgtcgttatataagtatgcgttacgtcgtttacgtaggcggttattgttattaggtatgttattttaattttttacggtaatttgaagttcggttcgttttgttatttcgcgtatcgttgttatattagttgacgacggcgtaggtattttttttatcgattatgttttttttagtaggcggtatttcggttcgtcgtattgatgaaacggtaatagatggatttgtttgatatttagcgggat

SEQ ID NO: 36234 - DNA, 578 bp, Artificial Sequence
  chemically treated genomic DNA (Homo sapiens) CpG-island No: 36234
atcccgctaaatatcaaacaaatccatctattaccgtttcatcaatacgacgaaccgaaataccgcctactaaaaaaaacataatcgataaaaaaaatacctacgccgtcgtcaactaatataacaacgatacgcgaaataacaaaacgaaccgaacttcaaattaccgtaaaaaattaaaataacatacctaataacaataaccgcctacgtaaacgacgtaacgcatacttatataacgacgaaacgactaaaaaaattatacctattaaaaaaataaaaaatcaacattaaaactcaaaacgcgctaaaaacgaaaaatcgtttaacgaataaaaatatccgccgaacgaatattactctattaattacgaatatcgaacttaccgataccgaacgatttaaacattaccgctatatacaatacaaatctacgcattcctacgtaaaccgcaacgaataataaacgcgatacgcaaaatactttctacgccgcaacaaacccatcttattctaaaataatcgatttttctatcaattaactataatactaccgacgatattccgacgacgaacgt

SEQ ID NO: 36235 - DNA, 578 bp, Artificial Sequence
  chemically treated genomic DNA (Homo sapiens) CpG-island No: 36235
atttcgttgaatattaggtagatttatttgttatcgttttattagtacggcgaatcgaaatatcgtttgttggggaaaatatggtcgatgaaagaggtgtttgcgtcgtcgttagttgatgtggtaacgatgcgcgaaatggtagaacgggtcggattttaggttatcgtgggaggttaaaatggtatatttggtggtagtaatcgtttgcgtaagcggcgtggcgtatatttatatggcggcggaacggttggaaaagttgtgtttgttagagaagtggggagttagtattgaaatttagggcgcgttgggaacggagaatcgtttagcggatgaggatattcgtcgggcggatgttgttttgttgattacggatatcgagtttgtcggtgtcgagcgatttgaatattgtcgttatgtgtaatgtagatttacgtatttttgcgtgagtcgtagcgggtaatgagcgcggtgcgtaaagtgttttttgcgtcgtagtaaatttattttattttggagtagtcggtttttttgttagttggttgtggtattgtcggcgatatttcgacggcgagcgt

SEQ ID NO: 36236 - DNA, 578 bp, Artificial Sequence
  chemically treated genomic DNA (Homo sapiens) CpG-island No: 36236
acgctcgccgtcgaaatatcgccgacaataccacaaccaactaacaaaaaaaccgactactccaaaataaaataaatttactacgacgcaaaaaacactttacgcaccgcgctcattacccgctacgactcacgcaaaaatacgtaaatctacattacacataacgacaatattcaaatcgctcgacaccgacaaactcgatatccgtaatcaacaaaacaacatccgcccgacgaatatcctcatccgctaaacgattctccgttcccaacgcgccctaaatttcaatactaactccccacttctctaacaaacacaacttttccaaccgttccgccgccatataaatatacgccacgccgcttacgcaaacgattactaccaccaaatataccattttaacctcccacgataacctaaaatccgacccgttctaccatttcgcgcatcgttaccacatcaactaacgacgacgcaaacacctctttcatcgaccatattttccccaacaaacgatatttcgattcgccgtactaataaaacgataacaaataaatctacctaatattcaacgaaat

SEQ ID NO: 36237 - DNA, 538 bp, Artificial Sequence
  chemically treated genomic DNA (Homo sapiens) CpG-island No: 36237
atcgtgggatcgtcggtatcgcgtaattaggtgttaattcgattttttgtaggatcgtcgtttaaagggcgtaggagtttgatcggtaaattgttcgtttttgacgatagttcgttagttttcgcgtttttcgtttaatggcgatacgttgtgatggcgggatttgcggttataacggttgtatagttatttcggtgggatcgcgataatttatagcgtgaattttttgttgtagtaaatcgagcgttacggcgaaatcgtgaatggtggcggtcggtgttggcgggtagtcggggatttaaatattaatggggataatggtgtcgttatcgttttagacgttgtagagatcgtggaaaatatcgtcgtcgatatcgtacgcgtcgtaggaaatataaattttatgatcgggggtagatttatacgttcgaagtgtaggtatacgtatcgttcgggtgattgcgttagtaaataataaaatatcggcgtgacgcgggtgatgaaataattttaatgttaaaacgttttgcgtcgaata

SEQ ID NO: 36238 - DNA, 538 bp, Artificial Sequence
  chemically treated genomic DNA (Homo sapiens) CpG-island No: 36238
tattcgacgcaaaacgttttaacattaaaattatttcatcacccgcgtcacgccgatattttattatttactaacgcaatcacccgaacgatacgtatacctacacttcgaacgtataaatctacccccgatcataaaatttatatttcctacgacgcgtacgatatcgacgacgatattttccacgatctctacaacgtctaaaacgataacgacaccattatccccattaatatttaaatccccgactacccgccaacaccgaccgccaccattcacgatttcgccgtaacgctcgatttactacaacaaaaaattcacgctataaattatcgcgatcccaccgaaataactatacaaccgttataaccgcaaatcccgccatcacaacgtatcgccattaaacgaaaaacgcgaaaactaacgaactatcgtcaaaaacgaacaatttaccgatcaaactcctacgccctttaaacgacgatcctacaaaaaatcgaattaacacctaattacgcgataccgacgatcccacgat

SEQ ID NO: 36239 - DNA, 538 bp, Artificial Sequence
  chemically treated genomic DNA (Homo sapiens) CpG-island No: 36239
tattcgacgtagaacgttttggtattaaggttgttttattattcgcgttacgtcgatattttgttatttattggcgtagttattcgggcgatgcgtatgtttgtatttcgggcgtatgagtttgttttcgattataaaatttgtgttttttacggcgcgtgcggtgtcggcggcggtattttttacgatttttatagcgtttggggcggtagcgatattattgtttttattgatgtttggattttcggttgttcgttaatatcggtcgttattatttacggtttcgtcgtggcgttcggtttgttgtaatagaagatttacgttgtggattatcgcgattttatcggggtgattatgtaatcgttgtggtcgtagatttcgttattatagcgtatcgttattgagcgagaagcgcggaggttggcgggttatcgttaggggcgagtaatttgtcgattaggtttttgcgttttttaagcgacgattttataggaaatcgggttaatatttggttgcgcgatgtcgacgattttacgat

SEQ ID NO: 36240 - DNA, 538 bp, Artificial Sequence
  chemically treated genomic DNA (Homo sapiens) CpG-island No: 36240
atcgtaaaatcgtcgacatcgcgcaaccaaatattaacccgatttcctataaaatcgtcgcttaaaaaacgcaaaaacctaatcgacaaattactcgcccctaacgataacccgccaacctccgcgcttctcgctcaataacgatacgctataataacgaaatctacgaccacaacgattacataatcaccccgataaaatcgcgataatccacaacgtaaatcttctattacaacaaaccgaacgccacgacgaaaccgtaaataataacgaccgatattaacgaacaaccgaaaatccaaacatcaataaaaacaataatatcgctaccgccccaaacgctataaaaatcgtaaaaaataccgccgccgacaccgcacgcgccgtaaaaaacacaaattttataatcgaaaacaaactcatacgcccgaaatacaaacatacgcatcgcccgaataactacgccaataaataacaaaatatcgacgtaacgcgaataataaaacaaccttaataccaaaacgttctacgtcgaata

SEQ ID NO: 36241 - DNA, 642 bp, Artificial Sequence
  chemically treated genomic DNA (Homo sapiens) CpG-island No: 36241
atcgtcgtggcgtaatttatagcgcggtagatattttttttgtttggttgttggcgggcgtatcggtttcggtaaaacggaggtttattttagcgtattggaaaacgtgttcgtttagggtaaataggcgttggtgatggtgtcggaaatcggtttgatatcgtaaattatcgttcgttttcgtgaacgttttaatgttttcgtggaagttttgtatttcggtttgaacgatagcgagcgtttttcggcgtggttgaaagcgaaaaatggtgaggcggcgattgtgatcggtattcgtttcgcgttgtttacgtcgtttaaaaatttcggcgtgattgttattgatgaagagtacgatagtttttataagtagtaggaaggttggcgttattatgttcgcgatttggcggtgtatcgtgcgtatagcgagtaaatttcgattatttttggtttcgtaacgttcgcgttggaaacgttatgtaacgtttagtagaaaaaatatcgtttgttgcgtttgattcgtcgggtagggaatgcgcgttcggtaatttaatatgtgttggatttaaaaggttagaaggtgtaggtaggtttggtttcggcgttaattattcgtatgcgttagtatttataggttgataa

SEQ ID NO: 36242 - DNA, 642 bp, Artificial Sequence
  chemically treated genomic DNA (Homo sapiens) CpG-island No: 36242
ttatcaacctataaatactaacgcatacgaataattaacgccgaaaccaaacctacctacaccttctaaccttttaaatccaacacatattaaattaccgaacgcgcattccctacccgacgaatcaaacgcaacaaacgatattttttctactaaacgttacataacgtttccaacgcgaacgttacgaaaccaaaaataatcgaaatttactcgctatacgcacgatacaccgccaaatcgcgaacataataacgccaaccttcctactacttataaaaactatcgtactcttcatcaataacaatcacgccgaaatttttaaacgacgtaaacaacgcgaaacgaataccgatcacaatcgccgcctcaccatttttcgctttcaaccacgccgaaaaacgctcgctatcgttcaaaccgaaatacaaaacttccacgaaaacattaaaacgttcacgaaaacgaacgataatttacgatatcaaaccgatttccgacaccatcaccaacgcctatttaccctaaacgaacacgttttccaatacgctaaaataaacctccgttttaccgaaaccgatacgcccgccaacaaccaaacaaaaaaaatatctaccgcgctataaattacgccacgacgat

SEQ ID NO: 36243 - DNA, 642 bp, Artificial Sequence
  chemically treated genomic DNA (Homo sapiens) CpG-island No: 36243
ttattagtttgtaaatgttggcgtatacgagtgattaacgtcggagttagatttgtttgtattttttgattttttaaatttagtatatgttgaattgtcggacgcgtattttttgttcgacgggttaggcgtagtaggcggtattttttttgttggacgttgtataacgtttttagcgcgggcgttgcggagttaagaataatcgggatttgttcgttgtgcgtacgatatatcgttaggtcgcgggtatgatagcgttagtttttttgttgtttgtaggagttgtcgtgttttttattaatgataattacgtcgagatttttaaacggcgtaaatagcgcggagcgggtgtcgattataatcgtcgttttattatttttcgtttttagttacgtcgaaagacgttcgttgtcgtttaggtcggaatgtagaatttttacgggggtattaaaacgtttacgaaaacgggcgatagtttgcggtgttaggtcgattttcggtattattattagcgtttgtttgttttgagcgagtacgttttttagtacgttgagataaattttcgttttatcggaatcggtacgttcgttagtagttaggtagaaaaagtatttgtcgcgttatgaattgcgttacggcggt

SEQ ID NO: 36244 - DNA, 642 bp, Artificial Sequence
  chemically treated genomic DNA (Homo sapiens) CpG-island No: 36244
accgccgtaacgcaattcataacgcgacaaatactttttctacctaactactaacgaacgtaccgattccgataaaacgaaaatttatctcaacgtactaaaaaacgtactcgctcaaaacaaacaaacgctaataataataccgaaaatcgacctaacaccgcaaactatcgcccgttttcgtaaacgttttaatacccccgtaaaaattctacattccgacctaaacgacaacgaacgtctttcgacgtaactaaaaacgaaaaataataaaacgacgattataatcgacacccgctccgcgctatttacgccgtttaaaaatctcgacgtaattatcattaataaaaaacacgacaactcctacaaacaacaaaaaaactaacgctatcatacccgcgacctaacgatatatcgtacgcacaacgaacaaatcccgattattcttaactccgcaacgcccgcgctaaaaacgttatacaacgtccaacaaaaaaaataccgcctactacgcctaacccgtcgaacaaaaaatacgcgtccgacaattcaacatatactaaatttaaaaaatcaaaaaatacaaacaaatctaactccgacgttaatcactcgtatacgccaacatttacaaactaataa

SEQ ID NO: 36245 - DNA, 533 bp, Artificial Sequence
  chemically treated genomic DNA (Homo sapiens) CpG-island No: 36245
tttcgattacggcgatatgttgaaacgcggtattggttatacgttagaaaatcgtaaagaagcggggattattttttggttgggcgttgacgaaaatatagtgttgattaatcggtaaaaaattagcgttaacggtgtgttgtaatggtttattattcgtcgtttgatcgaagaggtgatgtagcggattacggttaaggtcgttagtagcgaaatatttatcggtacgttttttggtggtaattagtaaaaagtggtgatcggtcgttgggtttatgttgttagttagattttgttgttcgacgagttaacgcgcggcgtcgatatcgaagttaaatagtagatttatcgtattgttcgtgagttggttgtcgaaggaaaaagcgtggtgtttatttttagtgaagtggaggagttgtcgttggtgtgtgatcgtattttgttattatagtacggtacgttttcgtaggagttttacgtttcggttaatgtggattagttgatgttcgttattttgtttgtgtattgatgaa

SEQ ID NO: 36246 - DNA, 533 bp, Artificial Sequence
  chemically treated genomic DNA (Homo sapiens) CpG-island No: 36246
ttcatcaatacacaaacaaaataacgaacatcaactaatccacattaaccgaaacgtaaaactcctacgaaaacgtaccgtactataataacaaaatacgatcacacaccaacgacaactcctccacttcactaaaaataaacaccacgctttttccttcgacaaccaactcacgaacaatacgataaatctactatttaacttcgatatcgacgccgcgcgttaactcgtcgaacaacaaaatctaactaacaacataaacccaacgaccgatcaccactttttactaattaccaccaaaaaacgtaccgataaatatttcgctactaacgaccttaaccgtaatccgctacatcacctcttcgatcaaacgacgaataataaaccattacaacacaccgttaacgctaattttttaccgattaatcaacactatattttcgtcaacgcccaaccaaaaaataatccccgcttctttacgattttctaacgtataaccaataccgcgtttcaacatatcgccgtaatcgaaa

SEQ ID NO: 36247 - DNA, 533 bp, Artificial Sequence
  chemically treated genomic DNA (Homo sapiens) CpG-island No: 36247
tttattagtgtatagatagaatggcggatattagttaatttatattgatcggagcgtgaaatttttgcgagaacgtgtcgtgttgtaataataggatgcggttatatattagcggtaatttttttattttattggagataaatattacgttttttttttcggtagttagtttacggataatacggtaaatttgttgtttggtttcgatatcgacgtcgcgcgttggttcgtcgagtaataaaatttggttggtagtatagatttaacgatcgattattattttttgttgattgttattagaaagcgtgtcgatgggtgtttcgttattggcggttttgatcgtaattcgttgtattattttttcggttaggcggcggatggtggattattgtagtatatcgttggcgttgattttttgtcgattggttagtattgtattttcgttaacgtttaattagggaatgattttcgtttttttgcggttttttggcgtatagttaatgtcgcgttttagtatgtcgtcgtaatcgggg

SEQ ID NO: 36248 - DNA, 533 bp, Artificial Sequence
  chemically treated genomic DNA (Homo sapiens) CpG-island No: 36248
ccccgattacgacgacatactaaaacgcgacattaactatacgccaaaaaaccgcaaaaaaacgaaaatcattccctaattaaacgttaacgaaaatacaatactaaccaatcgacaaaaaatcaacgccaacgatatactacaataatccaccatccgccgcctaaccgaaaaaataatacaacgaattacgatcaaaaccgccaataacgaaacacccatcgacacgctttctaataacaatcaacaaaaaataataatcgatcgttaaatctatactaccaaccaaattttattactcgacgaaccaacgcgcgacgtcgatatcgaaaccaaacaacaaatttaccgtattatccgtaaactaactaccgaaaaaaaaaacgtaatatttatctccaataaaataaaaaaattaccgctaatatataaccgcatcctattattacaacacgacacgttctcgcaaaaatttcacgctccgatcaatataaattaactaatatccgccattctatctatacactaataaa

SEQ ID NO: 36249 - DNA, 776 bp, Artificial Sequence
  chemically treated genomic DNA (Homo sapiens) CpG-island No: 36249
atggtacgggtaataaagtttattacgtcgtttacgttttgcggttcgtaacgtatcgtattattatcgcgtattacgttaatggtatttatgttgtcgagcgaaacgggagttagtgaaagttgcggttgatcgtaaggggcgaaggggacggggatgtcgtttattaggacggtcgagcggttggcgaggcgcgggtttaggtttcggatgttaaagtttatcgttaggtcgtggttgtcggtgtcgttgtttttcggcgcgttgacgttagggatgcggttaagtattttacgtatggtggttgcgtcggttttggcgaaatttttacggcggattacgttacgcgcgttagtatgtttaaatacgtcgtttttacgcgtattatttagttagtcgtcgattacggttagggtatttttttttggtgcgggcgcgggttttagcgtttagttgttattttttagcggttttatttgtagttcgttgtcgtttagtagttgttgtaggtcgttttcgacgtcgtaatcgtcgtgtaggtcgttgttttgtttgtcgcgcgttaggttggcgttaatcgagagggtaaattcgttgtgtgcggtatattgattgagcgttttatcgagcgatttcggtgcgatattaatttgtgtagtaaaagcggaaaacgagagatcggttagcggtagtaggtttaggcgaatggtgttaattaaaggtgttgttttacgaaaaacgcgtaacggcgttatattttttttattattattttg

SEQ ID NO: 36250 - DNA, 776 bp, Artificial Sequence
  chemically treated genomic DNA (Homo sapiens) CpG-island No: 36250
caaaataataataaaaaaaatataacgccgttacgcgtttttcgtaaaacaacacctttaattaacaccattcgcctaaacctactaccgctaaccgatctctcgttttccgcttttactacacaaattaatatcgcaccgaaatcgctcgataaaacgctcaatcaatataccgcacacaacgaatttaccctctcgattaacgccaacctaacgcgcgacaaacaaaacaacgacctacacgacgattacgacgtcgaaaacgacctacaacaactactaaacgacaacgaactacaaataaaaccgctaaaaaataacaactaaacgctaaaacccgcgcccgcaccaaaaaaaaataccctaaccgtaatcgacgactaactaaataatacgcgtaaaaacgacgtatttaaacatactaacgcgcgtaacgtaatccgccgtaaaaatttcgccaaaaccgacgcaaccaccatacgtaaaatacttaaccgcatccctaacgtcaacgcgccgaaaaacaacgacaccgacaaccacgacctaacgataaactttaacatccgaaacctaaacccgcgcctcgccaaccgctcgaccgtcctaataaacgacatccccgtccccttcgccccttacgatcaaccgcaactttcactaactcccgtttcgctcgacaacataaataccattaacgtaatacgcgataataatacgatacgttacgaaccgcaaaacgtaaacgacgtaataaactttattacccgtaccat

SEQ ID NO: 36251 - DNA, 776 bp, Artificial Sequence
  chemically treated genomic DNA (Homo sapiens) CpG-island No: 36251
taaaatgatgatggggaaggtatgacgtcgttacgcgtttttcgtaaaataatatttttggttaatattattcgtttgagtttgttgtcgttggtcggtttttcgtttttcgtttttgttgtataggttaatatcgtatcgggatcgttcgataaagcgtttaattagtatgtcgtatatagcggatttattttttcggttgacgttagtttgacgcgcggtaagtagagtaacggtttgtacggcgattacgacgtcgagagcggtttgtaataattgttggacggtagcggattgtaggtaaaatcgttgggaaataatagttggacgttggagttcgcgttcgtattaaaagaagatgttttgatcgtggtcggcgattggttgggtgatgcgcgtgaaaacgacgtatttgaatatgttggcgcgcgtgacgtgattcgtcgtgaggatttcgttaaaatcggcgtaattattatgcgtgaggtatttaatcgtatttttggcgttagcgcgtcggaaaataacggtatcggtagttacgatttggcgatgaattttggtattcggggtttgaattcgcgtttcgttagtcgttcgatcgttttgatggacggtattttcgtttttttcgttttttacggttagtcgtagtttttattggttttcgtttcgttcggtaatatggatgttattgacgtggtacgcggtggtggtgcggtgcgttacggatcgtagagcgtgggcggcgtggtgaattttgttattcgtgttat

SEQ ID NO: 36252 - DNA, 776 bp, Artificial Sequence
  chemically treated genomic DNA (Homo sapiens) CpG-island No: 36252
ataacacgaataacaaaattcaccacgccgcccacgctctacgatccgtaacgcaccgcaccaccaccgcgtaccacgtcaataacatccatattaccgaacgaaacgaaaaccaataaaaactacgactaaccgtaaaaaacgaaaaaaacgaaaataccgtccatcaaaacgatcgaacgactaacgaaacgcgaattcaaaccccgaataccaaaattcatcgccaaatcgtaactaccgataccgttattttccgacgcgctaacgccaaaaatacgattaaatacctcacgcataataattacgccgattttaacgaaatcctcacgacgaatcacgtcacgcgcgccaacatattcaaatacgtcgttttcacgcgcatcacccaaccaatcgccgaccacgatcaaaacatcttcttttaatacgaacgcgaactccaacgtccaactattatttcccaacgattttacctacaatccgctaccgtccaacaattattacaaaccgctctcgacgtcgtaatcgccgtacaaaccgttactctacttaccgcgcgtcaaactaacgtcaaccgaaaaaataaatccgctatatacgacatactaattaaacgctttatcgaacgatcccgatacgatattaacctatacaacaaaaacgaaaaacgaaaaaccgaccaacgacaacaaactcaaacgaataatattaaccaaaaatattattttacgaaaaacgcgtaacgacgtcataccttccccatcatcatttta

SEQ ID NO: 36253 - DNA, 538 bp, Artificial Sequence
  chemically treated genomic DNA (Homo sapiens) CpG-island No: 36253
agcgtatagttcggagttaagcgcgcggttgaggaacgattagggttttgtaaagttggagtttgggcgcgtagattttcggatcggagttttcggtttgaggtcgttcgttaggaggaaaatgaggtcgttcgaattaagttgggacgcgtagtaaagttcgagtttttcgcgtatattaggggttcgggcgggagcggggagttttggggacggagaaggggcgcgggacgtttggattaggaatttatttgacgtcgagtcgggtagcgtcgaggttgttttttcgcgttgcgtattcgttcgttcgtttcgtattttttttttttttttcgggcgttcgcggtcgtcgcgtttcgggttttgaatttttcgagttcgtcgtttcgcgcggttggagggcgtcggttgtatttattcgttttttggtaggagtcgcgcgcgtttttttttttttttttcgttttgtgtttttaagatttttttttatttttttttttttagtttttatttttttttttttttttttttttttttt

SEQ ID NO: 36254 - DNA, 538 bp, Artificial Sequence
  chemically treated genomic DNA (Homo sapiens) CpG-island No: 36254
aaaaaaaaaaaaaaaaaaaaaaaaaaaataaaaactaaaaaaaaaaaaataaaaaaaaatcttaaaaacacaaaacgaaaaaaaaaaaaaaaaacgcgcgcgactcctaccaaaaaacgaataaatacaaccgacgccctccaaccgcgcgaaacgacgaactcgaaaaattcaaaacccgaaacgcgacgaccgcgaacgcccgaaaaaaaaaaaaaaaatacgaaacgaacgaacgaatacgcaacgcgaaaaaacaacctcgacgctacccgactcgacgtcaaataaattcctaatccaaacgtcccgcgccccttctccgtccccaaaactccccgctcccgcccgaacccctaatatacgcgaaaaactcgaactttactacgcgtcccaacttaattcgaacgacctcattttcctcctaacgaacgacctcaaaccgaaaactccgatccgaaaatctacgcgcccaaactccaactttacaaaaccctaatcgttcctcaaccgcgcgcttaactccgaactatacgct

SEQ ID NO: 36255 - DNA, 538 bp, Artificial Sequence
  chemically treated genomic DNA (Homo sapiens) CpG-island No: 36255
aaggggagggaagaagagaagggaggagtgggggttaggggagagggggtggggagggattttggaggtataaagcggaggggaaggggagggacgcgcgcggtttttattaggaggcgagtgggtgtaatcggcgttttttagtcgcgcggggcggcggattcggaggatttagaattcggagcgcggcggtcgcgggcgttcgggaggaagaggaggagtacgaggcgggcgggcgggtgcgtagcgcgaagaggtagtttcggcgttgttcggttcggcgttaggtgagtttttgatttaggcgtttcgcgtttttttttcgtttttagggtttttcgttttcgttcgagtttttggtgtgcgcggaaggttcgggttttgttgcgcgttttaatttggttcgggcggttttattttttttttagcgggcggttttaggtcgggggtttcggttcgggggtttacgcgtttaggttttaattttgtaagattttagtcgttttttagtcgcgcgtttggtttcgagttgtgcgtt

SEQ ID NO: 36256 - DNA, 538 bp, Artificial Sequence
  chemically treated genomic DNA (Homo sapiens) CpG-island No: 36256
aacgcacaactcgaaaccaaacgcgcgactaaaaaacgactaaaatcttacaaaattaaaacctaaacgcgtaaacccccgaaccgaaacccccgacctaaaaccgcccgctaaaaaaaaaataaaaccgcccgaaccaaattaaaacgcgcaacaaaacccgaaccttccgcgcacaccaaaaactcgaacgaaaacgaaaaaccctaaaaacgaaaaaaaaacgcgaaacgcctaaatcaaaaactcacctaacgccgaaccgaacaacgccgaaactacctcttcgcgctacgcacccgcccgcccgcctcgtactcctcctcttcctcccgaacgcccgcgaccgccgcgctccgaattctaaatcctccgaatccgccgccccgcgcgactaaaaaacgccgattacacccactcgcctcctaataaaaaccgcgcgcgtccctccccttcccctccgctttatacctccaaaatccctccccaccccctctcccctaacccccactcctcccttctcttcttccctcccctt

SEQ ID NO: 36257 - DNA, 652 bp, Artificial Sequence
  chemically treated genomic DNA (Homo sapiens) CpG-island No: 36257
ttcggagtaatagtcgtttgaggattcgaagttgcgggtcggacgagcgtcgagattattgttttttagttttcgcgcgcgttttcgtttttagcgtcgttatcgtcgtcgtcgtcgtttttagcgcggtttcgcgtaggcgcgtttacgatcgcgtcgttttttttttattttttcgttcgtttcgtttcgttggtttcgtcgtcgttatagttgcggcgcggcgcgtagttatagagattcggatgtcgttgggtaggaattgcggtgagggttggcgggcgggggaggggtcgttatagatgacgttattgttttatttagtttttttttttgtcgttgttgttgtcgtcgtttttgttttacggtttggagtattaggtcgaagtcgaagggagcgttcggatttcggatagtagttaggattcgggtttttacgtttcggcgttagggattggatagaatgtgcggttattaggtgtttagtagatcgatagttttttcgtgtcggtttttggttaagtagggattcggaagttatttttacggcgttcgcgttcggagttttggtttttttatttgtttgtagatataaattttattttttgcgaagatggtgtatacgtagtttcgagtatagattcgaagttgt

SEQ ID NO: 36258 - DNA, 652 bp, Artificial Sequence
  chemically treated genomic DNA (Homo sapiens) CpG-island No: 36258
acaacttcgaatctatactcgaaactacgtatacaccatcttcgcaaaaaataaaatttatatctacaaacaaataaaaaaaccaaaactccgaacgcgaacgccgtaaaaataacttccgaatccctacttaaccaaaaaccgacacgaaaaaactatcgatctactaaacacctaataaccgcacattctatccaatccctaacgccgaaacgtaaaaacccgaatcctaactactatccgaaatccgaacgctcccttcgacttcgacctaatactccaaaccgtaaaacaaaaacgacgacaacaacaacgacaaaaaaaaaaactaaataaaacaataacgtcatctataacgacccctcccccgcccgccaaccctcaccgcaattcctacccaacgacatccgaatctctataactacgcgccgcgccgcaactataacgacgacgaaaccaacgaaacgaaacgaacgaaaaaataaaaaaaaaacgacgcgatcgtaaacgcgcctacgcgaaaccgcgctaaaaacgacgacgacgacgataacgacgctaaaaacgaaaacgcgcgcgaaaactaaaaaacaataatctcgacgctcgtccgacccgcaacttcgaatcctcaaacgactattactccgaa

SEQ ID NO: 36259 - DNA, 652 bp, Artificial Sequence
  chemically treated genomic DNA (Homo sapiens) CpG-island No: 36259
atagtttcgggtttgtgttcggggttgcgtgtatattattttcgtagggagtggggtttgtatttgtaggtaggtagaagagttagggtttcgggcgcggacgtcgtaggggtagttttcgagtttttatttggttaagggtcggtacggaggggttgtcgatttattgggtatttaatagtcgtatattttgtttagtttttggcgtcggaacgtgaaggttcgggttttggttgttattcgggattcggacgtttttttcggtttcggtttggtgttttaggtcgtaaggtaaaggcggcggtagtagtagcggtagagaaagaagttgggtaaggtagtgacgttatttgtggcggtttttttttcgttcgttagtttttatcgtagtttttgtttaacgatattcgggtttttgtagttgcgcgtcgcgtcgtagttgtagcggcggcggagttagcggggcggggcgagcggaggggtgggggaggggcgacgcggtcgtgagcgcgtttgcgcggggtcgcgttagaggcggcggcggcggcggtggcggcgttagggacgggagcgcgcgcgggagttagagagtagtggtttcggcgttcgttcggttcgtagtttcgggtttttaggcggttgttgtttcgga

SEQ ID NO: 36260 - DNA, 652 bp, Artificial Sequence
  chemically treated genomic DNA (Homo sapiens) CpG-island No: 36260
tccgaaacaacaaccgcctaaaaacccgaaactacgaaccgaacgaacgccgaaaccactactctctaactcccgcgcgcgctcccgtccctaacgccgccaccgccgccgccgccgcctctaacgcgaccccgcgcaaacgcgctcacgaccgcgtcgcccctcccccacccctccgctcgccccgccccgctaactccgccgccgctacaactacgacgcgacgcgcaactacaaaaacccgaatatcgttaaacaaaaactacgataaaaactaacgaacgaaaaaaaaaccgccacaaataacgtcactaccttacccaacttctttctctaccgctactactaccgccgcctttaccttacgacctaaaacaccaaaccgaaaccgaaaaaaacgtccgaatcccgaataacaaccaaaacccgaaccttcacgttccgacgccaaaaactaaacaaaatatacgactattaaatacccaataaatcgacaacccctccgtaccgacccttaaccaaataaaaactcgaaaactacccctacgacgtccgcgcccgaaaccctaactcttctacctacctacaaatacaaaccccactccctacgaaaataatatacacgcaaccccgaacacaaacccgaaactat

SEQ ID NO: 36261 - DNA, 746 bp, Artificial Sequence
  chemically treated genomic DNA (Homo sapiens) CpG-island No: 36261
ggcggcgcgttcgagcgggtgggggcgcggggacgtttttttttcgttcgggaaaagttttgtaggtcgtttttcggttaggtcggtttgcggtcgtcgtttgtttcgtcgttataaatatttatttcggtcgcggacggttagagggtcgcgtttttttttcgcgttatcgtaattaatatttcgttttcgttttttcgttatcgttttcgtcgagcgttaatttttcgtcgttcgtcgttcggttcgggggaggaggtcggttagggggtggagttgtcgcgttttttttcgggagcgttcgggtagacgttcggtttgtttataggttttaggtttgttcgtcgtcgtcgtcgcgtaggttcgtatcgttcgttagttcgtcgtcggttcgagcgtcgtatttattcggagtagtcgtaggcgggtaggtttttggtcggtcgaggcggcggcggcggtagtcggggagggggttatcgcggcggcgacggcggtagtcgggggaggggttatcgttgtagcggcgggttaggttaggttggggaaggggaggaggaggggtcgtttcgggttgcgttcgggttttcggttgtcggcgttttcgcggtttagattattcgggcgttggagagggaggtagagagtcggtttcggagaaggaggaggaagagttcgaggatttatcgttttcgcgttttagttgtttagagtttttttattttttttttttttttttttttttt

SEQ ID NO: 36262 - DNA, 746 bp, Artificial Sequence
  chemically treated genomic DNA (Homo sapiens) CpG-island No: 36262
aaaaaaaaaaaaaaaaaaaaaaaaataaaaaaactctaaacaactaaaacgcgaaaacgataaatcctcgaactcttcctcctccttctccgaaaccgactctctacctccctctccaacgcccgaataatctaaaccgcgaaaacgccgacaaccgaaaacccgaacgcaacccgaaacgacccctcctcctccccttccccaacctaacctaacccgccgctacaacgataacccctcccccgactaccgccgtcgccgccgcgataaccccctccccgactaccgccgccgccgcctcgaccgaccaaaaacctacccgcctacgactactccgaataaatacgacgctcgaaccgacgacgaactaacgaacgatacgaacctacgcgacgacgacgacgaacaaacctaaaacctataaacaaaccgaacgtctacccgaacgctcccgaaaaaaaacgcgacaactccaccccctaaccgacctcctcccccgaaccgaacgacgaacgacgaaaaattaacgctcgacgaaaacgataacgaaaaaacgaaaacgaaatattaattacgataacgcgaaaaaaaaacgcgaccctctaaccgtccgcgaccgaaataaatatttataacgacgaaacaaacgacgaccgcaaaccgacctaaccgaaaaacgacctacaaaacttttcccgaacgaaaaaaaaacgtccccgcgcccccacccgctcgaacgcgccgcc

SEQ ID NO: 36263 - DNA, 746 bp, Artificial Sequence
  chemically treated genomic DNA (Homo sapiens) CpG-island No: 36263
aaggagaaaaaaaaaagggggagggtaagagagttttaagtagttaaggcgcgaaaacgatgagttttcgagttttttttttttttttttcgggatcggttttttgtttttttttttaacgttcggatgatttgagtcgcgagggcgtcgatagtcgggggttcggacgtagttcggggcggtttttttttttttttttttttagtttgatttggttcgtcgttgtagcggtgatttttttttcggttgtcgtcgtcgtcgtcgcggtgatttttttttcggttgtcgtcgtcgtcgtttcggtcgattagggatttgttcgtttgcggttgtttcgggtaagtgcggcgttcgggtcgacggcgggttggcgggcggtgcgggtttgcgcggcggcggcggcgggtaggtttggggtttgtaaataagtcgggcgtttgttcgggcgttttcgggaggagacgcgataattttattttttggtcggttttttttttcgagtcgggcggcggacggcgaggggttaacgttcggcgagggcggtggcggggaggcgggggcggggtgttagttgcggtggcgcggggagggggcgcgattttttggtcgttcgcggtcgagatgggtgtttgtggcggcgaagtaggcgacggtcgtaggtcggtttggtcggagagcggtttgtagaatttttttcgagcggggagggggcgttttcgcgtttttattcgttcgggcgcgtcgtt

SEQ ID NO: 36264 - DNA, 746 bp, Artificial Sequence
  chemically treated genomic DNA (Homo sapiens) CpG-island No: 36264
aacgacgcgcccgaacgaataaaaacgcgaaaacgccccctccccgctcgaaaaaaattctacaaaccgctctccgaccaaaccgacctacgaccgtcgcctacttcgccgccacaaacacccatctcgaccgcgaacgaccaaaaaatcgcgccccctccccgcgccaccgcaactaacaccccgcccccgcctccccgccaccgccctcgccgaacgttaacccctcgccgtccgccgcccgactcgaaaaaaaaaaccgaccaaaaaataaaattatcgcgtctcctcccgaaaacgcccgaacaaacgcccgacttatttacaaaccccaaacctacccgccgccgccgccgcgcaaacccgcaccgcccgccaacccgccgtcgacccgaacgccgcacttacccgaaacaaccgcaaacgaacaaatccctaatcgaccgaaacgacgacgacgacaaccgaaaaaaaaatcaccgcgacgacgacgacgacaaccgaaaaaaaaatcaccgctacaacgacgaaccaaatcaaactaaaaaaaaaaaaaaaaaaaaaccgccccgaactacgtccgaacccccgactatcgacgccctcgcgactcaaatcatccgaacgttaaaaaaaaaaacaaaaaaccgatcccgaaaaaaaaaaaaaaaaaactcgaaaactcatcgttttcgcgccttaactacttaaaactctcttaccctcccccttttttttttctcctt

SEQ ID NO: 36265 - DNA, 749 bp, Artificial Sequence
  chemically treated genomic DNA (Homo sapiens) CpG-island No: 36265
aggtagggaatgcggtttttcggttagtcgttttcgaggtattttaaggattttagggtcgaaggtttatttcggggttttagttagtgttcgttgcgttgcggtcgtagatattcgggattgcggtggagttttgtttaatttaggtttgtaagtcgggcggtttttcgtttaagtcggttgtatagttttaggcggttttgtttgcgttgtcgcgttttaaggcggttttagttggtggtttttgcgaaaggtcgcgcgtttagcgttcgtagtagacgcggtaggtcgcgtagtaggcggtagcgcggtagggcgcgtagcggcggggggatgtcgtttttggcgtagaggcgattgaagtaagcgagtagtagtagcgggcgcggggtagcgtggagtagggcgagtaggggcgcggcgcgggggtcggggtcgttgatcgggcgaaggtcggcgtcgttttatagtagtagtatagtgttttgttttcgcgttacgcgcgttcgcgtcgtttagagttacggtagcgggtttacgcgcgttacgtgtttttttttttataggtttacgattacgtcgcgttcgtcgtttagcgttgttcgtagtagtttagttagcgtttttattaggcgtcgttgcgttttcgagttcgtcgcgtgtaggaggagtattggtcgcgttgggttcgggtttggtggcgggaagtaatagatgaaggttgggcggttgagagattgtttagtttt

SEQ ID NO: 36266 - DNA, 749 bp, Artificial Sequence
  chemically treated genomic DNA (Homo sapiens) CpG-island No: 36266
aaaactaaacaatctctcaaccgcccaaccttcatctattacttcccgccaccaaacccgaacccaacgcgaccaatactcctcctacacgcgacgaactcgaaaacgcaacgacgcctaataaaaacgctaactaaactactacgaacaacgctaaacgacgaacgcgacgtaatcgtaaacctataaaaaaaaaaacacgtaacgcgcgtaaacccgctaccgtaactctaaacgacgcgaacgcgcgtaacgcgaaaacaaaacactatactactactataaaacgacgccgaccttcgcccgatcaacgaccccgacccccgcgccgcgcccctactcgccctactccacgctaccccgcgcccgctactactactcgcttacttcaatcgcctctacgccaaaaacgacatccccccgccgctacgcgccctaccgcgctaccgcctactacgcgacctaccgcgtctactacgaacgctaaacgcgcgacctttcgcaaaaaccaccaactaaaaccgccttaaaacgcgacaacgcaaacaaaaccgcctaaaactatacaaccgacttaaacgaaaaaccgcccgacttacaaacctaaattaaacaaaactccaccgcaatcccgaatatctacgaccgcaacgcaacgaacactaactaaaaccccgaaataaaccttcgaccctaaaatccttaaaatacctcgaaaacgactaaccgaaaaaccgcattccctacct

SEQ ID NO: 36267 - DNA, 749 bp, Artificial Sequence
  chemically treated genomic DNA (Homo sapiens) CpG-island No: 36267
agggttgagtagttttttagtcgtttagtttttatttgttgtttttcgttattaggttcgggtttagcgcggttagtgttttttttgtacgcggcggattcggaggcgtagcggcgtttggtgggagcgttggttgaattgttacgggtagcgttgggcggcgggcgcgacgtgatcgtggatttgtgggaggggaggtacgtggcgcgcgtgggttcgttgtcgtggttttgggcggcgcggacgcgcgtagcgcgggagtagggtattgtgttgttgttgtggagcggcgtcgattttcgttcggttagcggtttcgattttcgcgtcgcgtttttgttcgttttgttttacgttgtttcgcgttcgttgttgttgttcgtttattttagtcgtttttgcgttaagggcgatattttttcgtcgttgcgcgttttgtcgcgttatcgtttgttgcgcgatttgtcgcgtttgttgcgggcgttggacgcgcggtttttcgtagaggttattagttggggtcgttttggggcgcggtagcgtaggtagagtcgtttagagttgtgtagtcggtttgaacgagaggtcgttcgatttgtagatttaggttgagtagagttttatcgtagtttcgggtgtttgcggtcgtaacgtaacggatattggttggaatttcggaatgagttttcgattttgaaatttttggggtgtttcgaggacgattggtcgaaaagtcgtattttttgttt

SEQ ID NO: 36268 - DNA, 749 bp, Artificial Sequence
  chemically treated genomic DNA (Homo sapiens) CpG-island No: 36268
aaacaaaaaatacgacttttcgaccaatcgtcctcgaaacaccccaaaaatttcaaaatcgaaaactcattccgaaattccaaccaatatccgttacgttacgaccgcaaacacccgaaactacgataaaactctactcaacctaaatctacaaatcgaacgacctctcgttcaaaccgactacacaactctaaacgactctacctacgctaccgcgccccaaaacgaccccaactaataacctctacgaaaaaccgcgcgtccaacgcccgcaacaaacgcgacaaatcgcgcaacaaacgataacgcgacaaaacgcgcaacgacgaaaaaatatcgcccttaacgcaaaaacgactaaaataaacgaacaacaacaacgaacgcgaaacaacgtaaaacaaaacgaacaaaaacgcgacgcgaaaatcgaaaccgctaaccgaacgaaaatcgacgccgctccacaacaacaacacaataccctactcccgcgctacgcgcgtccgcgccgcccaaaaccacgacaacgaacccacgcgcgccacgtacctcccctcccacaaatccacgatcacgtcgcgcccgccgcccaacgctacccgtaacaattcaaccaacgctcccaccaaacgccgctacgcctccgaatccgccgcgtacaaaaaaaacactaaccgcgctaaacccgaacctaataacgaaaaacaacaaataaaaactaaacgactaaaaaactactcaaccct

SEQ ID NO: 36269 - DNA, 940 bp, Artificial Sequence
  chemically treated genomic DNA (Homo sapiens) CpG-island No: 36269
  unsure (896)
atatttcggagtttagttcgttttttagtttgagcggtgtttacgatgatggaagattttgtaagattttttttgggtcgtttcgaatcgagttgttttagagttgtcgggtaggtgagggggagataggtgtacgagttgatttcgtaggtgatcgaagagggggagggaagtaggttcgatggagtcgatttgtattcgacgtaattcgttgggttcgaaaggggagttaagttagatggaataaacgatttttagttcgagttcggcggggcgaataggatattttgcgttggtttatttgttaaagagggcgagcgcgcgggtcgatcggagtagagcgagagggcggggttaagcggagcggatggggttaagtggacgagtcgagggagtggggcgtagtcgaaagtagtcgagtgaagtcgaatagagacgaggcgcgtttcgggtggtgttaagcggaaatgagtggggtcgagcggggtagggtggagtcgagcggagtcgggtggagtcgagcggagtcgagcgagtgagaagtcggaggtcgagagggtcgggtcgatttgaagaggtggggattgttgagggttggtttgtcggttttggaaattttgttatattgttatttttggatttcgtcgttttcgttttaacggaaaattggggtttttggatttttttgattcgagttgtaattatcgacgagaattttttttattggcggtttcggcgtcggtattttataaaatgagagcggcgagggcggtcgaagacgagtgtgcggagttttaggtttttcgttcgggttcgtttttcgtatattcgggtaggatcggatgtggtgtttttcgttgaagttttcggttttagtttatttgggagcgggtggnggttttggggaatgttattttaaagattttgtttttggggaacg

SEQ ID NO: 36270 - DNA, 940 bp, Artificial Sequence
  chemically treated genomic DNA (Homo sapiens) CpG-island No: 36270
  unsure (45)
cgttccccaaaaacaaaatctttaaaataacattccccaaaaccnccacccgctcccaaataaactaaaaccgaaaacttcaacgaaaaacaccacatccgatcctacccgaatatacgaaaaacgaacccgaacgaaaaacctaaaactccgcacactcgtcttcgaccgccctcgccgctctcattttataaaataccgacgccgaaaccgccaataaaaaaaattctcgtcgataattacaactcgaatcaaaaaaatccaaaaaccccaattttccgttaaaacgaaaacgacgaaatccaaaaataacaatataacaaaatttccaaaaccgacaaaccaaccctcaacaatccccacctcttcaaatcgacccgaccctctcgacctccgacttctcactcgctcgactccgctcgactccacccgactccgctcgactccaccctaccccgctcgaccccactcatttccgcttaacaccacccgaaacgcgcctcgtctctattcgacttcactcgactactttcgactacgccccactccctcgactcgtccacttaaccccatccgctccgcttaaccccgccctctcgctctactccgatcgacccgcgcgctcgccctctttaacaaataaaccaacgcaaaatatcctattcgccccgccgaactcgaactaaaaatcgtttattccatctaacttaactcccctttcgaacccaacgaattacgtcgaatacaaatcgactccatcgaacctacttccctccccctcttcgatcacctacgaaatcaactcgtacacctatctccccctcacctacccgacaactctaaaacaactcgattcgaaacgacccaaaaaaaatcttacaaaatcttccatcatcgtaaacaccgctcaaactaaaaaacgaactaaactccgaaatat

SEQ ID NO: 36271 - DNA, 940 bp, Artificial Sequence
  chemically treated genomic DNA (Homo sapiens) CpG-island No: 36271
  unsure (45)
cgttttttaaaagtaaagtttttaaagtgatattttttagaattnttattcgtttttaggtgaattggagtcgaggattttaacggaagatattatattcgattttattcgaatatacgaaaagcggattcgagcggggggtttaaggtttcgtatattcgttttcggtcgttttcgtcgtttttattttataaaatgtcgacgtcgaggtcgttagtgaaaaagattttcgtcggtggttataattcgggttaggggaatttaggagttttagtttttcgttgggacggaaacggcggaatttaaaagtgatagtatgataggatttttagagtcgatagattagtttttagtaatttttatttttttaagtcggttcggttttttcggttttcggttttttattcgttcggtttcgttcggttttattcggtttcgttcggttttattttgtttcgttcggttttatttattttcgtttggtattattcgaaacgcgtttcgtttttgttcggttttattcggttattttcggttgcgttttattttttcggttcgtttatttggttttattcgtttcgtttggtttcgttttttcgttttgtttcgatcggttcgcgcgttcgttttttttggtaggtggattaacgtaagatgttttgttcgtttcgtcgggttcgggttgggggtcgtttgttttatttggtttagtttttttttcgggtttagcgggttgcgtcgggtataggtcggttttatcgggtttgttttttttttttttttcggttatttacgaggttagttcgtgtatttgttttttttttatttattcgatagttttagggtagttcggttcgaaacgatttaggaggggttttgtaaagttttttattatcgtgggtatcgtttaggttgaggaacgaattgagtttcggggtat

SEQ ID NO: 36272 - DNA, 940 bp, Artificial Sequence
  chemically treated genomic DNA (Homo sapiens) CpG-island No: 36272
  unsure (896)
ataccccgaaactcaattcgttcctcaacctaaacgatacccacgataataaaaaactttacaaaacccctcctaaatcgtttcgaaccgaactaccctaaaactatcgaataaataaaaaaaaaacaaatacacgaactaacctcgtaaataaccgaaaaaaaaaaaaaaaacaaacccgataaaaccgacctatacccgacgcaacccgctaaacccgaaaaaaaaactaaaccaaataaaacaaacgacccccaacccgaacccgacgaaacgaacaaaacatcttacgttaatccacctaccaaaaaaaacgaacgcgcgaaccgatcgaaacaaaacgaaaaaacgaaaccaaacgaaacgaataaaaccaaataaacgaaccgaaaaaataaaacgcaaccgaaaataaccgaataaaaccgaacaaaaacgaaacgcgtttcgaataataccaaacgaaaataaataaaaccgaacgaaacaaaataaaaccgaacgaaaccgaataaaaccgaacgaaaccgaacgaataaaaaaccgaaaaccgaaaaaaccgaaccgacttaaaaaaataaaaattactaaaaactaatctatcgactctaaaaatcctatcatactatcacttttaaattccgccgtttccgtcccaacgaaaaactaaaactcctaaattcccctaacccgaattataaccaccgacgaaaatctttttcactaacgacctcgacgtcgacattttataaaataaaaacgacgaaaacgaccgaaaacgaatatacgaaaccttaaaccccccgctcgaatccgcttttcgtatattcgaataaaatcgaatataatatcttccgttaaaatcctcgactccaattcacctaaaaacgaataanaattctaaaaaatatcactttaaaaactttacttttaaaaaacg

SEQ ID NO: 36273 - DNA, 662 bp, Artificial Sequence
  chemically treated genomic DNA (Homo sapiens) CpG-island No: 36273
tcgtaagtttgcgtcgcgtattttttttgtcgggaataatggcgggagggggaggggatagagaatcgagcgcgggggatcgagttagatttcggggagatagaaattgttttcgtttcgttttttttttgttttgaagtagaaagttcgagttcgagaggtagtggtcgaggacgaaataagtagtttaggaggagggcgatcgcggatcgggggagaggggaaatcgagttagagggaggggcggcgaggggagagcgcgtaggggagacggaaggggttgcgggacggcgttttggggagttggggaggcgattttttgggttttagcgggtttagcgggtgtcgagatgtttcggggcgttcggttagcgcgcgcggggtttcggtcgtttttttgcggtttcgtcggtcgtaggagtttcgttgggttgcgttgcgtaggcggcgggcggcgggaggggaaagttcgcggttcggaagcggcggcggggagtagaatttacgggtttcgcgcgtgtcggcgttgggttacgtggagttgatgttaggcggaggtttcgggttcggacgttttatatcgcgtcgttcgtgtcgggtcgggtagtgtagggtagggtagggtagggtagggtaggatagggtagggtagggtagggtcg

SEQ ID NO: 36274 - DNA, 662 bp, Artificial Sequence
  chemically treated genomic DNA (Homo sapiens) CpG-island No: 36274
cgaccctaccctaccctaccctatcctaccctaccctaccctaccctaccctacactacccgacccgacacgaacgacgcgatataaaacgtccgaacccgaaacctccgcctaacatcaactccacgtaacccaacgccgacacgcgcgaaacccgtaaattctactccccgccgccgcttccgaaccgcgaactttcccctcccgccgcccgccgcctacgcaacgcaacccaacgaaactcctacgaccgacgaaaccgcaaaaaaacgaccgaaaccccgcgcgcgctaaccgaacgccccgaaacatctcgacacccgctaaacccgctaaaacccaaaaaatcgcctccccaactccccaaaacgccgtcccgcaaccccttccgtctcccctacgcgctctcccctcgccgcccctccctctaactcgatttcccctctcccccgatccgcgatcgccctcctcctaaactacttatttcgtcctcgaccactacctctcgaactcgaactttctacttcaaaacaaaaaaaaaacgaaacgaaaacaatttctatctccccgaaatctaactcgatcccccgcgctcgattctctatcccctccccctcccgccattattcccgacaaaaaaaatacgcgacgcaaacttacga

SEQ ID NO: 36275 - DNA, 662 bp, Artificial Sequence
  chemically treated genomic DNA (Homo sapiens) CpG-island No: 36275
cggttttgttttgttttgttttgttttgttttgttttgttttgttttgttttgtattgttcggttcggtacgggcggcgcgatgtgaggcgttcgagttcggagttttcgtttggtattagttttacgtagtttagcgtcggtacgcgcgaggttcgtaagttttgtttttcgtcgtcgttttcgagtcgcggatttttttttttcgtcgttcgtcgtttgcgtagcgtaatttagcggggtttttgcggtcgacgggatcgtagaggggcggtcgggatttcgcgcgcgttaatcgggcgtttcgggatatttcggtattcgttgagttcgttgggatttagggggtcgtttttttagttttttaaggcgtcgtttcgtagtttttttcgttttttttgcgcgtttttttttcgtcgtttttttttttgattcggttttttttttttttcggttcgcggtcgttttttttttggattgtttatttcgttttcggttattgtttttcgggttcgagttttttgttttagagtaggagagaaacggagcgaaagtagtttttgttttttcggggtttgattcggtttttcgcgttcggttttttgttttttttttttttcgttattgttttcggtaggaggagtgcgcggcgtaaatttgcga

SEQ ID NO: 36276 - DNA, 662 bp, Artificial Sequence
  chemically treated genomic DNA (Homo sapiens) CpG-island No: 36276
tcgcaaatttacgccgcgcactcctcctaccgaaaacaataacgaaaaaaaaaaaaaacaaaaaaccgaacgcgaaaaaccgaatcaaaccccgaaaaaacaaaaactactttcgctccgtttctctcctactctaaaacaaaaaactcgaacccgaaaaacaataaccgaaaacgaaataaacaatccaaaaaaaaaacgaccgcgaaccgaaaaaaaaaaaaaaccgaatcaaaaaaaaaaacgacgaaaaaaaaacgcgcaaaaaaaacgaaaaaaactacgaaacgacgccttaaaaaactaaaaaaacgaccccctaaatcccaacgaactcaacgaataccgaaatatcccgaaacgcccgattaacgcgcgcgaaatcccgaccgcccctctacgatcccgtcgaccgcaaaaaccccgctaaattacgctacgcaaacgacgaacgacgaaaaaaaaaaatccgcgactcgaaaacgacgacgaaaaacaaaacttacgaacctcgcgcgtaccgacgctaaactacgtaaaactaataccaaacgaaaactccgaactcgaacgcctcacatcgcgccgcccgtaccgaaccgaacaatacaaaacaaaacaaaacaaaacaaaacaaaacaaaacaaaacaaaacaaaaccg

SEQ ID NO: 36277 - DNA, 1238 bp, Artificial Sequence
  chemically treated genomic DNA (Homo sapiens) CpG-island No: 36277
tgtcgtcggtttttatttaggtcgaggtggttcggttttatgtatcgcgacgtaacgcggggaggtagataaggtatagggcggcgtttataatttatgttaattcgttttatgtgttcgtcgaggcggtataaatcgtcgtgacgattagcggtttaatgatcgaagttaggttggtaagagtcgcgagcgatttttgaagttgtttttgatggtcgttatttatttgtttggatagtatggtttgtaacgcgggtatttcgatgtcgtcggaagcgagaagaattataatggggaaggttatttagtttcgcgtcgcgaacgttagtaagacgtagtttagcgcgtcggtcgttatgtcggcgataatggtttgtttttcgtcgaaacgtttggtggcgggattagtgacgaaggtttgagcgagggcgtgtaagatttcgaatatcgtaagcgataggtcgattatcgtcgcgttttagcgaaagcggttttcgtcgaaaatgatttagagcgttgtcggtatttgttttacgagttgtatgataaagaagatagttataagtgcggcgacgatagttatgtttcgcgtttatcggaaggagttgattgggttgaaggtttttaagggtatcggtcgacgtttttttttatgcgatttttgtattaggaagtagtttagtagtaggttgaggtcgttgagtatcgtcgtcgtaaggaatggtgtatgtaaggagatggcgtttaatagtttttcggttacggggtttgttattatatttacgtcgaaataagcgtttatgagttcgaagtggcgagttcgattttttttatcggtgatgtcggcgatataggcgttagtaatcgtatttgtggcgtcggtgatgtcggttacgatgcgttcggcgtagaggatttataggacgggtgtggtcgttatgatcgcgtagtcgatagtggttttaagtagcgaagcgagtaggattgggcggcggttaaagcggtcggatagtgtttcgagaacgggtgcgtatagaaattgtattaacgtatatagcgttagtagtacgttatagtgattggcgatgttgtcggaatggacgatatttcgtaagaggttcggtagtatcggtataattaagtttatgtttatagtatttagggtgacggtgtcgaggatgacgatgagcgtattgttagattttatatacggtgtttgattgcgttagtaatttaat

SEQ ID NO: 36278 - DNA, 1238 bp, Artificial Sequence
  chemically treated genomic DNA (Homo sapiens) CpG-island No: 36278
attaaattactaacgcaatcaaacaccgtatataaaatctaacaatacgctcatcgtcatcctcgacaccgtcaccctaaatactataaacataaacttaattataccgatactaccgaacctcttacgaaatatcgtccattccgacaacatcgccaatcactataacgtactactaacgctatatacgttaatacaatttctatacgcacccgttctcgaaacactatccgaccgctttaaccgccgcccaatcctactcgcttcgctacttaaaaccactatcgactacgcgatcataacgaccacacccgtcctataaatcctctacgccgaacgcatcgtaaccgacatcaccgacgccacaaatacgattactaacgcctatatcgccgacatcaccgataaaaaaaatcgaactcgccacttcgaactcataaacgcttatttcgacgtaaatataataacaaaccccgtaaccgaaaaactattaaacgccatctccttacatacaccattccttacgacgacgatactcaacgacctcaacctactactaaactacttcctaatacaaaaatcgcataaaaaaaaacgtcgaccgatacccttaaaaaccttcaacccaatcaactccttccgataaacgcgaaacataactatcgtcgccgcacttataactatcttctttatcatacaactcgtaaaacaaataccgacaacgctctaaatcattttcgacgaaaaccgctttcgctaaaacgcgacgataatcgacctatcgcttacgatattcgaaatcttacacgccctcgctcaaaccttcgtcactaatcccgccaccaaacgtttcgacgaaaaacaaaccattatcgccgacataacgaccgacgcgctaaactacgtcttactaacgttcgcgacgcgaaactaaataaccttccccattataattcttctcgcttccgacgacatcgaaatacccgcgttacaaaccatactatccaaacaaataaataacgaccatcaaaaacaacttcaaaaatcgctcgcgactcttaccaacctaacttcgatcattaaaccgctaatcgtcacgacgatttataccgcctcgacgaacacataaaacgaattaacataaattataaacgccgccctataccttatctacctccccgcgttacgtcgcgatacataaaaccgaaccacctcgacctaaataaaaaccgacgaca

SEQ ID NO: 36279 - DNA, 1238 bp, Artificial Sequence
  chemically treated genomic DNA (Homo sapiens) CpG-island No: 36279
gttaaattgttaacgtagttaggtatcgtgtatgaaatttaataatgcgtttatcgttattttcggtatcgttattttggatgttgtaggtataggtttggttatgtcggtattgtcgggttttttgcgggatatcgtttatttcgatagtatcgttagttattatggcgtgttgttagcgttatatgcgttgatgtaatttttatgcgtattcgttttcggagtattgttcgatcgttttggtcgtcgtttagttttgttcgtttcgttatttggagttattatcgattacgcgattatggcgattatattcgttttgtggattttttacgtcggacgtatcgtggtcggtattatcggcgttataggtgcggttgttggcgtttatatcgtcgatattatcgatggggaagatcgggttcgttatttcgggtttatgagcgtttgtttcggcgtgggtatggtggtaggtttcgtggtcgggggattgttgggcgttatttttttgtatgtattattttttgcggcggcggtgtttaacggttttaatttattattgggttgttttttaatgtaggagtcgtataagggagagcgtcgatcgatgtttttgagagtttttaatttagttagtttttttcggtgggcgcggggtatgattatcgtcgtcgtatttatgattgttttttttattatgtaattcgtaggataggtgtcggtagcgttttgggttattttcggcgaggatcgttttcgttggagcgcgacgatgatcggtttgtcgtttgcggtattcggaattttgtacgttttcgtttaagttttcgttattggtttcgttattaaacgtttcggcgagaagtaggttattatcgtcggtatggcggtcgacgcgttgggttacgttttgttggcgttcgcgacgcgaggttggatggttttttttattatgatttttttcgttttcggcggtatcgggatgttcgcgttgtaggttatgttgtttaggtaggtagatgacgattattagggatagttttaaggatcgttcgcggtttttattagtttaatttcgattattggatcgttgatcgttacggcgatttatgtcgtttcggcgagtatatggaacgggttggtatggattgtaggcgtcgttttatattttgtttgttttttcgcgttgcgtcgcggtgtatggagtcgggttatttcgatttgaatggaagtcggcggta

SEQ ID NO: 36280 - DNA, 1238 bp, Artificial Sequence
  chemically treated genomic DNA (Homo sapiens) CpG-island No: 36280
taccgccgacttccattcaaatcgaaataacccgactccatacaccgcgacgcaacgcgaaaaaacaaacaaaatataaaacgacgcctacaatccataccaacccgttccatatactcgccgaaacgacataaatcgccgtaacgatcaacgatccaataatcgaaattaaactaataaaaaccgcgaacgatccttaaaactatccctaataatcgtcatctacctacctaaacaacataacctacaacgcgaacatcccgataccgccgaaaacgaaaaaaatcataataaaaaaaaccatccaacctcgcgtcgcgaacgccaacaaaacgtaacccaacgcgtcgaccgccataccgacgataataacctacttctcgccgaaacgtttaataacgaaaccaataacgaaaacttaaacgaaaacgtacaaaattccgaataccgcaaacgacaaaccgatcatcgtcgcgctccaacgaaaacgatcctcgccgaaaataacccaaaacgctaccgacacctatcctacgaattacataataaaaaaaacaatcataaatacgacgacgataatcataccccgcgcccaccgaaaaaaactaactaaattaaaaactctcaaaaacatcgatcgacgctctcccttatacgactcctacattaaaaaacaacccaataataaattaaaaccgttaaacaccgccgccgcaaaaaataatacatacaaaaaaataacgcccaacaatcccccgaccacgaaacctaccaccatacccacgccgaaacaaacgctcataaacccgaaataacgaacccgatcttccccatcgataatatcgacgatataaacgccaacaaccgcacctataacgccgataataccgaccacgatacgtccgacgtaaaaaatccacaaaacgaatataatcgccataatcgcgtaatcgataataactccaaataacgaaacgaacaaaactaaacgacgaccaaaacgatcgaacaatactccgaaaacgaatacgcataaaaattacatcaacgcatataacgctaacaacacgccataataactaacgatactatcgaaataaacgatatcccgcaaaaaacccgacaataccgacataaccaaacctatacctacaacatccaaaataacgataccgaaaataacgataaacgcattattaaatttcatacacgatacctaactacgttaacaatttaac

SEQ ID NO: 36281 - DNA, 508 bp, Artificial Sequence
  chemically treated genomic DNA (Homo sapiens) CpG-island No: 36281
atcgttcggcgtttttagttagcgcgtagcgggaggcggttgtgtcgtgggttcgtttttcgcgttcgagttgtcgttgtacgtttcgtgcggagttgcggtatcgggagttttcggtggggttgggtttcgtttttcgttttattcggcgttttgttttagattcggtggtcggcggattcgttgcgggttttcgggtcgcggtgatagatttcgtgtttatagggttgcgagttcgggagtttttataggttggcgaacggtcgttcgacggattttatttaggcgggacgcggtaggaggacgttcgttttgtgcggaggggtcgacggcgtcgttcgaagcgtacgtagggtaagtttaggcgttataagttttggatttcgaaatatacgatttttaaaattttaggtttatcgaaaatttcgacgaatacgcgagataatcgtgcgacgcgcgtcggttcgggtcgggcggtcgcgtgtgtaaacggttaggtttaagaatt

SEQ ID NO: 36282 - DNA, 508 bp, Artificial Sequence
  chemically treated genomic DNA (Homo sapiens) CpG-island No: 36282
aattcttaaacctaaccgtttacacacgcgaccgcccgacccgaaccgacgcgcgtcgcacgattatctcgcgtattcgtcgaaattttcgataaacctaaaattttaaaaatcgtatatttcgaaatccaaaacttataacgcctaaacttaccctacgtacgcttcgaacgacgccgtcgacccctccgcacaaaacgaacgtcctcctaccgcgtcccgcctaaataaaatccgtcgaacgaccgttcgccaacctataaaaactcccgaactcgcaaccctataaacacgaaatctatcaccgcgacccgaaaacccgcaacgaatccgccgaccaccgaatctaaaacaaaacgccgaataaaacgaaaaacgaaacccaaccccaccgaaaactcccgataccgcaactccgcacgaaacgtacaacgacaactcgaacgcgaaaaacgaacccacgacacaaccgcctcccgctacgcgctaactaaaaacgccgaacgat

SEQ ID NO: 36283 - DNA, 508 bp, Artificial Sequence
  chemically treated genomic DNA (Homo sapiens) CpG-island No: 36283
ggtttttaggtttggtcgtttatatacgcggtcgttcgattcggatcggcgcgcgtcgtacgattgtttcgcgtattcgtcgagattttcggtaagtttaggattttgaaagtcgtgtgtttcgaagtttaaggtttatggcgtttgagtttgttttgcgtgcgtttcgggcggcgtcgtcggttttttcgtatagggcgagcgtttttttgtcgcgtttcgtttgggtgaggttcgtcgggcgatcgttcgttagtttatagggattttcgggttcgtagttttatgggtacggggtttgttatcgcggttcgggggttcgtagcgggttcgtcggttatcgggtttgggataaagcgtcggatggggcgggagacgggatttagttttatcggaggttttcggtgtcgtagtttcgtacggggcgtgtagcggtagttcggacgcgaaggacgggtttacggtatagtcgtttttcgttgcgcgttggttgggagcgtcgggcggt

SEQ ID NO: 36284 - DNA, 508 bp, Artificial Sequence
  chemically treated genomic DNA (Homo sapiens) CpG-island No: 36284
accgcccgacgctcccaaccaacgcgcaacgaaaaacgactataccgtaaacccgtccttcgcgtccgaactaccgctacacgccccgtacgaaactacgacaccgaaaacctccgataaaactaaatcccgtctcccgccccatccgacgctttatcccaaacccgataaccgacgaacccgctacgaacccccgaaccgcgataacaaaccccgtacccataaaactacgaacccgaaaatccctataaactaacgaacgatcgcccgacgaacctcacccaaacgaaacgcgacaaaaaaacgctcgccctatacgaaaaaaccgacgacgccgcccgaaacgcacgcaaaacaaactcaaacgccataaaccttaaacttcgaaacacacgactttcaaaatcctaaacttaccgaaaatctcgacgaatacgcgaaacaatcgtacgacgcgcgccgatccgaatcgaacgaccgcgtatataaacgaccaaacctaaaaacc

SEQ ID NO: 36285 - DNA, 876 bp, Artificial Sequence
  chemically treated genomic DNA (Homo sapiens) CpG-island No: 36285
ttcgggttcggtttaggtttcgcgggcggggcgcgcgtcgagagaggttggtattttggcgatattttttgagtcgtttcgcggtcggttcgagtcgttattcggcgttcggtaggggggagtttggttgcgggcggggatcggggggcgggtcgcgtcgcgcggagaaaagcgttggtcggagggttcgcggtcgggtcgtcggggtgagcgtgtcgaggcggttgtggcgtaggtttttaggtgagtgtagtttttcgggcggggcgagagttcgcgttgcggttgaagattttaagttttcgattttagtttcgcggttttttcggagggcgggttggggacgtcgggcgtaggggcggggttgggtttcgtcgaggttttttaattttcgtcggacgtttagggttgggcgggagtggggaacgtcgatttaggggagaggttttgcgggagataaaggttacgtttaggggtcgtgtgggtttttgtgcggatacgtgtattttacgtttgtgggtttttgtggatttgcggtcggggacgcgtcgttgtcggtgtttttgtgtgttcgtggttttgcgcggttgttttgcgttcgtgtttacgtttgcgggtttgcgtttggttgtgggcgtcggtgggcgtatcgcgtgttttcgcgtacgtggtcggtgtttgtcgacgtgtttgggttgggtgttcgtagagggtgtgcgtatcgagagtttaacgtcgttttattttttcgttttttcgtcgttttttcgggtttacgatttggttttaaatttttttttcggtttttcgggtaatagttttagttttttttatcgttattcggtcgggggcgtagatagtttttttttttttttt

SEQ ID NO: 36286 - DNA, 876 bp, Artificial Sequence
  chemically treated genomic DNA (Homo sapiens) CpG-island No: 36286
aaaaaaaaaaaaaaaactatctacgcccccgaccgaataacgataaaaaaaactaaaactattacccgaaaaaccgaaaaaaaaatttaaaaccaaatcgtaaacccgaaaaaacgacgaaaaaacgaaaaaataaaacgacgttaaactctcgatacgcacaccctctacgaacacccaacccaaacacgtcgacaaacaccgaccacgtacgcgaaaacacgcgatacgcccaccgacgcccacaaccaaacgcaaacccgcaaacgtaaacacgaacgcaaaacaaccgcgcaaaaccacgaacacacaaaaacaccgacaacgacgcgtccccgaccgcaaatccacaaaaacccacaaacgtaaaatacacgtatccgcacaaaaacccacacgacccctaaacgtaacctttatctcccgcaaaacctctcccctaaatcgacgttccccactcccgcccaaccctaaacgtccgacgaaaattaaaaaacctcgacgaaacccaaccccgcccctacgcccgacgtccccaacccgccctccgaaaaaaccgcgaaactaaaatcgaaaacttaaaatcttcaaccgcaacgcgaactctcgccccgcccgaaaaactacactcacctaaaaacctacgccacaaccgcctcgacacgctcaccccgacgacccgaccgcgaaccctccgaccaacgcttttctccgcgcgacgcgacccgccccccgatccccgcccgcaaccaaactcccccctaccgaacgccgaataacgactcgaaccgaccgcgaaacgactcaaaaaatatcgccaaaataccaacctctctcgacgcgcgccccgcccgcgaaacctaaaccgaacccgaa

SEQ ID NO: 36287 - DNA, 876 bp, Artificial Sequence
  chemically treated genomic DNA (Homo sapiens) CpG-island No: 36287
agggggagggggagggttgtttgcgttttcggtcgggtagcggtggggaggattggggttgttgttcgaggaatcgggagaaaagtttggagttaagtcgtgggttcgaggggacggcgggggagcgggggggtggggcggcgttgggttttcggtgcgtatattttttgcggatatttagtttagatacgtcggtaggtatcgattacgtacgcggagatacgcgatgcgtttatcgacgtttatagttaagcgtaggttcgtaaacgtggatacgggcgtaaagtagtcgcgtaaagttacggatatataaaggtatcgatagcggcgcgttttcgatcgtaaatttataaagatttataaacgtgagatgtacgtgttcgtataaagatttatacggtttttgggcgtagtttttgtttttcgtaagattttttttttgggtcggcgttttttattttcgtttagttttaggcgttcgacgaaagttgaggggtttcggcgggatttagtttcgtttttgcgttcggcgtttttagttcgtttttcgaaggggtcgcgaggttaggatcggggatttgggatttttaatcgtagcgcggattttcgtttcgttcggggaattgtatttatttggaagtttgcgttatagtcgtttcggtacgtttatttcggcggttcggtcgcgggtttttcggttagcgttttttttcgcgcggcgcggttcgtttttcggttttcgttcgtagttaggtttttttttgtcgggcgtcgggtggcggttcgggtcggtcgcggggcggtttagggagtgtcgttaaagtgttagtttttttcggcgcgcgtttcgttcgcggagtttgagtcgagttcggg

SEQ ID NO: 36288 - DNA, 876 bp, Artificial Sequence
  chemically treated genomic DNA (Homo sapiens) CpG-island No: 36288
cccgaactcgactcaaactccgcgaacgaaacgcgcgccgaaaaaaactaacactttaacgacactccctaaaccgccccgcgaccgacccgaaccgccacccgacgcccgacaaaaaaaaacctaactacgaacgaaaaccgaaaaacgaaccgcgccgcgcgaaaaaaaacgctaaccgaaaaacccgcgaccgaaccgccgaaataaacgtaccgaaacgactataacgcaaacttccaaataaatacaattccccgaacgaaacgaaaatccgcgctacgattaaaaatcccaaatccccgatcctaacctcgcgaccccttcgaaaaacgaactaaaaacgccgaacgcaaaaacgaaactaaatcccgccgaaacccctcaactttcgtcgaacgcctaaaactaaacgaaaataaaaaacgccgacccaaaaaaaaaatcttacgaaaaacaaaaactacgcccaaaaaccgtataaatctttatacgaacacgtacatctcacgtttataaatctttataaatttacgatcgaaaacgcgccgctatcgatacctttatatatccgtaactttacgcgactactttacgcccgtatccacgtttacgaacctacgcttaactataaacgtcgataaacgcatcgcgtatctccgcgtacgtaatcgatacctaccgacgtatctaaactaaatatccgcaaaaaatatacgcaccgaaaacccaacgccgccccacccccccgctcccccgccgtcccctcgaacccacgacttaactccaaacttttctcccgattcctcgaacaacaaccccaatcctccccaccgctacccgaccgaaaacgcaaacaaccctccccctccccct

SEQ ID NO: 36289 - DNA, 521 bp, Artificial Sequence
  chemically treated genomic DNA (Homo sapiens) CpG-island No: 36289
gcggagattacgatagtgaggggttacgtagagattacgatagtggggtgttacgtagagattataatagtggggggttataaagagattacgatagtgaggggttacgcggagattacgatagtgaggggttacgtagagattacgatagtggggtgttacgtagagattataatagtggggggttataaagagattacgatagtgaggggttacgcggagattacgatagtggggttacgtagagattatgatagtggggttacgtagagattataatagtggggggttacgcggagattacgatagtgaggggttacgtagagattacgatagtggggtgttacgtagagattataatagtggggggttataaagagattacgatagtgaggggttacgcggagattacgatagtggggttacgtagagattatgatagtggggttacgtagagattataatagtggggggttacgcggagattacgatagtgaggggttacgtagagattataatag

SEQ ID NO: 36290 - DNA, 521 bp, Artificial Sequence
  chemically treated genomic DNA (Homo sapiens) CpG-island No: 36290
ctattataatctctacgtaacccctcactatcgtaatctccgcgtaaccccccactattataatctctacgtaaccccactatcataatctctacgtaaccccactatcgtaatctccgcgtaacccctcactatcgtaatctctttataaccccccactattataatctctacgtaacaccccactatcgtaatctctacgtaacccctcactatcgtaatctccgcgtaaccccccactattataatctctacgtaaccccactatcataatctctacgtaaccccactatcgtaatctccgcgtaacccctcactatcgtaatctctttataaccccccactattataatctctacgtaacaccccactatcgtaatctctacgtaacccctcactatcgtaatctccgcgtaacccctcactatcgtaatctctttataaccccccactattataatctctacgtaacaccccactatcgtaatctctacgtaacccctcactatcgtaatctccgc

SEQ ID NO: 36291 - DNA, 521 bp, Artificial Sequence
  chemically treated genomic DNA (Homo sapiens) CpG-island No: 36291
ttgttgtgatttttgcgtggttttttattgtcgtgattttcgcgtggttttttattgttgtgatttttgcgtggttttattgttatgatttttgcgtggttttattgtcgtgattttcgcgtggttttttattgtcgtgatttttttgtggttttttattgttgtgatttttgcgtggtattttattgtcgtgatttttgcgtggttttttattgtcgtgattttcgcgtggttttttattgttgtgatttttgcgtggttttattgttatgatttttgcgtggttttattgtcgtgattttcgcgtggttttttattgtcgtgatttttttgtggttttttattgttgtgatttttgcgtggtattttattgtcgtgatttttgcgtggttttttattgtcgtgattttcgcgtggttttttattgtcgtgatttttttgtggttttttattgttgtgatttttgcgtggtattttattgtcgtgatttttgcgtggttttttattgtcgtgattttcgt

SEQ ID NO: 36292 - DNA, 521 bp, Artificial Sequence
  chemically treated genomic DNA (Homo sapiens) CpG-island No: 36292
acgaaaatcacgacaataaaaaaccacgcaaaaatcacgacaataaaataccacgcaaaaatcacaacaataaaaaaccacaaaaaaatcacgacaataaaaaaccacgcgaaaatcacgacaataaaaaaccacgcaaaaatcacgacaataaaataccacgcaaaaatcacaacaataaaaaaccacaaaaaaatcacgacaataaaaaaccacgcgaaaatcacgacaataaaaccacgcaaaaatcataacaataaaaccacgcaaaaatcacaacaataaaaaaccacgcgaaaatcacgacaataaaaaaccacgcaaaaatcacgacaataaaataccacgcaaaaatcacaacaataaaaaaccacaaaaaaatcacgacaataaaaaaccacgcgaaaatcacgacaataaaaccacgcaaaaatcataacaataaaaccacgcaaaaatcacaacaataaaaaaccacgcgaaaatcacgacaataaaaaaccacgcaaaaatcacaacaa

SEQ ID NO: 36293 - DNA, 734 bp, Artificial Sequence
  chemically treated genomic DNA (Homo sapiens) CpG-island No: 36293
aaatagttgttttagacgtatagttggttgtcgcgagggttgtagttaacggaggagatgaattggtaggggttggggaaggtgaggttgataggtttttcgcggttggtattggtgttgaaggtatagtttacgcggttgttagtcgtttcgttgttattatttacgtatacggaacgtaggacgtataggattttatatattatgaaggcgttggatgtcgagcgtttgtcgtaattcgttttttacgtgtttttaaagcgtagtgtgtaggggtttagttggtttattattagtcgttcgttgttgtttttagtggcgtagatgatttatagttcgttttcgtttatcgttaggttaatgtcggttttttcgttttagcggtagggcgaggtgttatggtagttggcggtattgatgatcgttttttcgtttttgatgcgcgttcgtaggttatatttgacgatgttgcgcgtgcgttttttgttgtagaagacggtattatcgtagattataaagtttgtgttatttacgcggttgggtaggcggtaggtggtggtgtggcgggcggttacgtagtttttttacgaggtatatttagttagtgtgttcgtgcggtaggggatttagggtattacgtagatgcggttattcgtttgtagcgggtttttgtattatgcgttagattggtgttttgattcgtgtgtcgaggtgggttttagtattttttgtag

SEQ ID NO: 36294 - DNA, 734 bp, Artificial Sequence
  chemically treated genomic DNA (Homo sapiens) CpG-island No: 36294
ctacaaaaaatactaaaacccacctcgacacacgaatcaaaacaccaatctaacgcataatacaaaaacccgctacaaacgaataaccgcatctacgtaataccctaaatcccctaccgcacgaacacactaactaaatatacctcgtaaaaaaactacgtaaccgcccgccacaccaccacctaccgcctacccaaccgcgtaaataacacaaactttataatctacgataataccgtcttctacaacaaaaaacgcacgcgcaacatcgtcaaatataacctacgaacgcgcatcaaaaacgaaaaaacgatcatcaataccgccaactaccataacacctcgccctaccgctaaaacgaaaaaaccgacattaacctaacgataaacgaaaacgaactataaatcatctacgccactaaaaacaacaacgaacgactaataataaaccaactaaacccctacacactacgctttaaaaacacgtaaaaaacgaattacgacaaacgctcgacatccaacgccttcataatatataaaatcctatacgtcctacgttccgtatacgtaaataataacaacgaaacgactaacaaccgcgtaaactataccttcaacaccaataccaaccgcgaaaaacctatcaacctcaccttccccaacccctaccaattcatctcctccgttaactacaaccctcgcgacaaccaactatacgtctaaaacaactattt

SEQ ID NO: 36295 - DNA, 734 bp, Artificial Sequence
  chemically treated genomic DNA (Homo sapiens) CpG-island No: 36295
ttgtagaaggtgttggagtttatttcgatatacgagttagagtattagtttggcgtatggtgtaaggattcgttgtaggcgggtgatcgtatttacgtgatgttttggattttttatcgtacggatatattgattgagtatgtttcgtgggaggattacgtggtcgttcgttatattattatttatcgtttgtttaatcgcgtggatggtataggttttgtggtttacgatggtgtcgttttttataataaggagcgtacgcgtaatatcgttaagtatgatttacggacgcgtattaagagcggggagacggttattaatatcgttaattattatgatatttcgttttatcgttggggcggaaagatcgatattgatttggcggtggacgagaacgggttgtgggttatttacgttattgagggtaataacgggcggttggtggtgagttagttgaatttttatatattgcgttttgagggtacgtgggagacgggttacgataagcgttcggtatttaacgtttttatggtgtgtggggttttgtacgttttgcgtttcgtgtacgtggatgatgatagcgaggcggttggtaatcgcgtggattatgtttttaatattaatgttaatcgcgaggagtttgttagttttattttttttaatttttattagtttatttttttcgttgattataattttcgcgataattagttgtacgtttggaataattattt

SEQ ID NO: 36296 - DNA, 734 bp, Artificial Sequence
  chemically treated genomic DNA (Homo sapiens) CpG-island No: 36296
aaataattattccaaacgtacaactaattatcgcgaaaattataatcaacgaaaaaaataaactaataaaaattaaaaaaaataaaactaacaaactcctcgcgattaacattaatattaaaaacataatccacgcgattaccaaccgcctcgctatcatcatccacgtacacgaaacgcaaaacgtacaaaaccccacacaccataaaaacgttaaataccgaacgcttatcgtaacccgtctcccacgtaccctcaaaacgcaatatataaaaattcaactaactcaccaccaaccgcccgttattaccctcaataacgtaaataacccacaacccgttctcgtccaccgccaaatcaatatcgatctttccgccccaacgataaaacgaaatatcataataattaacgatattaataaccgtctccccgctcttaatacgcgtccgtaaatcatacttaacgatattacgcgtacgctccttattataaaaaacgacaccatcgtaaaccacaaaacctataccatccacgcgattaaacaaacgataaataataatataacgaacgaccacgtaatcctcccacgaaacatactcaatcaatatatccgtacgataaaaaatccaaaacatcacgtaaatacgatcacccgcctacaacgaatccttacaccatacgccaaactaatactctaactcgtatatcgaaataaactccaacaccttctacaa

SEQ ID NO: 36297 - DNA, 905 bp, Artificial Sequence
  chemically treated genomic DNA (Homo sapiens) CpG-island No: 36297
gtcggcggcggtcgggcgatttttgattcgcgcgtcggtcgcgtttttttttcgttggtaggtggatagcggttgcgtcgggtaggtcgcggcgttaatttcggttggtcgatagtcgttgtcgtattgagcgggggcgggggattgcggcgcgcgcggggtcggtcgggcgttcgtcggggtcgttttttgagtttcggagcgttgcgcggtcgttagttagttttcgtcgtttcgtttcgtcggttcgggttcgtagattgcgttttcgtttcgtttttttattttcggattgatattgagcgttttgttggggggtttggcggattcggtattttcgttaatcggcggtttcgtagggcggatttcgggtttagtttagcgtttcggttaatcggacgcgtttgttcgtttagttgcggtttcgcgagcgagtgaatggtcgagagttcgcggtgcgtgtttcgaggttgagagtttatagtggcgcgggaaggtcgcgggagggttaatgggaggcggcgttgagtcgttagttagggcggtttaggttaatgagcggcgggttgcgggggcgttatagatagcggtagagattttgggttgaggttttcgggcgggcgggcgcggagagacgcgggaagtaggggttgggcgggggtcgcggcgtcgtagttagcgtagttagttcgagggtcgtcgtcgtcgtcgtttagcgcgtttcggggtcgtcggtcgtagttagtattcgtcgcgtcgtagtttcgggatcggtttcggtcgtcgtcgtcgcgatgggtaacgtcgtcgtcgttaagaagggtagcgagtaggagagcggtgagtgttcgggttgtgatttcgattttggttttgcgttgttagttttggttttgtttattatt

SEQ ID NO: 36298 - DNA, 905 bp, Artificial Sequence
  chemically treated genomic DNA (Homo sapiens) CpG-island No: 36298
aataataaacaaaaccaaaactaacaacgcaaaaccaaaatcgaaatcacaacccgaacactcaccgctctcctactcgctacccttcttaacgacgacgacgttacccatcgcgacgacgacgaccgaaaccgatcccgaaactacgacgcgacgaatactaactacgaccgacgaccccgaaacgcgctaaacgacgacgacgacgaccctcgaactaactacgctaactacgacgccgcgacccccgcccaacccctacttcccgcgtctctccgcgcccgcccgcccgaaaacctcaacccaaaatctctaccgctatctataacgcccccgcaacccgccgctcattaacctaaaccgccctaactaacgactcaacgccgcctcccattaaccctcccgcgaccttcccgcgccactataaactctcaacctcgaaacacgcaccgcgaactctcgaccattcactcgctcgcgaaaccgcaactaaacgaacaaacgcgtccgattaaccgaaacgctaaactaaacccgaaatccgccctacgaaaccgccgattaacgaaaataccgaatccgccaaaccccccaacaaaacgctcaatatcaatccgaaaataaaaaaacgaaacgaaaacgcaatctacgaacccgaaccgacgaaacgaaacgacgaaaactaactaacgaccgcgcaacgctccgaaactcaaaaaacgaccccgacgaacgcccgaccgaccccgcgcgcgccgcaatcccccgcccccgctcaatacgacaacgactatcgaccaaccgaaattaacgccgcgacctacccgacgcaaccgctatccacctaccaacgaaaaaaaaacgcgaccgacgcgcgaatcaaaaatcgcccgaccgccgccgac

SEQ ID NO: 36299 - DNA, 905 bp, Artificial Sequence
  chemically treated genomic DNA (Homo sapiens) CpG-island No: 36299
gatgatggataaggttagggttggtagcgtagggttaagatcggggttatagttcgggtatttatcgtttttttgttcgttgttttttttggcggcggcggcgttgtttatcgcggcggcggcggtcggggtcggtttcggagttgcggcgcggcgggtgttggttgcggtcggcggtttcggagcgcgttgggcggcggcggcggcggttttcgggttggttgcgttagttgcggcgtcgcgattttcgtttagtttttgtttttcgcgttttttcgcgttcgttcgttcgggaattttagtttaagatttttgtcgttgtttgtgacgttttcgtagttcgtcgtttattggtttaggtcgttttgattgacggtttagcgtcgttttttattggttttttcgcgattttttcgcgttattataggtttttagtttcgggatacgtatcgcggattttcggttatttattcgttcgcgaggtcgtagttgggcgggtagacgcgttcgattggtcgagacgttggattgggttcggggttcgttttgcgaggtcgtcgattggcggaggtgtcgggttcgttaagttttttagtagaacgtttagtgttaattcgggggtgagagggcggggcggagacgtagtttgcgggttcgggtcggcggggcggggcggcggaggttggttggcggtcgcgtagcgtttcgaggtttaggaggcggtttcggcgggcgttcggtcggtttcgcgcgcgtcgtagtttttcgttttcgtttagtgcggtagcggttgtcggttagtcggagttggcgtcgcggtttgttcggcgtagtcgttgtttatttgttagcgggggaggggcgcggtcggcgcgcgggttagaggtcgttcggtcgtcgtcggt

SEQ ID NO: 36300 - DNA, 905 bp, Artificial Sequence
  chemically treated genomic DNA (Homo sapiens) CpG-island No: 36300
accgacgacgaccgaacgacctctaacccgcgcgccgaccgcgcccctcccccgctaacaaataaacaacgactacgccgaacaaaccgcgacgccaactccgactaaccgacaaccgctaccgcactaaacgaaaacgaaaaactacgacgcgcgcgaaaccgaccgaacgcccgccgaaaccgcctcctaaacctcgaaacgctacgcgaccgccaaccaacctccgccgccccgccccgccgacccgaacccgcaaactacgtctccgccccgccctctcacccccgaattaacactaaacgttctactaaaaaacttaacgaacccgacacctccgccaatcgacgacctcgcaaaacgaaccccgaacccaatccaacgtctcgaccaatcgaacgcgtctacccgcccaactacgacctcgcgaacgaataaataaccgaaaatccgcgatacgtatcccgaaactaaaaacctataataacgcgaaaaaatcgcgaaaaaaccaataaaaaacgacgctaaaccgtcaatcaaaacgacctaaaccaataaacgacgaactacgaaaacgtcacaaacaacgacaaaaatcttaaactaaaattcccgaacgaacgaacgcgaaaaaacgcgaaaaacaaaaactaaacgaaaatcgcgacgccgcaactaacgcaaccaacccgaaaaccgccgccgccgccgcccaacgcgctccgaaaccgccgaccgcaaccaacacccgccgcgccgcaactccgaaaccgaccccgaccgccgccgccgcgataaacaacgccgccgccgccaaaaaaaacaacgaacaaaaaaacgataaatacccgaactataaccccgatcttaaccctacgctaccaaccctaaccttatccatcatc

SEQ ID NO: 36301 - DNA, 694 bp, Artificial Sequence
  chemically treated genomic DNA (Homo sapiens) CpG-island No: 36301
tttcggaggagcggtttatggagacgtttatcgagcgcgaaattcgtcgtagttgcgaacgcgaggagagtttgcgtcggagtcggggtttgagttcgggtcgcgtaggtcgtgaattcgtcgagttgcgcgtgcggtcggtgtttaatttgtcgggttttggtttcgcgttttcgcgcgttttggagcgggcgcgggcgggcgcgtagatgtagcgggatatcgagcgggaggtttatcggtaggcggcgttggcgcgtttcgcggttttcgagtcgcgcgttcggtcgtcgtcgtagtcgttgggcgaatttaagcgttttttcgaggtcgcggcggggagcggtttttcggcgggggcgggggacggcgcgggttcgtagaggttgttagagtttgggggacggtcgcgttcggtcgtgtagggcgggtgtcgggtgttgggtagcgtttcgtcgttttttatttcgttattgttggagtaggaggtgcgcgtcgtgcgcgagcgcgagtaggaattgtagcgttagcggcgtagcgtttatggtatcgcggagtttaaggagtttacgtcgagttttatcggtaagtcgcgggcgtagtaacgtcgggatttttagggttttagtcgtttttatcgattgtttaattttagtggttttttttgtggtttttcgattttcggggttttttt

SEQ ID NO: 36302 - DNA, 694 bp, Artificial Sequence
  chemically treated genomic DNA (Homo sapiens) CpG-island No: 36302
aaaaaaaccccgaaaatcgaaaaaccacaaaaaaaaccactaaaattaaacaatcgataaaaacgactaaaaccctaaaaatcccgacgttactacgcccgcgacttaccgataaaactcgacgtaaactccttaaactccgcgataccataaacgctacgccgctaacgctacaattcctactcgcgctcgcgcacgacgcgcacctcctactccaacaataacgaaataaaaaacgacgaaacgctacccaacacccgacacccgccctacacgaccgaacgcgaccgtcccccaaactctaacaacctctacgaacccgcgccgtcccccgcccccgccgaaaaaccgctccccgccgcgacctcgaaaaaacgcttaaattcgcccaacgactacgacgacgaccgaacgcgcgactcgaaaaccgcgaaacgcgccaacgccgcctaccgataaacctcccgctcgatatcccgctacatctacgcgcccgcccgcgcccgctccaaaacgcgcgaaaacgcgaaaccaaaacccgacaaattaaacaccgaccgcacgcgcaactcgacgaattcacgacctacgcgacccgaactcaaaccccgactccgacgcaaactctcctcgcgttcgcaactacgacgaatttcgcgctcgataaacgtctccataaaccgctcctccgaaa

SEQ ID NO: 36303 - DNA, 694 bp, Artificial Sequence
  chemically treated genomic DNA (Homo sapiens) CpG-island No: 36303
ggagagatttcgagaatcggagggttataggaggggttattgaagttgggtaatcggtgggggcggttggaattttgggggtttcggcgttgttacgttcgcggtttatcggtgaggttcggcgtaggttttttgaatttcgcggtgttatagacgttgcgtcgttggcgttgtagtttttgttcgcgttcgcgtacggcgcgtattttttgttttagtagtgacggagtgaaaggcggcggggcgttgtttagtattcggtattcgttttgtacggtcgagcgcggtcgttttttaggttttggtagtttttgcgggttcgcgtcgtttttcgttttcgtcgaggagtcgtttttcgtcgcggtttcgaagaagcgtttgagttcgtttagcggttgcggcggcgatcgggcgcgcggttcggggatcgcggggcgcgttagcgtcgtttgtcggtgggtttttcgttcgatgtttcgttgtatttgcgcgttcgttcgcgttcgttttagggcgcgcgggagcgcggggttaggattcggtaggttgagtatcggtcgtacgcgtagttcgacgagtttacggtttgcgcggttcgggtttaggtttcggtttcggcgtaggtttttttcgcgttcgtagttgcggcggatttcgcgttcgatgggcgtttttatgaatcgttttttcgggg

SEQ ID NO: 36304 - DNA, 694 bp, Artificial Sequence
  chemically treated genomic DNA (Homo sapiens) CpG-island No: 36304
ccccgaaaaaacgattcataaaaacgcccatcgaacgcgaaatccgccgcaactacgaacgcgaaaaaaacctacgccgaaaccgaaacctaaacccgaaccgcgcaaaccgtaaactcgtcgaactacgcgtacgaccgatactcaacctaccgaatcctaaccccgcgctcccgcgcgccctaaaacgaacgcgaacgaacgcgcaaatacaacgaaacatcgaacgaaaaacccaccgacaaacgacgctaacgcgccccgcgatccccgaaccgcgcgcccgatcgccgccgcaaccgctaaacgaactcaaacgcttcttcgaaaccgcgacgaaaaacgactcctcgacgaaaacgaaaaacgacgcgaacccgcaaaaactaccaaaacctaaaaaacgaccgcgctcgaccgtacaaaacgaataccgaatactaaacaacgccccgccgcctttcactccgtcactactaaaacaaaaaatacgcgccgtacgcgaacgcgaacaaaaactacaacgccaacgacgcaacgtctataacaccgcgaaattcaaaaaacctacgccgaacctcaccgataaaccgcgaacgtaacaacgccgaaacccccaaaattccaaccgcccccaccgattacccaacttcaataacccctcctataaccctccgattctcgaaatctctcc

SEQ ID NO: 36305 - DNA, 563 bp, Artificial Sequence
  chemically treated genomic DNA (Homo sapiens) CpG-island No: 36305
  unsure (3..4, 31, 93, 98, 104, 110, 159, 184, 201, 235, 291)
ganncgttttttttcgcgtttattcgagcgntatttggtgttcgcgtgcgtgtcgttttttttttgttggtgatagtcgtgcgcgatatttanttttngcgatnggtttncggtttatataagttttgttttcgggtattttttattcgttatggtcgngcgtttggtttttggtgcgttgaantgcggattacgcgtttnatcgttgatggtgtttttagatcgtggttcggtntttatgcgcgtttttagttattgatacgttcgtttttttaagtttcgattttaagntatatcgaacgtttttgtatcgcgtaatattgcgttttttatttgtaaatttttattagttatttgtgtagagtatttgtttatgtacggcggtaagttttttgtaatgttatcgagtattttgtcgggttgtagtacgttgtattatgcgagttaagggtgaacgcgttcgaatacgttgagaatttttcgcgtgacgtcgatttatacgtaattagaagatttagtttatgaggttgcgttcgttcgttcgttatgtttattttttaggt

SEQ ID NO: 36306 - DNA, 563 bp, Artificial Sequence
  chemically treated genomic DNA (Homo sapiens) CpG-island No: 36306
  unsure (273, 329, 363, 380, 405, 454, 460, 466, 471, 533, 560..)
acctaaaaaataaacataacgaacgaacgaacgcaacctcataaactaaatcttctaattacgtataaatcgacgtcacgcgaaaaattctcaacgtattcgaacgcgttcacccttaactcgcataatacaacgtactacaacccgacaaaatactcgataacattacaaaaaacttaccgccgtacataaacaaatactctacacaaataactaataaaaatttacaaataaaaaacgcaatattacgcgatacaaaaacgttcgatatancttaaaatcgaaacttaaaaaaacgaacgtatcaataactaaaaacgcgcataaanaccgaaccacgatctaaaaacaccatcaacgatnaaacgcgtaatccgcanttcaacgcaccaaaaaccaaacgcncgaccataacgaataaaaaatacccgaaaacaaaacttatataaaccgnaaaccnatcgcnaaaantaaatatcgcgcacgactatcaccaacaaaaaaaaaacgacacgcacgcgaacaccaaatancgctcgaataaacgcgaaaaaaaacgnntc

SEQ ID NO: 36307 - DNA, 563 bp, Artificial Sequence
  chemically treated genomic DNA (Homo sapiens) CpG-island No: 36307
  unsure (273, 329, 363, 380, 405, 454, 460, 466, 471, 533, 560..)
atttaggaaatgagtatggcgaacggacgagcgtaattttataaattgggttttttaattgcgtatgggtcgacgttacgcgggaaatttttagcgtgttcgagcgcgtttatttttaattcgtatagtataacgtgttgtaattcgataagatattcgatgatattgtagaggatttgtcgtcgtatataggtaggtgttttgtataggtggttggtggagatttataagtgggaggcgtaatgttacgcgatataggaacgttcggtgtgntttgagatcgagatttgaggaggcgggcgtattaatggttaaaaacgcgtatgagngtcggattacgatttggaggtattattaacggtnggacgcgtggttcgtantttagcgtattaagggttaaacgtncggttataacgaatgagaggtgttcgagagtaggatttgtgtgggtcgnagattngtcgtnagaantggatatcgcgtacggttattattaatagggggaaaacgatacgtacgcggatattagatancgttcggatgggcgcggaaagaagcgnntt

SEQ ID NO: 36308 - DNA, 563 bp, Artificial Sequence
  chemically treated genomic DNA (Homo sapiens) CpG-island No: 36308
  unsure (3..4, 31, 93, 98, 104, 110, 159, 184, 201, 235, 291)
aanncgcttctttccgcgcccatccgaacgntatctaatatccgcgtacgtatcgttttccccctattaataataaccgtacgcgatatccanttctnacgacnaatctncgacccacacaaatcctactctcgaacacctctcattcgttataaccgnacgtttaacccttaatacgctaaantacgaaccacgcgtccnaccgttaataatacctccaaatcgtaatccgacnctcatacgcgtttttaaccattaatacgcccgcctcctcaaatctcgatctcaaancacaccgaacgttcctatatcgcgtaacattacgcctcccacttataaatctccaccaaccacctatacaaaacacctacctatatacgacgacaaatcctctacaatatcatcgaatatcttatcgaattacaacacgttatactatacgaattaaaaataaacgcgctcgaacacgctaaaaatttcccgcgtaacgtcgacccatacgcaattaaaaaacccaatttataaaattacgctcgtccgttcgccatactcatttcctaaat

SEQ ID NO: 36309 - DNA, 528 bp, Artificial Sequence
  chemically treated genomic DNA (Homo sapiens) CpG-island No: 36309
gtatttagttcgcgcgtcgtttttaaatagtcggttttcgttttttggttaattatcgttaacgttttttggcggcgcgcgtatttttttagttagttttggagcgtcgatcggcgcgcgtttagatttttcggattaattagcggagtttttttttcgtagcgtgtgaggagggcgaaattatttttaagttttttagcgtgttcgttggaaattaatttttagcgttttcgatttggatgttaacggcgggaatggacggagttatagcgtcggtttttttttggttaattttgagggttttcgtatcggcgtggttcgtttttcgtttcgttttttcgggagatgtatttcgtagcgcgtagcgtcgttattcgtcgagcggtggcgcgcggcgttcgttaaagaaggcgggaagggcggtgttcgtattcgaagtgattggtaggagggagtggggcggagataaagagggttttttgagagtttattggttggattggtaatggtggcgggagtagaaggagg

SEQ ID NO: 36310 - DNA, 528 bp, Artificial Sequence
  chemically treated genomic DNA (Homo sapiens) CpG-island No: 36310
cctccttctactcccgccaccattaccaatccaaccaataaactctcaaaaaaccctctttatctccgccccactccctcctaccaatcacttcgaatacgaacaccgcccttcccgccttctttaacgaacgccgcgcgccaccgctcgacgaataacgacgctacgcgctacgaaatacatctcccgaaaaaacgaaacgaaaaacgaaccacgccgatacgaaaaccctcaaaattaaccaaaaaaaaaccgacgctataactccgtccattcccgccgttaacatccaaatcgaaaacgctaaaaattaatttccaacgaacacgctaaaaaacttaaaaataatttcgccctcctcacacgctacgaaaaaaaaactccgctaattaatccgaaaaatctaaacgcgcgccgatcgacgctccaaaactaactaaaaaaatacgcgcgccgccaaaaaacgttaacgataattaaccaaaaaacgaaaaccgactatttaaaaacgacgcgcgaactaaatac

SEQ ID NO: 36311 - DNA, 528 bp, Artificial Sequence
  chemically treated genomic DNA (Homo sapiens) CpG-island No: 36311
tttttttttgttttcgttattattattaatttagttaataaatttttagaaaattttttttattttcgttttatttttttttgttaattatttcgggtgcgagtatcgtttttttcgttttttttagcgagcgtcgcgcgttatcgttcggcgggtggcggcgttgcgcgttgcgggatgtatttttcggaaaagcgaggcgaggggcgggttacgtcggtgcgggaatttttaggattggttagaaggaggtcggcgttgtgatttcgtttattttcgtcgttgatatttaagtcggagacgttggggattggtttttagcggatacgttaagaagtttggagatagtttcgttttttttatacgttgcggagagggagtttcgttgattggttcgaggagtttgggcgcgcgtcgatcggcgttttaggattggttgagggggtgcgcgcgtcgttagggagcgttggcggtgattggttagagggcggaggtcggttatttgaaggcggcgcgcggattaggtgt

SEQ ID NO: 36312 - DNA, 528 bp, Artificial Sequence
  chemically treated genomic DNA (Homo sapiens) CpG-island No: 36312
acacctaatccgcgcgccgccttcaaataaccgacctccgccctctaaccaatcaccgccaacgctccctaacgacgcgcgcaccccctcaaccaatcctaaaacgccgatcgacgcgcgcccaaactcctcgaaccaatcaacgaaactccctctccgcaacgtataaaaaaaacgaaactatctccaaacttcttaacgtatccgctaaaaaccaatccccaacgtctccgacttaaatatcaacgacgaaaataaacgaaatcacaacgccgacctccttctaaccaatcctaaaaattcccgcaccgacgtaacccgcccctcgcctcgcttttccgaaaaatacatcccgcaacgcgcaacgccgccacccgccgaacgataacgcgcgacgctcgctaaaaaaaacgaaaaaaacgatactcgcacccgaaataattaacaaaaaaaaataaaacgaaaataaaaaaaattttctaaaaatttattaactaaattaataataataacgaaaacaaaaaaaaa

SEQ ID NO: 36313 - DNA, 762 bp, Artificial Sequence
  chemically treated genomic DNA (Homo sapiens) CpG-island No: 36313
  unsure (165, 561)
aaagttttcggtttgtggcggggaagagtttttaaataaattttgcgcggtagataatatgttattcggtttacgtatttcgtatggagattttgggggcgttatagaggggtgtatattagggcggtgttgcggatataagatgttttacgaatcgcgtttttngacgcgggttaaaggtggtatggattttattagttatgtggcgcgggtgattatataaggggggtattattcgtacgttcgatttgagcggagagagaggatcgagtagatcgcgcggcgtattataagtattttgtgtcgatatatattgattgggcgttagataagcgcggttttaatttaattagatgtgtggcggatatcgttggttgtatcgattaattttaatattaggtcgagttagtcggttcggtattatcgcgtcggcgttgtgcggcgatattatatgacggtggttcgtagcgcgacggcgtacgttcggttgcgtcgatacgtaagtacgtcgtgtataattacgatcgtggggagatgttattaattttggattgaatcgtnttacgggggtggtgtatgtatttatgttcgttcgatagtttggtgtgttgtttgataagaatagtacgtagttttgggggaaagaatataagttcgtgcggcgcgatttatacgggaggcgaggcggcgaggaagagtgtaatttattatattatttagggcgacgcggacgaggtttaataatgtagatacgttaggttg

SEQ ID NO: 36314 - DNA, 762 bp, Artificial Sequence
  chemically treated genomic DNA (Homo sapiens) CpG-island No: 36314
  unsure (202, 598)
caacctaacgtatctacattattaaacctcgtccgcgtcgccctaaataatataataaattacactcttcctcgccgcctcgcctcccgtataaatcgcgccgcacgaacttatattctttcccccaaaactacgtactattcttatcaaacaacacaccaaactatcgaacgaacataaatacatacaccacccccgtaanacgattcaatccaaaattaataacatctccccacgatcgtaattatacacgacgtacttacgtatcgacgcaaccgaacgtacgccgtcgcgctacgaaccaccgtcatataatatcgccgcacaacgccgacgcgataataccgaaccgactaactcgacctaatattaaaattaatcgatacaaccaacgatatccgccacacatctaattaaattaaaaccgcgcttatctaacgcccaatcaatatatatcgacacaaaatacttataatacgccgcgcgatctactcgatcctctctctccgctcaaatcgaacgtacgaataataccccccttatataatcacccgcgccacataactaataaaatccataccacctttaacccgcgtcnaaaaacgcgattcgtaaaacatcttatatccgcaacaccgccctaatatacacccctctataacgcccccaaaatctccatacgaaatacgtaaaccgaataacatattatctaccgcgcaaaatttatttaaaaactcttccccgccacaaaccgaaaacttt

SEQ ID NO: 36315 - DNA, 762 bp, Artificial Sequence
  chemically treated genomic DNA (Homo sapiens) CpG-island No: 36315
  unsure (202, 598)
tagtttggcgtatttatattattagatttcgttcgcgtcgttttgaatgatatagtagattatattttttttcgtcgtttcgtttttcgtgtgggtcgcgtcgtacgaatttatgtttttttttttaagattgcgtgttgtttttgttaagtagtatattagattgtcgagcgagtatgagtgtatgtattattttcgtggngcggtttaatttaaggttagtaatatttttttacggtcgtggttgtgtacgacgtatttgcgtgtcggcgtaatcgagcgtgcgtcgtcgcgttacgagttatcgttatgtggtgtcgtcgtatagcgtcggcgcggtgatgtcgggtcggttggttcgatttagtattgaggttagtcggtgtaattagcggtgttcgttatatatttggttaggttggagtcgcgtttgtttgacgtttagttagtgtgtgtcgatataaaatatttgtggtgcgtcgcgcgatttgttcggtttttttttttcgtttaggtcgaacgtgcgagtaatattttttttgtgtgattattcgcgttatatggttggtggggtttatattatttttgattcgcgttnaaaagcgcggttcgtagaatattttgtgttcgtaatatcgttttggtatgtatttttttgtggcgtttttagaatttttatacggggtgcgtaaatcggataatatattgtttgtcgcgtaagatttgtttgagaattttttttcgttataaatcgggggtttt

SEQ ID NO: 36316 - DNA, 762 bp, Artificial Sequence
  chemically treated genomic DNA (Homo sapiens) CpG-island No: 36316
  unsure (165, 561)
aaaacccccgatttataacgaaaaaaaattctcaaacaaatcttacgcgacaaacaatatattatccgatttacgcaccccgtataaaaattctaaaaacgccacaaaaaaatacataccaaaacgatattacgaacacaaaatattctacgaaccgcgcttttnaacgcgaatcaaaaataatataaaccccaccaaccatataacgcgaataatcacacaaaaaaaatattactcgcacgttcgacctaaacgaaaaaaaaaaaccgaacaaatcgcgcgacgcaccacaaatattttatatcgacacacactaactaaacgtcaaacaaacgcgactccaacctaaccaaatatataacgaacaccgctaattacaccgactaacctcaatactaaatcgaaccaaccgacccgacatcaccgcgccgacgctatacgacgacaccacataacgataactcgtaacgcgacgacgcacgctcgattacgccgacacgcaaatacgtcgtacacaaccacgaccgtaaaaaaatattactaaccttaaattaaaccgcnccacgaaaataatacatacactcatactcgctcgacaatctaatatactacttaacaaaaacaacacgcaatcttaaaaaaaaaaacataaattcgtacgacgcgacccacacgaaaaacgaaacgacgaaaaaaaatataatctactatatcattcaaaacgacgcgaacgaaatctaataatataaatacgccaaacta

SEQ ID NO: 36317 - DNA, 1140 bp, Artificial Sequence
  chemically treated genomic DNA (Homo sapiens) CpG-island No: 36317
gttagcgttggatgcggcgtgcggtcggtaaagattagatcgtttatatagaattggcgatcgttcggcgtatcgttaaaattatcgtcgtaagtcgattacgggttgtcgtttttattatatttaattagcgattgatttatttagttttagacgaagtcgttttgtaaacggggatattgacgaaacgtttgttagtatttagcgaaatcgttaagattgttatttatcgcgtgggcgtattcgtaaaggattagcgggcgcgtttttttaggtagcgaaagttattttttgatggattatttcggtatagtcgggaagggttggtttttatttacgcgcgcgtatatcgggtaaataatatcggtggtcgtggtgtcggtttcgtcgtttttatattgtatcgggcgggaaggatcgatagatttgatttagcgatatagcgcgtcgtgattagcgtcgtggtttgatttattttttagcgattagatgattatattcgggtgattacgatcgcgttgtattattcgcgttacgcgttcgtttatcgtcggtagttagcgcggattatcggttagacgatttattggtattatgtcgtgggttttaatattggttttatttattatatatagggtcgtagcggtcgtatagcgtgtattatagcggatggttcggataatgcgaatagcgtacggcgttaaagttgttttgttttattagtaggatattttgtattatcgtttgtttatttatgatttgattatgtagaggatgatgttcgtgacggttaacgtttcgaattagtaacggtttgtcgtttagtagtagtagattatttttaattcgtatttcgcggaaatcgatatcgtaggtttttgttttaattagcgtgtcgtcggcggtgtgtagtttaattatcgtacgatagagattcgggatttcggcgttttatagtttcgggttttcgacgtttagacgtagtgtgacgcgatcggtataattattacgtttatcgataattttatcgtcgaaaggcgcggtgtcgttggcgatttgcgttttattttgttataaagaaattgttattcgtaggtagttacgtaattcgtcgtatatttgaattttagtttttagtat

SEQ ID NO: 36318 - DNA, 1140 bp, Artificial Sequence
  chemically treated genomic DNA (Homo sapiens) CpG-island No: 36318
atactaaaaactaaaattcaaatatacgacgaattacgtaactacctacgaataacaatttctttataacaaaataaaacgcaaatcgccaacgacaccgcgcctttcgacgataaaattatcgataaacgtaataattataccgatcgcgtcacactacgtctaaacgtcgaaaacccgaaactataaaacgccgaaatcccgaatctctatcgtacgataattaaactacacaccgccgacgacacgctaattaaaacaaaaacctacgatatcgatttccgcgaaatacgaattaaaaataatctactactactaaacgacaaaccgttactaattcgaaacgttaaccgtcacgaacatcatcctctacataatcaaatcataaataaacaaacgataatacaaaatatcctactaataaaacaaaacaactttaacgccgtacgctattcgcattatccgaaccatccgctataatacacgctatacgaccgctacgaccctatatataataaataaaaccaatattaaaacccacgacataataccaataaatcgtctaaccgataatccgcgctaactaccgacgataaacgaacgcgtaacgcgaataatacaacgcgatcgtaatcacccgaatataatcatctaatcgctaaaaaataaatcaaaccacgacgctaatcacgacgcgctatatcgctaaatcaaatctatcgatccttcccgcccgatacaatataaaaacgacgaaaccgacaccacgaccaccgatattatttacccgatatacgcgcgcgtaaataaaaaccaacccttcccgactataccgaaataatccatcaaaaaataactttcgctacctaaaaaaacgcgcccgctaatcctttacgaatacgcccacgcgataaataacaatcttaacgatttcgctaaatactaacaaacgtttcgtcaatatccccgtttacaaaacgacttcgtctaaaactaaataaatcaatcgctaattaaatataataaaaacgacaacccgtaatcgacttacgacgataattttaacgatacgccgaacgatcgccaattctatataaacgatctaatctttaccgaccgcacgccgcatccaacgctaac

SEQ ID NO: 36319 - DNA, 1140 bp, Artificial Sequence
  chemically treated genomic DNA (Homo sapiens) CpG-island No: 36319
gtattggaggttgaagtttagatgtgcggcgagttgcgtgattatttacgggtaatagtttttttatggtagggtgaaacgtaggtcgttagcggtatcgcgtttttcggcggtgaaattatcgatgagcgtggtggttatgtcgatcgcgttatattacgtttgaacgtcgaaaattcgaaattgtggagcgtcgaaatttcgaatttttatcgtgcggtggttgaattgtatatcgtcgacggtacgttgattgaagtagaagtttgcgatgtcggttttcgcgaggtgcggattgaaaatggtttgttgttgttgaacggtaagtcgttgttgattcgaggcgttaatcgttacgagtattattttttgtatggttaggttatggatgagtagacgatggtgtaggatattttgttgatgaagtagaataattttaacgtcgtgcgttgttcgtattattcgaattattcgttgtggtatacgttgtgcgatcgttacggttttgtatgtggtggatgaagttaatattgaaatttacggtatggtgttaatgaatcgtttgatcgatgattcgcgttggttatcggcgatgagcgaacgcgtaacgcgaatggtgtagcgcgatcgtaattattcgagtgtgattatttggtcgttggggaatgaattaggttacggcgttaattacgacgcgttgtatcgttggattaaatttgtcgatttttttcgttcggtgtagtatgaaggcggcggagtcgatattacggttatcgatattatttgttcgatgtacgcgcgcgtggatgaagattagtttttttcggttgtgtcgaaatggtttattaaaaaatggttttcgttatttggagagacgcgttcgttgattttttgcgaatacgtttacgcgatgggtaatagttttggcggtttcgttaaatattggtaggcgtttcgttagtattttcgtttatagggcggtttcgtttgggattgggtggattagtcgttgattaaatatgatgaaaacggtaattcgtggtcggtttacggcggtgattttggcgatacgtcgaacgatcgttagttttgtatgaacggtttggtttttgtcgatcgtacgtcgtatttagcgttgat

SEQ ID NO: 36320 - DNA, 1140 bp, Artificial Sequence
  chemically treated genomic DNA (Homo sapiens) CpG-island No: 36320
atcaacgctaaatacgacgtacgatcgacaaaaaccaaaccgttcatacaaaactaacgatcgttcgacgtatcgccaaaatcaccgccgtaaaccgaccacgaattaccgttttcatcatatttaatcaacgactaatccacccaatcccaaacgaaaccgccctataaacgaaaatactaacgaaacgcctaccaatatttaacgaaaccgccaaaactattacccatcgcgtaaacgtattcgcaaaaaatcaacgaacgcgtctctccaaataacgaaaaccattttttaataaaccatttcgacacaaccgaaaaaaactaatcttcatccacgcgcgcgtacatcgaacaaataatatcgataaccgtaatatcgactccgccgccttcatactacaccgaacgaaaaaaatcgacaaatttaatccaacgatacaacgcgtcgtaattaacgccgtaacctaattcattccccaacgaccaaataatcacactcgaataattacgatcgcgctacaccattcgcgttacgcgttcgctcatcgccgataaccaacgcgaatcatcgatcaaacgattcattaacaccataccgtaaatttcaatattaacttcatccaccacatacaaaaccgtaacgatcgcacaacgtataccacaacgaataattcgaataatacgaacaacgcacgacgttaaaattattctacttcatcaacaaaatatcctacaccatcgtctactcatccataacctaaccatacaaaaaataatactcgtaacgattaacgcctcgaatcaacaacgacttaccgttcaacaacaacaaaccattttcaatccgcacctcgcgaaaaccgacatcgcaaacttctacttcaatcaacgtaccgtcgacgatatacaattcaaccaccgcacgataaaaattcgaaatttcgacgctccacaatttcgaattttcgacgttcaaacgtaatataacgcgatcgacataaccaccacgctcatcgataatttcaccgccgaaaaacgcgataccgctaacgacctacgtttcaccctaccataaaaaaactattacccgtaaataatcacgcaactcgccgcacatctaaacttcaacctccaatac

SEQ ID NO: 36321 - DNA, 533 bp, Artificial Sequence
  chemically treated genomic DNA (Homo sapiens) CpG-island No: 36321
ttgcgtttttcggggggggaggcggaggaggcgggtagcggcggagggaggggagtcggggaggggggcgtcgcgttgggagggaggtagcgcgtacggtgtagtcgggtcgggcgggaggtatggcggggttttcggttttattttcgtcggagacggcggcggtcgttattacggcggtcgtcgtttcgtcgttcgtcgttttttcgtattattaagagtggattttggatattatcgattcgttgcgttcgcgtaaggcgcggtcggatttggagcgtatttgtcggatggtgcggcggcggtacggttcggagtcggagcgtacgcgcgtcgagttcgagaaattgatttagtagcgcgtcgtgtttcgggttagttataaggggagtatttcgtatcgtaacgcggcgcgcgtttagtcgtttcggcgcggagttatttcgttcgagtttatcgatttagttgttgaatttacgtggtgagcgtttgtatatatattgtgaatatattaaagtgttatataatggtaa

SEQ ID NO: 36322 - DNA, 533 bp, Artificial Sequence
  chemically treated genomic DNA (Homo sapiens) CpG-island No: 36322
ttaccattatataacactttaatatattcacaatatatatacaaacgctcaccacgtaaattcaacaactaaatcgataaactcgaacgaaataactccgcgccgaaacgactaaacgcgcgccgcgttacgatacgaaatactccccttataactaacccgaaacacgacgcgctactaaatcaatttctcgaactcgacgcgcgtacgctccgactccgaaccgtaccgccgccgcaccatccgacaaatacgctccaaatccgaccgcgccttacgcgaacgcaacgaatcgataatatccaaaatccactcttaataatacgaaaaaacgacgaacgacgaaacgacgaccgccgtaataacgaccgccgccgtctccgacgaaaataaaaccgaaaaccccgccatacctcccgcccgacccgactacaccgtacgcgctacctccctcccaacgcgacgcccccctccccgactcccctccctccgccgctacccgcctcctccgcctccccccccgaaaaacgcaa

SEQ ID NO: 36323 - DNA, 533 bp, Artificial Sequence
  chemically treated genomic DNA (Homo sapiens) CpG-island No: 36323
ttattattatgtggtattttagtatgtttataatatgtatgtaagcgtttattacgtgggtttagtaattgagtcggtggattcggacggggtggtttcgcgtcggggcggttggacgcgcgtcgcgttgcggtacgagatgttttttttgtagttgattcggagtacggcgcgttgttggattagtttttcgagttcggcgcgcgtgcgtttcggtttcgggtcgtgtcgtcgtcgtattattcggtagatgcgttttaggttcggtcgcgttttgcgcgagcgtagcgagtcgatggtgtttaggatttatttttggtagtgcggggaagcggcggacgacgaggcggcggtcgtcgtggtggcggtcgtcgtcgttttcggcgggggtagggtcgggggtttcgttatgtttttcgttcggttcggttgtatcgtgcgcgttgttttttttttagcgcggcgttttttttttcggttttttttttttcgtcgttgttcgtttttttcgttttttttttcggggggcgtag

SEQ ID NO: 36324 - DNA, 533 bp, Artificial Sequence
  chemically treated genomic DNA (Homo sapiens) CpG-island No: 36324
ctacgccccccgaaaaaaaaaacgaaaaaaacgaacaacgacgaaaaaaaaaaaaccgaaaaaaaaaacgccgcgctaaaaaaaaaacaacgcgcacgatacaaccgaaccgaacgaaaaacataacgaaacccccgaccctacccccgccgaaaacgacgacgaccgccaccacgacgaccgccgcctcgtcgtccgccgcttccccgcactaccaaaaataaatcctaaacaccatcgactcgctacgctcgcgcaaaacgcgaccgaacctaaaacgcatctaccgaataatacgacgacgacacgacccgaaaccgaaacgcacgcgcgccgaactcgaaaaactaatccaacaacgcgccgtactccgaatcaactacaaaaaaaacatctcgtaccgcaacgcgacgcgcgtccaaccgccccgacgcgaaaccaccccgtccgaatccaccgactcaattactaaacccacgtaataaacgcttacatacatattataaacatactaaaataccacataataataa

SEQ ID NO: 36325 - DNA, 829 bp, Artificial Sequence
  chemically treated genomic DNA (Homo sapiens) CpG-island No: 36325
ttaatcgttagtattagataaaacgaatttatcggcgatattaggtcgattagcgggttaaagatatttaaattaggtgttagacgtttgatttcgaaagcgattattagtacgtcggtaatgtcgttcgttagcgtattggcggtaattatcggtaacggagttgttagagcgtaaggaatagtcggttcggttgcgattgtggtatcgattataatggtattattggtagttttttttttttgtcgggtaaatagtttgggcgtaatgaacgtcgtaagattcgtcgcgacgggcggtattagcgcgataacgtcgacgatggcgtattagttataaatgtgtttttttagtagtgagaagtagaagaattaggcggttttattgatggggtcgtttatatcgaacgttagtatcgtatcgattagaaacgttgtcgtaaattttattgatgaggaatggtatttaggaagtggagtagttcgtttatgaggtcggatattatcggttcgataacgtagtaagtgagtacgtcgaaaattagtagagtaacgaacgggattagtattgaatcgagtagcggttgtaatgttttgttaaggcgtattttgcggaattagaagacgaaatagttaatcgttagttttagtattatcgcgtcgaggaatttcgtattcgattgggtgtcgagtagcgttttgtcgttcgttagatagtaaattagaaacgtcggagcgaaagtcggtttatcggtaatcgacgaggtaatataagcgtttatgatggggattataaaggtgaagttaaggtaatcgatggatttaattat

SEQ ID NO: 36326 - DNA, 829 bp, Artificial Sequence
  chemically treated genomic DNA (Homo sapiens) CpG-island No: 36326
ataattaaatccatcgattaccttaacttcacctttataatccccatcataaacgcttatattacctcgtcgattaccgataaaccgactttcgctccgacgtttctaatttactatctaacgaacgacaaaacgctactcgacacccaatcgaatacgaaattcctcgacgcgataatactaaaactaacgattaactatttcgtcttctaattccgcaaaatacgccttaacaaaacattacaaccgctactcgattcaatactaatcccgttcgttactctactaattttcgacgtactcacttactacgttatcgaaccgataatatccgacctcataaacgaactactccacttcctaaataccattcctcatcaataaaatttacgacaacgtttctaatcgatacgatactaacgttcgatataaacgaccccatcaataaaaccgcctaattcttctacttctcactactaaaaaaacacatttataactaatacgccatcgtcgacgttatcgcgctaataccgcccgtcgcgacgaatcttacgacgttcattacgcccaaactatttacccgacaaaaaaaaaaaactaccaataataccattataatcgataccacaatcgcaaccgaaccgactattccttacgctctaacaactccgttaccgataattaccgccaatacgctaacgaacgacattaccgacgtactaataatcgctttcgaaatcaaacgtctaacacctaatttaaatatctttaacccgctaatcgacctaatatcgccgataaattcgttttatctaatactaacgattaa

SEQ ID NO: 36327 - DNA, 829 bp, Artificial Sequence
  chemically treated genomic DNA (Homo sapiens) CpG-island No: 36327
gtagttgaatttatcggttattttggttttatttttatgatttttattatgggcgtttatattgtttcgtcgattgtcgataaatcggttttcgtttcggcgtttttggtttgttatttggcgaacgataaagcgttgttcggtatttagtcgggtgcgggatttttcggcgcggtggtgttggggttggcgattggttatttcgttttttggtttcgtaaagtgcgttttggtaaagtattataatcgttgttcggtttaatgttgatttcgttcgttattttgttggttttcggcgtgtttatttattacgttatcgggtcggtgatgttcgattttatgggcgggttgttttattttttgaatattattttttattaatgaagtttgcggtagcgtttttggtcggtgcgatgttggcgttcgatatgggcggttttattaataaaatcgtttggtttttttgttttttattgttggaaaaatatatttatgattggtacgttatcgtcggcgttgtcgcgttgatgtcgttcgtcgcggcgggttttgcgacgtttattgcgtttaaattgtttattcgataggaaaaagaggttgttagtagtgttattgtggtcggtgttatagtcgtaatcgaatcggttattttttacgttttggtagtttcgttgtcgatgattatcgttaatacgttggcgggcggtattatcggcgtgttggtgatcgttttcggaattaaacgtttggtatttggtttgggtatttttgattcgttgatcggtttgatgtcgtcggtgggttcgttttatttggtgttggcgattgg

SEQ ID NO: 36328 - DNA, 829 bp, Artificial Sequence
  chemically treated genomic DNA (Homo sapiens) CpG-island No: 36328
ccaatcgccaacaccaaataaaacgaacccaccgacgacatcaaaccgatcaacgaatcaaaaatacccaaaccaaataccaaacgtttaattccgaaaacgatcaccaacacgccgataataccgcccgccaacgtattaacgataatcatcgacaacgaaactaccaaaacgtaaaaaataaccgattcgattacgactataacaccgaccacaataacactactaacaacctctttttcctatcgaataaacaatttaaacgcaataaacgtcgcaaaacccgccgcgacgaacgacatcaacgcgacaacgccgacgataacgtaccaatcataaatatatttttccaacaataaaaaacaaaaaaaccaaacgattttattaataaaaccgcccatatcgaacgccaacatcgcaccgaccaaaaacgctaccgcaaacttcattaataaaaaataatattcaaaaaataaaacaacccgcccataaaatcgaacatcaccgacccgataacgtaataaataaacacgccgaaaaccaacaaaataacgaacgaaatcaacattaaaccgaacaacgattataatactttaccaaaacgcactttacgaaaccaaaaaacgaaataaccaatcgccaaccccaacaccaccgcgccgaaaaatcccgcacccgactaaataccgaacaacgctttatcgttcgccaaataacaaaccaaaaacgccgaaacgaaaaccgatttatcgacaatcgacgaaacaatataaacgcccataataaaaatcataaaaataaaaccaaaataaccgataaattcaactac

SEQ ID NO: 36329 - DNA, 1006 bp, Artificial Sequence
  chemically treated genomic DNA (Homo sapiens) CpG-island No: 36329
  unsure (569)
atacgatcgaagacgagttattgtggtttggtgcgcggtcggcgtggcgaaattggatgaaggttaacggttggcgcgatattttggttaggcgttagtcggaagaattcgcggtttaagtttcgtatttgttatttcggcgtatatatataagttcgataggggttcgtggtggttgtttcggattggtagtgagcgggtgtcggaatgcggatgagttatagtttgcgtcgttgtcgtcgtatcgggtattcgatcgcggtttggtgagatcgttttagggcgtatatagacgttttatcggacgaatgtcgtcggtgaaatttagcggcgaaatatttaggtagtgacggatggtgtttggcgttattttcggttggtattgattacgtaggcgtagcgggtagaagaagttcggtagtaggttattttcggcgggacggaatcgttcgttttttttgatattttgtcgggttatatcgaatatgtcgggataacggtattcgtttgtttgtcgtgtggttgacgtacgattcggaatattcggagaatttatttgtcgcgtcgtntgtgcgttatggttggacgtttcgcggcgaattggcggtggtgtatgatcgtagtggtaaataggtgcgtagttttatttacgatgataatatcggggtcggatggtggcgtatcgttatacgggtcggtcggaaattcgttatcgttacgatagcgacgggcgggtgatagaatagttaaattcggtaggtttaagttatacgtattagtatgagaaagatcgtattattattatcgatagtttggatcgtcgtgaagtgttgtatacgtagggcgaagtcgggttgaagcgggtggtgaaaaaggaatacgcggacggtagcgttacgtagagttagtttgacgtcgtgggtaggtttcgggtatagacggatgtcgtagtaggataatagagtttaggtcggatgttgtgatcggtttatttagcgttttatat

SEQ ID NO: 36330 - DNA, 1006 bp, Artificial Sequence
  chemically treated genomic DNA (Homo sapiens) CpG-island No: 36330
  unsure (438)
atataaaacgctaaataaaccgatcacaacatccgacctaaactctattatcctactacgacatccgtctatacccgaaacctacccacgacgtcaaactaactctacgtaacgctaccgtccgcgtattcctttttcaccacccgcttcaacccgacttcgccctacgtatacaacacttcacgacgatccaaactatcgataataataatacgatctttctcatactaatacgtataacttaaacctaccgaatttaactattctatcacccgcccgtcgctatcgtaacgataacgaatttccgaccgacccgtataacgatacgccaccatccgaccccgatattatcatcgtaaataaaactacgcacctatttaccactacgatcatacaccaccgccaattcgccgcgaaacgtccaaccataacgcacanacgacgcgacaaataaattctccgaatattccgaatcgtacgtcaaccacacgacaaacaaacgaataccgttatcccgacatattcgatataacccgacaaaatatcaaaaaaaacgaacgattccgtcccgccgaaaataacctactaccgaacttcttctacccgctacgcctacgtaatcaataccaaccgaaaataacgccaaacaccatccgtcactacctaaatatttcgccgctaaatttcaccgacgacattcgtccgataaaacgtctatatacgccctaaaacgatctcaccaaaccgcgatcgaatacccgatacgacgacaacgacgcaaactataactcatccgcattccgacacccgctcactaccaatccgaaacaaccaccacgaacccctatcgaacttatatatatacgccgaaataacaaatacgaaacttaaaccgcgaattcttccgactaacgcctaaccaaaatatcgcgccaaccgttaaccttcatccaatttcgccacgccgaccgcgcaccaaaccacaataactcgtcttcgatcgtat

SEQ ID NO: 36331 - DNA, 1006 bp, Artificial Sequence
  chemically treated genomic DNA (Homo sapiens) CpG-island No: 36331
  unsure (438)
gtgtaaggcgttgaatgagtcggttataatattcggtttgaattttgttgttttgttgcggtattcgtttgtgttcggagtttgtttacggcgttaaattgattttgcgtgacgttgtcgttcgcgtgttttttttttattattcgttttagttcggtttcgttttgcgtgtgtagtattttacggcggtttaggttgtcggtgatggtgatgcggttttttttatattgatacgtgtagtttaagtttgtcgggtttagttgttttgttattcgttcgtcgttgtcgtaacggtaacggattttcggtcggttcgtgtgacggtgcgttattattcggtttcggtattattatcgtaagtaaagttgcgtatttgtttgttattacggttatatattatcgttagttcgtcgcggggcgtttagttatagcgtatangcggcgcggtaggtaaatttttcgggtatttcgggtcgtgcgttagttatacggtagatagacggatgtcgttgtttcggtatattcggtgtaattcggtagggtattaggaaaagcggacggtttcgtttcgtcggaaatggtttgttgtcgggttttttttgttcgttgcgtttgcgtggttagtattagtcggaagtgacgttaggtattattcgttattgtttgggtatttcgtcgttaaattttatcggcggtattcgttcggtggaacgtttgtgtgcgttttgaagcggttttattagatcgcggtcgagtattcggtacggcggtagcggcgtaggttgtaatttattcgtatttcggtattcgtttattattaattcgagatagttattacgggtttttgtcggatttgtatatgtacgtcgagataatagatgcggagtttaagtcgcgagttttttcggttagcgtttggttagagtgtcgcgttagtcgttgatttttatttagtttcgttacgtcggtcgcgtattagattatagtgattcgttttcggtcgtgt

SEQ ID NO: 36332 - DNA, 1006 bp, Artificial Sequence
  chemically treated genomic DNA (Homo sapiens) CpG-island No: 36332
  unsure (569)
acacgaccgaaaacgaatcactataatctaatacgcgaccgacgtaacgaaactaaataaaaatcaacgactaacgcgacactctaaccaaacgctaaccgaaaaaactcgcgacttaaactccgcatctattatctcgacgtacatatacaaatccgacaaaaacccgtaataactatctcgaattaataataaacgaataccgaaatacgaataaattacaacctacgccgctaccgccgtaccgaatactcgaccgcgatctaataaaaccgcttcaaaacgcacacaaacgttccaccgaacgaataccgccgataaaatttaacgacgaaatacccaaacaataacgaataatacctaacgtcacttccgactaatactaaccacgcaaacgcaacgaacaaaaaaaacccgacaacaaaccatttccgacgaaacgaaaccgtccgcttttcctaataccctaccgaattacaccgaatataccgaaacaacgacatccgtctatctaccgtataactaacgcacgacccgaaatacccgaaaaatttacctaccgcgccgcntatacgctataactaaacgccccgcgacgaactaacgataatatataaccgtaataacaaacaaatacgcaactttacttacgataataataccgaaaccgaataataacgcaccgtcacacgaaccgaccgaaaatccgttaccgttacgacaacgacgaacgaataacaaaacaactaaacccgacaaacttaaactacacgtatcaatataaaaaaaaccgcatcaccatcaccgacaacctaaaccgccgtaaaatactacacacgcaaaacgaaaccgaactaaaacgaataataaaaaaaaaacacgcgaacgacaacgtcacgcaaaatcaatttaacgccgtaaacaaactccgaacacaaacgaataccgcaacaaaacaacaaaattcaaaccgaatattataaccgactcattcaacgccttacac

SEQ ID NO: 36333 - DNA, 668 bp, Artificial Sequence
  chemically treated genomic DNA (Homo sapiens) CpG-island No: 36333
ttggtaggttacgatgtttttgttggtttatttttatatcgacgttttcggtttgtcggcggggattatgggtacgttgtttttggtttttcgcgtgttcgacgtcgttatcgattcgttgatggggttgttggtagatcgtattcgtacgcggtacggttagtttcgttcgtttttgttgtggggggttatttcgttcggtatcgtttgcgtgttgattttttatacgtcggattttttcgtatagggtaagattatttacgtttgcgtgatttatatttttttgattttggtttatattttcgttaacgtgtcgtattgcgttatgtcgggcgttattatcgtcgattcgaaagagcgttacgttttgtagttttggcgtttttttttggcggcggcgggttcgttcgttattagcggtatcgcgttgtcgttggtgagtattatcggtaaaggggacgagtaggtgggttatttcggcgttatgtgcgtgttggggttgagcggcgtggtgttgttttacgtttgtttttttacgattaaagagcgttatatttttgaggtgtagtcgggttcgtcggtggcgaaagattttaagttgttgttgggtaatagtttagtggcgtattatgtgcgcgttaagatgatggcgattgttttacgtggtg

SEQ ID NO: 36334 - DNA, 668 bp, Artificial Sequence
  chemically treated genomic DNA (Homo sapiens) CpG-island No: 36334
caccacgtaaaacaatcgccatcatcttaacgcgcacataatacgccactaaactattacccaacaacaacttaaaatctttcgccaccgacgaacccgactacacctcaaaaatataacgctctttaatcgtaaaaaaacaaacgtaaaacaacaccacgccgctcaaccccaacacgcacataacgccgaaataacccacctactcgtcccctttaccgataatactcaccaacgacaacgcgataccgctaataacgaacgaacccgccgccgccaaaaaaaaacgccaaaactacaaaacgtaacgctctttcgaatcgacgataataacgcccgacataacgcaatacgacacgttaacgaaaatataaaccaaaatcaaaaaaatataaatcacgcaaacgtaaataatcttaccctatacgaaaaaatccgacgtataaaaaatcaacacgcaaacgataccgaacgaaataaccccccacaacaaaaacgaacgaaactaaccgtaccgcgtacgaatacgatctaccaacaaccccatcaacgaatcgataacgacgtcgaacacgcgaaaaaccaaaaacaacgtacccataatccccgccgacaaaccgaaaacgtcgatataaaaataaaccaacaaaaacatcgtaacctaccaa

SEQ ID NO: 36335 - DNA, 668 bp, Artificial Sequence
  chemically treated genomic DNA (Homo sapiens) CpG-island No: 36335
tattacgtggagtagtcgttattattttgacgcgtatatgatgcgttattgggttgttgtttagtagtagtttaaggtttttcgttatcgacgagttcggttgtattttaaaggtgtagcgttttttggtcgtgaagaagtagacgtagagtagtattacgtcgtttagttttagtacgtatatggcgtcgaagtagtttatttgttcgttttttttgtcgatgatgtttattagcggtagcgcgatgtcgttgatagcgagcgagttcgtcgtcgttaggaagaagcgttaggattgtagggcgtgacgttttttcgggtcggcggtgatgacgttcggtatggcgtagtacggtacgttaacgaaggtgtagattagggttaggagaatgtaggttacgtaggcgtagatgattttgttttgtgcggagaagttcggcgtgtagaaggttagtacgtagacgatgtcgaacgggatggttttttatagtaggaacgggcggaattggtcgtgtcgcgtgcgggtgcggtttattagtagttttattagcgggtcggtgacggcgtcgagtacgcgggagattaaaaatagcgtgtttataattttcgtcgataggtcgaagacgtcggtgtagaaataggttagtaggaatatcgtggtttgttag

SEQ ID NO: 36336 - DNA, 668 bp, Artificial Sequence
  chemically treated genomic DNA (Homo sapiens) CpG-island No: 36336
ctaacaaaccacgatattcctactaacctatttctacaccgacgtcttcgacctatcgacgaaaattataaacacgctatttttaatctcccgcgtactcgacgccgtcaccgacccgctaataaaactactaataaaccgcacccgcacgcgacacgaccaattccgcccgttcctactataaaaaaccatcccgttcgacatcgtctacgtactaaccttctacacgccgaacttctccgcacaaaacaaaatcatctacgcctacgtaacctacattctcctaaccctaatctacaccttcgttaacgtaccgtactacgccataccgaacgtcatcaccgccgacccgaaaaaacgtcacgccctacaatcctaacgcttcttcctaacgacgacgaactcgctcgctatcaacgacatcgcgctaccgctaataaacatcatcgacaaaaaaaacgaacaaataaactacttcgacgccatatacgtactaaaactaaacgacgtaatactactctacgtctacttcttcacgaccaaaaaacgctacacctttaaaatacaaccgaactcgtcgataacgaaaaaccttaaactactactaaacaacaacccaataacgcatcatatacgcgtcaaaataataacgactactccacgtaata

SEQ ID NO: 36337 - DNA, 646 bp, Artificial Sequence
  chemically treated genomic DNA (Homo sapiens) CpG-island No: 36337
tcggtattgatgtcgacgatgtcgtattttagcgtttcgtttacgcggaagacgcggtttaaattacgggcgtagaaataggcggtaaggttaaattcggtgttattggtttgcgtaattatattagttttatttttaaagcggaatagcggggcgagggggtcgaacgttttttttttcgatattttggcgttggtcggaacgtttattagaatggtcggttggaagaagttgtcgtcgcgttcgtgcgttttatcgtcgtaaattacgcgcgcgtttttttttagcgtatcggtaatatgtttttttatttttgttatcgtttttttatcgattagcggttcgatggtgacgtcgttatttagttcgtcgtcgatgtgtagtttgtttattgtttgttgtaatttttcggtaaaacggttatatacgtcgttttgtatatataggcggttggcgtagacgtaggtttgttcggcgttgcggaatttcgaggttagcgcgttttttacggttttgtcgaggtcggtatcgttaagacgataacggcgcgtttcgtttagtttcgcgatatttttttgatgtttttcgcgtttgtttattaattggcgggtaattcggtcgtattcggtattataggttgcgtatt

SEQ ID NO: 36338 - DNA, 646 bp, Artificial Sequence
  chemically treated genomic DNA (Homo sapiens) CpG-island No: 36338
aatacgcaacctataataccgaatacgaccgaattacccgccaattaataaacaaacgcgaaaaacatcaaaaaaatatcgcgaaactaaacgaaacgcgccgttatcgtcttaacgataccgacctcgacaaaaccgtaaaaaacgcgctaacctcgaaattccgcaacgccgaacaaacctacgtctacgccaaccgcctatatatacaaaacgacgtatataaccgttttaccgaaaaattacaacaaacaataaacaaactacacatcgacgacgaactaaataacgacgtcaccatcgaaccgctaatcgataaaaaaacgataacaaaaataaaaaaacatattaccgatacgctaaaaaaaaacgcgcgcgtaatttacgacgataaaacgcacgaacgcgacgacaacttcttccaaccgaccattctaataaacgttccgaccaacgccaaaatatcgaaaaaaaaaacgttcgaccccctcgccccgctattccgctttaaaaataaaactaatataattacgcaaaccaataacaccgaatttaaccttaccgcctatttctacgcccgtaatttaaaccgcgtcttccgcgtaaacgaaacgctaaaatacgacatcgtcgacatcaataccga

SEQ ID NO: 36339 - DNA, 646 bp, Artificial Sequence
  chemically treated genomic DNA (Homo sapiens) CpG-island No: 36339
ggtgcgtaatttgtggtatcgggtgcgatcgaattgttcgttagttaatggataggcgcgaaagatattaagaaagtgtcgcggagttgggcggaacgcgtcgttatcgttttgacgatgtcgatttcgataaagtcgtggaaggcgcgttggtttcgaaatttcgtaacgtcgggtaaatttgcgtttgcgttaatcgtttgtatgtgtaggacggcgtgtatgatcgttttgtcgaaaaattgtagtaggtaatgagtaaattgtatatcggcgacgggttggataacggcgttattatcgggtcgttgatcgatgaaaaagcggtagtaaaagtggaagagtatattgtcgatgcgttggagaaaggcgcgcgcgtggtttgcggcggtaaagcgtacgaacgcggcggtaattttttttagtcgattattttggtggacgtttcggttaacgttaaagtgtcgaaagaagagacgttcggttttttcgtttcgttgtttcgttttaaagatgaagttgatgtgattgcgtaagttaatgatatcgagtttggttttgtcgtttatttttacgttcgtgatttaagtcgcgtttttcgcgtgggcgaagcgttggagtacggtatcgtcggtattaatatcgg

SEQ ID NO: 36340 - DNA, 646 bp, Artificial Sequence
  chemically treated genomic DNA (Homo sapiens) CpG-island No: 36340
ccgatattaataccgacgataccgtactccaacgcttcgcccacgcgaaaaacgcgacttaaatcacgaacgtaaaaataaacgacaaaaccaaactcgatatcattaacttacgcaatcacatcaacttcatctttaaaacgaaacaacgaaacgaaaaaaccgaacgtctcttctttcgacactttaacgttaaccgaaacgtccaccaaaataatcgactaaaaaaaattaccgccgcgttcgtacgctttaccgccgcaaaccacgcgcgcgcctttctccaacgcatcgacaatatactcttccacttttactaccgctttttcatcgatcaacgacccgataataacgccgttatccaacccgtcgccgatatacaatttactcattacctactacaatttttcgacaaaacgatcatacacgccgtcctacacatacaaacgattaacgcaaacgcaaatttacccgacgttacgaaatttcgaaaccaacgcgccttccacgactttatcgaaatcgacatcgtcaaaacgataacgacgcgttccgcccaactccgcgacactttcttaatatctttcgcgcctatccattaactaacgaacaattcgatcgcacccgataccacaaattacgcacc

SEQ ID NO: 36341 - DNA, 942 bp, Artificial Sequence
  chemically treated genomic DNA (Homo sapiens) CpG-island No: 36341
ggatggttagggtatcgttgtttatcgttttttcggaaagggtaagtatggcgtcgttatttagcgtggtggtgttcgttagtgtgtcgttttggcggtgaatagttcgtatttatcgtggtattcgtggtcgtattatcggcgtttagcgtgaatgaattggttttttttagtattagggtattcgtttgaacgttttcgatattgaatgttttttcgtcgtttcgggtattattgatagcggtatcggaatcggttagtagtatatcgttattttttatggatacggtggtggcggtgttatcgttgcggatatttagcggtttcgttattatttacgcgggtattagtggttgtgtgttcggttagtatatttaggcgtcgttattttttagtacgatattattagttttaatttttataatagagaatgtttttaggcggtttatgtcggtaacggttgtagtcgtattggtaattagtgcgtcgttttgttttagggtgatattcgtggttgtattatcggcgtttatttgtagtttgtttttttgattaacggtggtattttcggttatattttcgtaatttgataatttgttagtcgttattgtattataatagtgttagacgttgtatcgtcgttgtgtatatattggtattttttatttagcgtggtatttagtgcgtgattatgtatagtttggtcgtcgtcggtataaattatagtggtatttgtcgtttttttagtttttataatttggcgatcgtttttattgatggttgtgcgtacggattttcgcgaataaattggtcggtattattcgtattttagtatttaggttttttttatcgtttcggtattaaataacggtatttagttgtattgtatcgggtttgacgaattgatagattttattattaatgacgggtttttgtggttat

SEQ ID NO: 36342 - DNA, 942 bp, Artificial Sequence
  chemically treated genomic DNA (Homo sapiens) CpG-island No: 36342
ataaccacaaaaacccgtcattaataataaaatctatcaattcgtcaaacccgatacaatacaactaaataccgttatttaataccgaaacgataaaaaaaacctaaatactaaaatacgaataataccgaccaatttattcgcgaaaatccgtacgcacaaccatcaataaaaacgatcgccaaattataaaaactaaaaaaacgacaaataccactataatttataccgacgacgaccaaactatacataatcacgcactaaataccacgctaaataaaaaataccaatatatacacaacgacgatacaacgtctaacactattataatacaataacgactaacaaattatcaaattacgaaaatataaccgaaaataccaccgttaatcaaaaaaacaaactacaaataaacgccgataatacaaccacgaatatcaccctaaaacaaaacgacgcactaattaccaatacgactacaaccgttaccgacataaaccgcctaaaaacattctctattataaaaattaaaactaataatatcgtactaaaaaataacgacgcctaaatatactaaccgaacacacaaccactaatacccgcgtaaataataacgaaaccgctaaatatccgcaacgataacaccgccaccaccgtatccataaaaaataacgatatactactaaccgattccgataccgctatcaataatacccgaaacgacgaaaaaacattcaatatcgaaaacgttcaaacgaataccctaatactaaaaaaaaccaattcattcacgctaaacgccgataatacgaccacgaataccacgataaatacgaactattcaccgccaaaacgacacactaacgaacaccaccacgctaaataacgacgccatacttaccctttccgaaaaaacgataaacaacgataccctaaccatcc

SEQ ID NO: 36343 - DNA, 942 bp, Artificial Sequence
  chemically treated genomic DNA (Homo sapiens) CpG-island No: 36343
atagttataggaattcgttattaatgataaggtttgttagttcgttaagttcggtatagtgtaattggatatcgttgtttaatatcggggcggtaagggggatttggatgttagaatacgggtgatatcggttagtttgttcgcggggattcgtacgtataattattaataaaaacggtcgttagattgtgagagttgaaggaacggtaaatattattgtggtttatgtcggcggcgattagattgtatatggttacgtattggatattacgttgaatgggggatattagtatgtgtataacggcggtatagcgtttgatattgttgtgatatagtgacggttggtagattgttaaattacgggggtgtggtcgggaatattatcgttaattagaagggtagattgtaggtggacgtcggtggtatagttacgaatgttattttgaagtagggcggcgtattggttattagtacggttgtaatcgttatcggtataaatcgtttgggagtattttttgttgtggaggttaaagttgataatgtcgtattggaaaatggcgacgtttggatgtgttgatcggatatatagttattaatattcgcgtggatgatggcggaatcgttggatgttcgtaacggtggtatcgttattatcgtatttatgggaaatggcggtgtattgttggtcgatttcggtgtcgttgttagtggtattcggagcgacggaaaggtatttagtatcggaggcgtttaggcgaatgttttgatgttggaaaaagttagtttatttacgttgaacgtcggtgatacggttacggatattacggtaaatgcggattgtttatcgttagggcggtatattggcgggtattattacgttgaataacggcgttatatttatttttttcgggaagacggtgaataacgatattttgattattt

SEQ ID NO: 36344 - DNA, 942 bp, Artificial Sequence
  chemically treated genomic DNA (Homo sapiens) CpG-island No: 36344
aaataatcaaaatatcgttattcaccgtcttcccgaaaaaaataaatataacgccgttattcaacgtaataatacccgccaatataccgccctaacgataaacaatccgcatttaccgtaatatccgtaaccgtatcaccgacgttcaacgtaaataaactaactttttccaacatcaaaacattcgcctaaacgcctccgatactaaatacctttccgtcgctccgaataccactaacaacgacaccgaaatcgaccaacaatacaccgccatttcccataaatacgataataacgataccaccgttacgaacatccaacgattccgccatcatccacgcgaatattaataactatatatccgatcaacacatccaaacgtcgccattttccaatacgacattatcaactttaacctccacaacaaaaaatactcccaaacgatttataccgataacgattacaaccgtactaataaccaatacgccgccctacttcaaaataacattcgtaactataccaccgacgtccacctacaatctacccttctaattaacgataatattcccgaccacacccccgtaatttaacaatctaccaaccgtcactatatcacaacaatatcaaacgctataccgccgttatacacatactaatatcccccattcaacgtaatatccaatacgtaaccatatacaatctaatcgccgccgacataaaccacaataatatttaccgttccttcaactctcacaatctaacgaccgtttttattaataattatacgtacgaatccccgcgaacaaactaaccgatatcacccgtattctaacatccaaatcccccttaccgccccgatattaaacaacgatatccaattacactataccgaacttaacgaactaacaaaccttatcattaataacgaattcctataactat

SEQ ID NO: 36345 - DNA, 547 bp, Artificial Sequence
  chemically treated genomic DNA (Homo sapiens) CpG-island No: 36345
  unsure (255, 346)
tcgttatcgttttattgattggcgtggtgagtgcgtcgtcgttaattagttagcgacgtaaatcgtcgtcggtaaagacgttttgtatttgttgttgagcgttatatatcgttattagttttagatcggtgcggttgagttttagtatcgtatttattacgttggcggttaacgttatttgtgggatggtatcgttacggcgtattagatgatgtattttatttagtaagcgagcgtttagtgtttcggttgggntggagcgggtaaaattttttttattaaattcgcgcgtttgtatgatcgttatcgttagcgcgttatttattattagggtattgacggtgtntgaggtcggcgtaaggtgtatcgggtaggtttcgcgttttacggagattttagtatcgtttttgtcgttaggtttagcggtgacgtcggtttgtcggttatcgttagtagcgcgatagatttattttttagacgcggaataattagatttagttttttcgcgttatcggatgtaagagataaataggtattatatcgcgga

SEQ ID NO: 36346 - DNA, 547 bp, Artificial Sequence
  chemically treated genomic DNA (Homo sapiens) CpG-island No: 36346
  unsure (202, 293)
tccgcgatataatacctatttatctcttacatccgataacgcgaaaaaactaaatctaattattccgcgtctaaaaaataaatctatcgcgctactaacgataaccgacaaaccgacgtcaccgctaaacctaacgacaaaaacgatactaaaatctccgtaaaacgcgaaacctacccgatacaccttacgccgacctcanacaccgtcaataccctaataataaataacgcgctaacgataacgatcatacaaacgcgcgaatttaataaaaaaaattttacccgctccancccaaccgaaacactaaacgctcgcttactaaataaaatacatcatctaatacgccgtaacgataccatcccacaaataacgttaaccgccaacgtaataaatacgatactaaaactcaaccgcaccgatctaaaactaataacgatatataacgctcaacaacaaatacaaaacgtctttaccgacgacgatttacgtcgctaactaattaacgacgacgcactcaccacgccaatcaataaaacgataacga

SEQ ID NO: 36347 - DNA, 547 bp, Artificial Sequence
  chemically treated genomic DNA (Homo sapiens) CpG-island No: 36347
  unsure (202, 293)
ttcgcgatgtgatgtttgtttattttttatattcggtggcgcgaaggaattggatttgattatttcgcgtttggaagataaatttatcgcgttgttggcgatgatcggtaaatcgacgttatcgttgggtttggcggtaaaagcggtgttggaattttcgtagaacgcgaagtttgttcgatgtattttgcgtcgattttangtatcgttaatattttgatgatgggtgacgcgttggcgatggcggttatgtaggcgcgcggatttaatgaagaagattttgttcgttttantttagtcggggtattgggcgttcgtttgttgaataaagtgtattatttgatgcgtcgtgacgatgttattttataggtggcgttaatcgttagcgtgatggatgcgatgttggaatttagtcgtatcggtttggggttggtggcggtatgtgacgtttaataataggtataaggcgtttttatcgacggcgatttacgtcgttggttggttggcggcggcgtatttattacgttagttaatgaagcgatgacgg

SEQ ID NO: 36348 - DNA, 547 bp, Artificial Sequence
  chemically treated genomic DNA (Homo sapiens) CpG-island No: 36348
  unsure (255, 346)
ccgtcatcgcttcattaactaacgtaataaatacgccgccgccaaccaaccaacgacgtaaatcgccgtcgataaaaacgccttatacctattattaaacgtcacataccgccaccaaccccaaaccgatacgactaaattccaacatcgcatccatcacgctaacgattaacgccacctataaaataacatcgtcacgacgcatcaaataatacactttattcaacaaacgaacgcccaataccccgactaaantaaaacgaacaaaatcttcttcattaaatccgcgcgcctacataaccgccatcgccaacgcgtcacccatcatcaaaatattaacgatacntaaaatcgacgcaaaatacatcgaacaaacttcgcgttctacgaaaattccaacaccgcttttaccgccaaacccaacgataacgtcgatttaccgatcatcgccaacaacgcgataaatttatcttccaaacgcgaaataatcaaatccaattccttcgcgccaccgaatataaaaaataaacaaacatcacatcgcgaa

SEQ ID NO: 36349 - DNA, 510 bp, Artificial Sequence
  chemically treated genomic DNA (Homo sapiens) CpG-island No: 36349
tattcgtattgtgttgattgtcgtaggtgagaagggcgcgttgatgtacgtaatggggatcgtcgcggcgatagtaatcgattttggtggttcgattaataaagtcgtaggttttgttgtttttagttttattattgattacgtattatcggttatcgttcgttttatcgttatcgttatttcgtcgattggtttggggttggcgattattatcgatcgtcgtttaatcggtaaacgtttgtttaacgtttaattttattcgtagggtaagatcgttatgtttttggcgtttatggggattagtgagggtgcgatttcgtttgcgttggaaagttttattatcgttatttcgtcgtatatggtcggcgttattgtcggtttaatcgtcgttgtttggttgggcgtagtgtaatggttttcggagttcgttatttgggtatggtcgttggttattaatttgggcgtttatatgcggggatcgcgttgggggtagttataattgcgttgatg

SEQ ID NO: 36350 - DNA, 510 bp, Artificial Sequence
  chemically treated genomic DNA (Homo sapiens) CpG-island No: 36350
catcaacgcaattataactacccccaacgcgatccccgcatataaacgcccaaattaataaccaacgaccatacccaaataacgaactccgaaaaccattacactacgcccaaccaaacaacgacgattaaaccgacaataacgccgaccatatacgacgaaataacgataataaaactttccaacgcaaacgaaatcgcaccctcactaatccccataaacgccaaaaacataacgatcttaccctacgaataaaattaaacgttaaacaaacgtttaccgattaaacgacgatcgataataatcgccaaccccaaaccaatcgacgaaataacgataacgataaaacgaacgataaccgataatacgtaatcaataataaaactaaaaacaacaaaacctacgactttattaatcgaaccaccaaaatcgattactatcgccgcgacgatccccattacgtacatcaacgcgcccttctcacctacgacaatcaacacaatacgaata

SEQ ID NO: 36351 - DNA, 510 bp, Artificial Sequence
  chemically treated genomic DNA (Homo sapiens) CpG-island No: 36351
tattagcgtagttatgattgtttttagcgcgattttcgtatatagacgtttaggttagtgattagcggttatgtttagatagcggatttcgggaattattgtattgcgtttagttagatagcggcggttgagtcgataatagcgtcgattatatacgacggaatggcggtgatggggttttttagcgtaaacggaatcgtatttttattgatttttataaacgttaggaatatggcggttttattttgcggataaagttgagcgttgaataggcgtttgtcggttaaacgacggtcgataatggtcgttagttttagattaatcggcggaataacgatagcgatagaacgagcggtgatcggtaatacgtggttagtggtaaagttgaaggtaataaaatttgcggttttgttgatcgggttattaaggtcgattgttgtcgtcgcggcgatttttattgcgtatattagcgcgttttttttatttgcggtagttagtatagtacggata

SEQ ID NO: 36352 - DNA, 510 bp, Artificial Sequence
  chemically treated genomic DNA (Homo sapiens) CpG-island No: 36352
tatccgtactatactaactaccgcaaataaaaaaaacgcgctaatatacgcaataaaaatcgccgcgacgacaacaatcgaccttaataacccgatcaacaaaaccgcaaattttattaccttcaactttaccactaaccacgtattaccgatcaccgctcgttctatcgctatcgttattccgccgattaatctaaaactaacgaccattatcgaccgtcgtttaaccgacaaacgcctattcaacgctcaactttatccgcaaaataaaaccgccatattcctaacgtttataaaaatcaataaaaatacgattccgtttacgctaaaaaaccccatcaccgccattccgtcgtatataatcgacgctattatcgactcaaccgccgctatctaactaaacgcaatacaataattcccgaaatccgctatctaaacataaccgctaatcactaacctaaacgtctatatacgaaaatcgcgctaaaaacaatcataactacgctaata

SEQ ID NO: 36353 - DNA, 512 bp, Artificial Sequence
  chemically treated genomic DNA (Homo sapiens) CpG-island No: 36353
ttggaagagagtatcgtcgatgaatttttagttttgttaaaatagtaggcgtaaaattggtagtcgggttatttatttgatttcgtaattattatgggtattttaatcgattgcgtttacgtcgattcggtttatagttttattcgggaaggcgaaagtaaagggtaattgttgttggatggtcgtaacgtcgggttggttgtcgttatcggttcgattatttttgtggatgtggattcgaatgcgtttttaagtcgcgaagagattttcggttcggtgttggtggttacgcgttttatattagaagaataggcgttatagtttgttaacgatagttagtacggttttggcgcggcggtatggacgcgcgatttttttcgcgcgtatcgtatgagtcgacgtttgaaagtcggtttcgttttcgttaataattataacgacggcgatatgattcgatgtacgtatattgtgttgcgttaataaagatacgacgttggtatacgtgtcgacga

SEQ ID NO: 36354 - DNA, 512 bp, Artificial Sequence
  chemically treated genomic DNA (Homo sapiens) CpG-island No: 36354
tcgtcgacacgtataccaacgtcgtatctttattaacgcaacacaatatacgtacatcgaatcatatcgccgtcgttataattattaacgaaaacgaaaccgactttcaaacgtcgactcatacgatacgcgcgaaaaaaatcgcgcgtccataccgccgcgccaaaaccgtactaactatcgttaacaaactataacgcctattcttctaatataaaacgcgtaaccaccaacaccgaaccgaaaatctcttcgcgacttaaaaacgcattcgaatccacatccacaaaaataatcgaaccgataacgacaaccaacccgacgttacgaccatccaacaacaattaccctttactttcgccttcccgaataaaactataaaccgaatcgacgtaaacgcaatcgattaaaatacccataataattacgaaatcaaataaataacccgactaccaattttacgcctactattttaacaaaactaaaaattcatcgacgatactctcttccaa

SEQ ID NO: 36355 - DNA, 512 bp, Artificial Sequence
  chemically treated genomic DNA (Homo sapiens) CpG-island No: 36355
tcgtcgatacgtgtgttagcgtcgtgtttttattagcgtagtataatatacgtgtatcgggttatatcgtcgtcgttgtagttattgacgaagacggaatcggtttttaggcgtcggtttatgcggtgcgcgcgggagaggtcgcgcgtttatatcgtcgcgttaaggtcgtattggttgtcgttggtaagttgtagcgtttgtttttttgatgtgaaacgcgtgattattagtatcggatcgaaaattttttcgcgatttaaggacgtattcgggtttatatttataaagatggtcgggtcgatggcggtagttagttcggcgttacggttatttaataatagttgttttttgttttcgttttttcgaataaagttatggatcgagtcggcgtgggcgtagtcgattaaggtgtttatggtggttgcgggattaagtggatggttcggttgttagttttgcgtttgttgttttaatagggttaagaatttatcggcgatgtttttttttag

SEQ ID NO: 36356 - DNA, 512 bp, Artificial Sequence
  chemically treated genomic DNA (Homo sapiens) CpG-island No: 36356
ctaaaaaaaaacatcgccgataaattcttaaccctattaaaacaacaaacgcaaaactaacaaccgaaccatccacttaatcccgcaaccaccataaacaccttaatcgactacgcccacgccgactcgatccataactttattcgaaaaaacgaaaacaaaaaacaactattattaaataaccgtaacgccgaactaactaccgccatcgacccgaccatctttataaatataaacccgaatacgtccttaaatcgcgaaaaaattttcgatccgatactaataatcacgcgtttcacatcaaaaaaacaaacgctacaacttaccaacgacaaccaatacgaccttaacgcgacgatataaacgcgcgacctctcccgcgcgcaccgcataaaccgacgcctaaaaaccgattccgtcttcgtcaataactacaacgacgacgatataacccgatacacgtatattatactacgctaataaaaacacgacgctaacacacgtatcgacga

SEQ ID NO: 36357 - DNA, 967 bp, Artificial Sequence
  chemically treated genomic DNA (Homo sapiens) CpG-island No: 36357
tcgaggtcgggtttgggttcgggtagttaggtttgacgcgggttcgcgttttttttcggtagagaagttcgggacgggtatgtgcgtggtttgcgggagttagatttacgattagtttattttgcgggtgtcgttcgatttcgagtggtacgcggtttgttttaagtgtgtcgagtgtagttagtatttgtacgagacgtgtacgtgtttcgtgagagacgggaagatttattgtaagcgggattatgttaggtgaggtcggcgggaacgcgggttgggttatcgcgcgtaggggtcggggtcgggattggggatgtcggtttgttcgcgcgtttcggttttgtttaggtagacgttttatttgtatgacgtacgggtgtcgtagcgttttttcgggttcgggaatgttcgtaggcgggttatcgtagttttttggtggttataaagtgttttgggcgcgcgtcggagtcgtagtagttagggagatgaggtcggtcgtaggtttagcgttgatatcgtcgtattttgggttcgtaggttgttcggtattaagtgcgttaagtgttaggtgggttttagtagtagcgatttggtgatgagggcgcgggatagcgtgtattatatcgagtgttttcgttgtttcgtgtgtagtcgttagttgttgtttggggacgagttttcgttgcgggagtacgagttgttttgtcgcgtcgattacggttttttgttcgagcgcgtcgcggtcggtagttcgcgtagtttcggttcgtttttcggcgttcgcggtttgtatttgttcggtaagcgcgtcggggtttgtgtcggggtgagcggggtgtatgtgcgtgcgtgtgtgtaggggtacgtttgtgtttttaacgagaagttgttagttgtgtgtggtttcgtttgtcgggatagtgtttttttgtattagtgcggaattgtgtgttgggaataaggttgt

SEQ ID NO: 36358 - DNA, 967 bp, Artificial Sequence
  chemically treated genomic DNA (Homo sapiens) CpG-island No: 36358
acaaccttattcccaacacacaattccgcactaatacaaaaaaacactatcccgacaaacgaaaccacacacaactaacaacttctcgttaaaaacacaaacgtacccctacacacacgcacgcacatacaccccgctcaccccgacacaaaccccgacgcgcttaccgaacaaatacaaaccgcgaacgccgaaaaacgaaccgaaactacgcgaactaccgaccgcgacgcgctcgaacaaaaaaccgtaatcgacgcgacaaaacaactcgtactcccgcaacgaaaactcgtccccaaacaacaactaacgactacacacgaaacaacgaaaacactcgatataatacacgctatcccgcgccctcatcaccaaatcgctactactaaaacccacctaacacttaacgcacttaataccgaacaacctacgaacccaaaatacgacgatatcaacgctaaacctacgaccgacctcatctccctaactactacgactccgacgcgcgcccaaaacactttataaccaccaaaaaactacgataacccgcctacgaacattcccgaacccgaaaaaacgctacgacacccgtacgtcatacaaataaaacgtctacctaaacaaaaccgaaacgcgcgaacaaaccgacatccccaatcccgaccccgacccctacgcgcgataacccaacccgcgttcccgccgacctcacctaacataatcccgcttacaataaatcttcccgtctctcacgaaacacgtacacgtctcgtacaaatactaactacactcgacacacttaaaacaaaccgcgtaccactcgaaatcgaacgacacccgcaaaataaactaatcgtaaatctaactcccgcaaaccacgcacatacccgtcccgaacttctctaccgaaaaaaaacgcgaacccgcgtcaaacctaactacccgaacccaaacccgacctcga

SEQ ID NO: 36359 - DNA, 967 bp, Artificial Sequence
  chemically treated genomic DNA (Homo sapiens) CpG-island No: 36359
atagttttgtttttagtatatagtttcgtattgatatagaaaaatattatttcggtagacggaattatatataattgataatttttcgttagggatataagcgtatttttatatatacgtacgtatatatatttcgtttatttcggtataggtttcggcgcgtttatcgggtagatgtaggtcgcgggcgtcgggaagcgggtcggggttgcgcgggttgtcggtcgcggcgcgttcgagtaggaggtcgtggtcggcgcggtagagtagttcgtgttttcgtagcgagaattcgtttttaggtagtagttggcggttgtatacggagtagcggaagtattcgatgtggtatacgttgtttcgcgtttttattattaggtcgttgttgttgaagtttatttggtatttggcgtatttgatgtcgaatagtttgcgggtttaaggtgcggcggtgttagcgttgggtttgcggtcggttttatttttttggttgttacggtttcggcgcgcgtttaggatattttgtggttattaggagattgcggtgattcgtttgcgggtattttcgggttcgggggagcgttgcggtattcgtgcgttatgtagatgagacgtttgtttgggtagggtcgaggcgcgcggataggtcgatatttttagtttcggtttcggtttttgcgcgcggtggtttagttcgcgttttcgtcggttttatttgatatagtttcgtttgtagtaggttttttcgttttttacgaagtacgtgtacgtttcgtataggtattggttgtattcggtatatttgaggtaggtcgcgtgttattcgaggtcgggcgatattcgtaggataaattggtcgtggatttgattttcgtagattacgtatatgttcgtttcgggtttttttgtcggggaagggcgcgggttcgcgttaggtttgattgttcggatttaggttcggtttcgg

SEQ ID NO: 36360 - DNA, 967 bp, Artificial Sequence
  chemically treated genomic DNA (Homo sapiens) CpG-island No: 36360
ccgaaaccgaacctaaatccgaacaatcaaacctaacgcgaacccgcgcccttccccgacaaaaaaacccgaaacgaacatatacgtaatctacgaaaatcaaatccacgaccaatttatcctacgaatatcgcccgacctcgaataacacgcgacctacctcaaatataccgaatacaaccaatacctatacgaaacgtacacgtacttcgtaaaaaacgaaaaaacctactacaaacgaaactatatcaaataaaaccgacgaaaacgcgaactaaaccaccgcgcgcaaaaaccgaaaccgaaactaaaaatatcgacctatccgcgcgcctcgaccctacccaaacaaacgtctcatctacataacgcacgaataccgcaacgctcccccgaacccgaaaatacccgcaaacgaatcaccgcaatctcctaataaccacaaaatatcctaaacgcgcgccgaaaccgtaacaaccaaaaaaataaaaccgaccgcaaacccaacgctaacaccgccgcaccttaaacccgcaaactattcgacatcaaatacgccaaataccaaataaacttcaacaacaacgacctaataataaaaacgcgaaacaacgtataccacatcgaatacttccgctactccgtatacaaccgccaactactacctaaaaacgaattctcgctacgaaaacacgaactactctaccgcgccgaccacgacctcctactcgaacgcgccgcgaccgacaacccgcgcaaccccgacccgcttcccgacgcccgcgacctacatctacccgataaacgcgccgaaacctataccgaaataaacgaaatatatatacgtacgtatatataaaaatacgcttatatccctaacgaaaaattatcaattatatataattccgtctaccgaaataatatttttctatatcaatacgaaactatatactaaaaacaaaactat

SEQ ID NO: 36361 - DNA, 978 bp, Artificial Sequence
  chemically treated genomic DNA (Homo sapiens) CpG-island No: 36361
cgggcgggggggtattcgttggggagggattcgtggagagggggcgcgggttcggggttcgtcgaggaatttttcggggttgttaggaagttcgtgagaagtcgagtattcggtaagttttattttgtgtagtaatcgttgtttcgcggttgtagttataatcgttaagtttttgagaaatttttttaaaaattgtaatcgttcgggagtcgtcgagggacggcgtttaggtatttaggtttcgcgtttttttcgggagagatttgaggggattcggcgtcgaggggaaggtcgcggggtcgcgggtcggtttagttttatttgtttcgggggtgtcgggcgagaatttcgcgtcgcgttttttaggttgttcgtcgtatttgtcgtcgaatttcgtcgttcgttcgggttttttattaggaatttttcgtttagaattttcgtttcgatttcggtcgtcgtacgttttattcggcgtttgtagtgtttcgtgtgtttttcgtcgtttttgcgttcgtcgagtgcgttcgttgttcgcgtttttaaaagtttcggcgcggcgggtttcgggattacgttttttttcgtttagttttcgatttgtgaggtgcgtttttcgtaagatggcggtagtcgggtttcgggttgggtgggggcggaatttggcggaagtgcgcgttatttttttcgtagatgtaagtggggaggttgtttgttttatagcgggtagggggaagttaggaaaacgtaaataaatttggaggggcggacggtttgggggaatcgttggatcgtttggggtcgggatcgggggttagtttcgaggtttcggttttggggcggttgtatttggtttcgagtttcggtgtacgtggtcggtttagtcgtcgttttttcgaagttttggttaagtggtacgtttgtggttttttttgacgtgattggtaaaaagttttatgggatttttttgaaatttta

SEQ ID NO: 36362 - DNA, 978 bp, Artificial Sequence
  chemically treated genomic DNA (Homo sapiens) CpG-island No: 36362
taaaatttcaaaaaaatcccataaaactttttaccaatcacgtcaaaaaaaaccacaaacgtaccacttaaccaaaacttcgaaaaaacgacgactaaaccgaccacgtacaccgaaactcgaaaccaaatacaaccgccccaaaaccgaaacctcgaaactaacccccgatcccgaccccaaacgatccaacgattcccccaaaccgtccgcccctccaaatttatttacgttttcctaacttccccctacccgctataaaacaaacaacctccccacttacatctacgaaaaaaataacgcgcacttccgccaaattccgcccccacccaacccgaaacccgactaccgccatcttacgaaaaacgcacctcacaaatcgaaaactaaacgaaaaaaaacgtaatcccgaaacccgccgcgccgaaacttttaaaaacgcgaacaacgaacgcactcgacgaacgcaaaaacgacgaaaaacacacgaaacactacaaacgccgaataaaacgtacgacgaccgaaatcgaaacgaaaattctaaacgaaaaattcctaataaaaaacccgaacgaacgacgaaattcgacgacaaatacgacgaacaacctaaaaaacgcgacgcgaaattctcgcccgacacccccgaaacaaataaaactaaaccgacccgcgaccccgcgaccttcccctcgacgccgaatcccctcaaatctctcccgaaaaaaacgcgaaacctaaatacctaaacgccgtccctcgacgactcccgaacgattacaatttttaaaaaaatttctcaaaaacttaacgattataactacaaccgcgaaacaacgattactacacaaaataaaacttaccgaatactcgacttctcacgaacttcctaacaaccccgaaaaattcctcgacgaaccccgaacccgcgccccctctccacgaatccctccccaacgaatacccccccgcccg

SEQ ID NO: 36363 - DNA, 978 bp, Artificial Sequence
  chemically treated genomic DNA (Homo sapiens) CpG-island No: 36363
tagaattttagagaaattttatggagttttttgttagttacgttaaaagaggttataaacgtgttatttaattagagtttcggaaaggcggcggttgggtcggttacgtgtatcgagattcggggttaggtgtagtcgttttagggtcgaggtttcggaattggttttcggtttcggttttaagcggtttagcgatttttttaagtcgttcgtttttttagatttatttacgtttttttgatttttttttgttcgttgtgggataaatagtttttttatttgtatttgcgaggggagtagcgcgtattttcgttaagtttcgtttttatttagttcgaggttcggttgtcgttattttgcggggggcgtattttataggtcgggagttgggcgggaaggggcgtggtttcgggattcgtcgcgtcggggtttttgggagcgcgggtagcgagcgtattcggcggacgtaagggcggcggggagtatacggagtattgtaggcgtcgggtgaggcgtgcggcggtcggggtcgggacgggggttttgggcggggggtttttggtggagggttcgggcgggcggcggggttcggcggtaggtgcggcgggtagtttagggggcgcggcgcggggttttcgttcggtattttcggggtaggtggagttgagtcggttcgcggtttcgcgatttttttttcggcgtcgggtttttttaggtttttttcgaaggaaacgcggagtttgggtgtttgggcgtcgtttttcggcggttttcgagcggttgtagtttttgaaagagttttttaaaggtttgacggttgtgattgtagtcgcggggtaacggttgttatataaagtgaaatttgtcgagtgttcggttttttacgggttttttggtagtttcgggaagtttttcggcggatttcgagttcgcgttttttttttacggatttttttttagcgagtgttttttcgttcg

SEQ ID NO: 36364 - DNA, 978 bp, Artificial Sequence
  chemically treated genomic DNA (Homo sapiens) CpG-island No: 36364
cgaacgaaaaaacactcgctaaaaaaaaatccgtaaaaaaaaaacgcgaactcgaaatccgccgaaaaacttcccgaaactaccaaaaaacccgtaaaaaaccgaacactcgacaaatttcactttatataacaaccgttaccccgcgactacaatcacaaccgtcaaacctttaaaaaactctttcaaaaactacaaccgctcgaaaaccgccgaaaaacgacgcccaaacacccaaactccgcgtttccttcgaaaaaaacctaaaaaaacccgacgccgaaaaaaaaatcgcgaaaccgcgaaccgactcaactccacctaccccgaaaataccgaacgaaaaccccgcgccgcgccccctaaactacccgccgcacctaccgccgaaccccgccgcccgcccgaaccctccaccaaaaaccccccgcccaaaacccccgtcccgaccccgaccgccgcacgcctcacccgacgcctacaatactccgtatactccccgccgcccttacgtccgccgaatacgctcgctacccgcgctcccaaaaaccccgacgcgacgaatcccgaaaccacgccccttcccgcccaactcccgacctataaaatacgccccccgcaaaataacgacaaccgaacctcgaactaaataaaaacgaaacttaacgaaaatacgcgctactcccctcgcaaatacaaataaaaaaactatttatcccacaacgaacaaaaaaaaatcaaaaaaacgtaaataaatctaaaaaaacgaacgacttaaaaaaatcgctaaaccgcttaaaaccgaaaccgaaaaccaattccgaaacctcgaccctaaaacgactacacctaaccccgaatctcgatacacgtaaccgacccaaccgccgcctttccgaaactctaattaaataacacgtttataacctcttttaacgtaactaacaaaaaactccataaaatttctctaaaattcta

SEQ ID NO: 36365 - DNA, 536 bp, Artificial Sequence
  chemically treated genomic DNA (Homo sapiens) CpG-island No: 36365
gtgttattttttttttttaggcggttttcgcggtgcgcgcgatttatgtttatgttcgcgtttattaataaagttgtttatttgttgtcggttcgttagttcgaaaggttgcgcgcgtagatcgagaagtttcgcgatagttagtcgcggttgtttttgcgtttttcgagttggcggggttcgtggtgcgggatcgagattgcgggttatggcgtcgaaggtttttcgttagtattgggatattttcgatggtatcgattgttatcgtaaagtttatagtattattagtattgttagcgtcgttggtgagcgtcggtcgggtttcgagggtggagggtcgaggtcgtagggaggtcgtggggttattgggggttgtttggatcgaacgggtttgggagtttcgcgggtacgtacgtggttgttatcggggtgttttgggcggtcgtagcgggggattttgtgtgaaatggatgttggtagggggtttagtagggttggggagtattgggaggtcgtgatatgcgataagttagttt

SEQ ID NO: 36366 - DNA, 536 bp, Artificial Sequence
  chemically treated genomic DNA (Homo sapiens) CpG-island No: 36366
aaactaacttatcgcatatcacgacctcccaatactccccaaccctactaaaccccctaccaacatccatttcacacaaaatcccccgctacgaccgcccaaaacaccccgataacaaccacgtacgtacccgcgaaactcccaaacccgttcgatccaaacaacccccaataaccccacgacctccctacgacctcgaccctccaccctcgaaacccgaccgacgctcaccaacgacgctaacaatactaataatactataaactttacgataacaatcgataccatcgaaaatatcccaatactaacgaaaaaccttcgacgccataacccgcaatctcgatcccgcaccacgaaccccgccaactcgaaaaacgcaaaaacaaccgcgactaactatcgcgaaacttctcgatctacgcgcgcaacctttcgaactaacgaaccgacaacaaataaacaactttattaataaacgcgaacataaacataaatcgcgcgcaccgcgaaaaccgcctaaaaaaaaaaaataacac

SEQ ID NO: 36367 - DNA, 536 bp, Artificial Sequence
  chemically treated genomic DNA (Homo sapiens) CpG-island No: 36367
ggattagtttgtcgtatgttacgattttttagtgttttttaattttgttggattttttattaatatttattttatataagatttttcgttacgatcgtttaagatatttcgatgataattacgtgcgtattcgcgagatttttagattcgttcgatttaaatagtttttagtaattttacgatttttttgcggtttcggttttttattttcggggttcggtcggcgtttattagcgacgttggtaatattggtggtgttgtaggttttgcggtggtaatcggtgttatcggggatattttagtattgacgaaaaattttcggcgttatagttcgtaatttcgatttcgtattacggatttcgttagttcgggaagcgtaagggtagtcgcggttggttatcgcgagatttttcggtttgcgcgcgtaatttttcgggttagcgggtcggtaataagtgagtaattttattgataggcgcggatatggatatggatcgcgcgtatcgcggggatcgtttggaggaagagagtagtat

SEQ ID NO: 36368 - DNA, 536 bp, Artificial Sequence
  chemically treated genomic DNA (Homo sapiens) CpG-island No: 36368
atactactctcttcctccaaacgatccccgcgatacgcgcgatccatatccatatccgcgcctatcaataaaattactcacttattaccgacccgctaacccgaaaaattacgcgcgcaaaccgaaaaatctcgcgataaccaaccgcgactacccttacgcttcccgaactaacgaaatccgtaatacgaaatcgaaattacgaactataacgccgaaaatttttcgtcaatactaaaatatccccgataacaccgattaccaccgcaaaacctacaacaccaccaatattaccaacgtcgctaataaacgccgaccgaaccccgaaaataaaaaaccgaaaccgcaaaaaaatcgtaaaattactaaaaactatttaaatcgaacgaatctaaaaatctcgcgaatacgcacgtaattatcatcgaaatatcttaaacgatcgtaacgaaaaatcttatataaaataaatattaataaaaaatccaacaaaattaaaaaacactaaaaaatcgtaacatacgacaaactaatcc

SEQ ID NO: 36369 - DNA, 654 bp, Artificial Sequence
  chemically treated genomic DNA (Homo sapiens) CpG-island No: 36369
cgcggtttatacgcgagtttttcgtcgaggatgaattattagttagttcgagttgttatattttattttagtatagttatcgcgagagtttcggggtcgcgtcggcgtgttttacgtacgcgtagtttttcgcggggtcggttagtggtgtcgtcgaggcggggggagtggtttcgcgtcggtcgagtgaggtagggttatacgtaggtgtattcgcgcgtcgatagttcgtgtatcgtgtggtagcggttgtgcgcgtttaggaaggatatttcgttttcgtaggtcgtcgggcggtagtagggttgcgcgcgtattcgttttcgtcgtaggcgtcgtcgttggcgtagtcgtcgtagttcgaggtcgtagacgcgcgcggtagtttcgtaggcgtttgcgtagtagcggaatagtatcgtttcgtcggacgcgtagtttaggtttagttcgtttacgcgtatttttagttcgcgtagttcgtaaggtcgcgtttttaatcgcgtacgcgcgcgtcgtcgttcggggtttcgttcgacggcgcggatttgggggtcgtttagtttagggcgttagttcgcgtagttttatcgtattcggggttttttgtaggagtgtacggtttgcgaggggaggaagagaaaggaggggggg

SEQ ID NO: 36370 - DNA, 654 bp, Artificial Sequence
  chemically treated genomic DNA (Homo sapiens) CpG-island No: 36370
ccccccctcctttctcttcctcccctcgcaaaccgtacactcctacaaaaaaccccgaatacgataaaactacgcgaactaacgccctaaactaaacgacccccaaatccgcgccgtcgaacgaaaccccgaacgacgacgcgcgcgtacgcgattaaaaacgcgaccttacgaactacgcgaactaaaaatacgcgtaaacgaactaaacctaaactacgcgtccgacgaaacgatactattccgctactacgcaaacgcctacgaaactaccgcgcgcgtctacgacctcgaactacgacgactacgccaacgacgacgcctacgacgaaaacgaatacgcgcgcaaccctactaccgcccgacgacctacgaaaacgaaatatccttcctaaacgcgcacaaccgctaccacacgatacacgaactatcgacgcgcgaatacacctacgtataaccctacctcactcgaccgacgcgaaaccactccccccgcctcgacgacaccactaaccgaccccgcgaaaaactacgcgtacgtaaaacacgccgacgcgaccccgaaactctcgcgataactatactaaaataaaatataacaactcgaactaactaataattcatcctcgacgaaaaactcgcgtataaaccgcg

SEQ ID NO: 36371 - DNA, 654 bp, Artificial Sequence
  chemically treated genomic DNA (Homo sapiens) CpG-island No: 36371
ttttttttttttttttttttttttttcgtagatcgtgtatttttgtagggggtttcggatgcgatggagttgcgcgagttgacgttttgggttgggcggtttttaggttcgcgtcgtcgggcggggtttcgggcggcggcgcgcgcgtgcgcggttgggggcgcggttttgcgggttgcgcgagttggaggtgcgcgtgagcgagttgggtttgggttacgcgttcgacgagacggtgttgtttcgttattgcgtaggcgtttgcgaggttgtcgcgcgcgtttacgatttcgggttgcgacgattgcgttagcggcggcgtttgcggcgggagcgggtgcgcgcgtagttttgttgtcgttcgacggtttacgaggacgaggtgttttttttggacgcgtatagtcgttattatacggtgtacgagttgtcggcgcgcgagtgtatttgcgtgtgattttattttattcggtcggcgcggggttatttttttcgtttcgacggtattattggtcggtttcgcgaaagattgcgcgtgcgtagagtacgtcggcgcggtttcgggattttcgcgataattgtattgagataaagtgtggtaattcgagttggttggtgatttattttcggcgaggggttcgcgtgtgggtcgcg

SEQ ID NO: 36372 - DNA, 654 bp, Artificial Sequence
  chemically treated genomic DNA (Homo sapiens) CpG-island No: 36372
cgcgacccacacgcgaacccctcgccgaaaataaatcaccaaccaactcgaattaccacactttatctcaatacaattatcgcgaaaatcccgaaaccgcgccgacgtactctacgcacgcgcaatctttcgcgaaaccgaccaataataccgtcgaaacgaaaaaaataaccccgcgccgaccgaataaaataaaatcacacgcaaatacactcgcgcgccgacaactcgtacaccgtataataacgactatacgcgtccaaaaaaaacacctcgtcctcgtaaaccgtcgaacgacaacaaaactacgcgcgcacccgctcccgccgcaaacgccgccgctaacgcaatcgtcgcaacccgaaatcgtaaacgcgcgcgacaacctcgcaaacgcctacgcaataacgaaacaacaccgtctcgtcgaacgcgtaacccaaacccaactcgctcacgcgcacctccaactcgcgcaacccgcaaaaccgcgcccccaaccgcgcacgcgcgcgccgccgcccgaaaccccgcccgacgacgcgaacctaaaaaccgcccaacccaaaacgtcaactcgcgcaactccatcgcatccgaaaccccctacaaaaatacacgatctacgaaaaaaaaaaaaaaaaaaaaaaaaaa

SEQ ID NO: 36373 - DNA, 604 bp, Artificial Sequence
  chemically treated genomic DNA (Homo sapiens) CpG-island No: 36373
ggtagggcgcgggtttaaggggtttcgggagtttttttcggggtcgggtcgggacgcggttggtgagtttcggtttcggtttttgaattggggggttcgcgtttgttttaaacgtcgttttttttcgttttttatgttattttttgtattaataagatggtggttaaagtaggggaggagagtagtagcgagtcgtcgtcgtcgtcgcgtcgaggttggcgttgaaattttgtttcgtcggggattagcgcgttcgtaggcggtcgttttcgtcgcgggggtcgttagtcgaggtcgcgtcgttttcgtcgagtcgttcgtcggtcgttttcgtcgttcgagtttcgcggttgtcgtagtattttcgggaaggtgagttagtttcggtagttaatgtggttattgaaaatggtttcggagagcgttcggtagtttgttagcgagcgcgggggtcgtcggtgcggggcgggagcggcggttgggggcgggggcggtcgggggtttcggcgcgggtcggggcgggggttcggaacgcgcggcgcggggtggggggcggtcgcgttgtcgaaggtgggtgaatttcggtagtagttgttcgtcgcgg

SEQ ID NO: 36374 - DNA, 604 bp, Artificial Sequence
  chemically treated genomic DNA (Homo sapiens) CpG-island No: 36374
ccgcgacgaacaactactaccgaaattcacccaccttcgacaacgcgaccgccccccaccccgcgccgcgcgttccgaacccccgccccgacccgcgccgaaacccccgaccgcccccgcccccaaccgccgctcccgccccgcaccgacgacccccgcgctcgctaacaaactaccgaacgctctccgaaaccattttcaataaccacattaactaccgaaactaactcaccttcccgaaaatactacgacaaccgcgaaactcgaacgacgaaaacgaccgacgaacgactcgacgaaaacgacgcgacctcgactaacgacccccgcgacgaaaacgaccgcctacgaacgcgctaatccccgacgaaacaaaatttcaacgccaacctcgacgcgacgacgacgacgactcgctactactctcctcccctactttaaccaccatcttattaatacaaaaaataacataaaaaacgaaaaaaaacgacgtttaaaacaaacgcgaaccccccaattcaaaaaccgaaaccgaaactcaccaaccgcgtcccgacccgaccccgaaaaaaactcccgaaaccccttaaacccgcgccctacc

SEQ ID NO: 36375 - DNA, 604 bp, Artificial Sequence
  chemically treated genomic DNA (Homo sapiens) CpG-island No: 36375
tcgcggcgggtagttattgtcgaggtttatttattttcggtaacgcggtcgttttttatttcgcgtcgcgcgtttcggattttcgtttcggttcgcgtcgagattttcggtcgttttcgtttttagtcgtcgttttcgtttcgtatcggcggttttcgcgttcgttggtaaattgtcgagcgtttttcgaagttatttttaatggttatattggttatcggggttgatttattttttcgggaatgttgcggtagtcgcggggttcgggcggcgagagcggtcggcgggcggttcggcggaggcggcgcggtttcggttggcggttttcgcggcgggagcggtcgtttgcgggcgcgttggttttcggcgaggtaaagttttagcgttagtttcggcgcggcggcggcggcgattcgttgttgttttttttttttgttttgattattattttattagtataggaaatgatatggaaaacggaagaaagcggcgtttggggtagacgcggattttttaatttaggggtcggagtcgagatttattagtcgcgtttcgattcggtttcggagaaaattttcggggttttttaggttcgcgttttgtt

SEQ ID NO: 36376 - DNA, 604 bp, Artificial Sequence
  chemically treated genomic DNA (Homo sapiens) CpG-island No: 36376
aacaaaacgcgaacctaaaaaaccccgaaaattttctccgaaaccgaatcgaaacgcgactaataaatctcgactccgacccctaaattaaaaaatccgcgtctaccccaaacgccgctttcttccgttttccatatcatttcctatactaataaaataataatcaaaacaaaaaaaaaaaacaacaacgaatcgccgccgccgccgcgccgaaactaacgctaaaactttacctcgccgaaaaccaacgcgcccgcaaacgaccgctcccgccgcgaaaaccgccaaccgaaaccgcgccgcctccgccgaaccgcccgccgaccgctctcgccgcccgaaccccgcgactaccgcaacattcccgaaaaaataaatcaaccccgataaccaatataaccattaaaaataacttcgaaaaacgctcgacaatttaccaacgaacgcgaaaaccgccgatacgaaacgaaaacgacgactaaaaacgaaaacgaccgaaaatctcgacgcgaaccgaaacgaaaatccgaaacgcgcgacgcgaaataaaaaacgaccgcgttaccgaaaataaataaacctcgacaataactacccgccgcga

SEQ ID NO: 36377 - DNA, 757 bp, Artificial Sequence
  chemically treated genomic DNA (Homo sapiens) CpG-island No: 36377
  unsure (76, 525..)
ggagatttaaggttttttcggtttttgcgattggtcggcgcgatttttagtcgggttttcgttgtttattaggatntggttaggttttgggcgcgtagtcggagttgttcgattggcgggaggggcggtatcggagcgtggaggtggtgaaggtggtggggcggcggaggcggggtcgtattgaggcgttgcggcggcggtggtggcggtggtagcggtggcggttgttcgttttagtttggcgggggcgggggtttggaagatgggggcgggtggaataacgggtcggtgaggagtagtcgtcgttttttcgtcgtcgttggggtagtgtcgcggtggtcgattttggtagtgtcgttagtttttaggtagtcgttttttttttcgatatttcgttttgaggaggttgaggcggaatcgcggttggcggcggggggacggatcggttttgtagtggtcgtagtgatagttcggattcggtttttcgttcgttttgtttcggcgttcgtagttacgatgaatcgnngggcgcggttcgtcgtcgtcgttaattatttgttttgtattaattgtcggaaagtgttgcggaaggtacgggttcggttcggggttttgtcggcgagggtcgttttttgtcggtcggggttcgggcggttcgttttcgggcgcgtattgggggaggttgagagggattttcgggtatcgttttttcgtagggattgagaaagggggcgtgggttgagggtaggagggtttg

SEQ ID NO: 36378 - DNA, 757 bp, Artificial Sequence
  chemically treated genomic DNA (Homo sapiens) CpG-island No: 36378
  unsure (232..233, 682)
caaaccctcctaccctcaacccacgccccctttctcaatccctacgaaaaaacgatacccgaaaatccctctcaacctcccccaatacgcgcccgaaaacgaaccgcccgaaccccgaccgacaaaaaacgaccctcgccgacaaaaccccgaaccgaacccgtaccttccgcaacactttccgacaattaatacaaaacaaataattaacgacgacgacgaaccgcgcccnncgattcatcgtaactacgaacgccgaaacaaaacgaacgaaaaaccgaatccgaactatcactacgaccactacaaaaccgatccgtccccccgccgccaaccgcgattccgcctcaacctcctcaaaacgaaatatcgaaaaaaaaaacgactacctaaaaactaacgacactaccaaaatcgaccaccgcgacactaccccaacgacgacgaaaaaacgacgactactcctcaccgacccgttattccacccgcccccatcttccaaacccccgcccccgccaaactaaaacgaacaaccgccaccgctaccaccgccaccaccgccgccgcaacgcctcaatacgaccccgcctccgccgccccaccaccttcaccacctccacgctccgataccgcccctcccgccaatcgaacaactccgactacgcgcccaaaacctaaccanatcctaataaacaacgaaaacccgactaaaaatcgcgccgaccaatcgcaaaaaccgaaaaaaccttaaatctcc

SEQ ID NO: 36379 - DNA, 757 bp, Artificial Sequence
  chemically treated genomic DNA (Homo sapiens) CpG-island No: 36379
  unsure (232..233, 682)
taaatttttttgtttttaatttacgtttttttttttagtttttgcggagggacggtgttcggggattttttttagttttttttagtgcgcgttcggggacgagtcgttcgagtttcggtcggtaggaagcgattttcgtcggtaggatttcgggtcgaattcgtatttttcgtagtatttttcggtagttggtatagagtaggtagttggcggcggcgacgggtcgcgtttnncggtttatcgtggttgcgggcgtcgaggtagagcgggcggagggtcgggttcgggttgttattgcggttattgtagggtcggttcgttttttcgtcgttagtcgcgatttcgttttagtttttttaaggcgggatgtcgggaggagaggcgattgtttgaaagttagcggtattgttagagtcgattatcgcggtattgttttagcgacggcggagaggcggcggttgttttttatcggttcgttgttttattcgtttttattttttagattttcgttttcgttaggttaggacgagtagtcgttatcgttgttatcgttattatcgtcgtcgtagcgttttagtgcggtttcgttttcgtcgttttattatttttattatttttacgtttcggtatcgtttttttcgttaatcggatagtttcggttacgcgtttagggtttagttangttttaatgagtaacgagagttcgattgggagtcgcgtcggttaatcgtaggggtcgaggaagttttgaattttt

SEQ ID NO: 36380 - DNA, 757 bp, Artificial Sequence
  chemically treated genomic DNA (Homo sapiens) CpG-island No: 36380
  unsure (76, 525..)
aaaaattcaaaacttcctcgacccctacgattaaccgacgcgactcccaatcgaactctcgttactcattaaaacntaactaaaccctaaacgcgtaaccgaaactatccgattaacgaaaaaaacgataccgaaacgtaaaaataataaaaataataaaacgacgaaaacgaaaccgcactaaaacgctacgacgacgataataacgataacaacgataacgactactcgtcctaacctaacgaaaacgaaaatctaaaaaataaaaacgaataaaacaacgaaccgataaaaaacaaccgccgcctctccgccgtcgctaaaacaataccgcgataatcgactctaacaataccgctaactttcaaacaatcgcctctcctcccgacatcccgccttaaaaaaactaaaacgaaatcgcgactaacgacgaaaaaacgaaccgaccctacaataaccgcaataacaacccgaacccgaccctccgcccgctctacctcgacgcccgcaaccacgataaaccgnnaaacgcgacccgtcgccgccgccaactacctactctataccaactaccgaaaaatactacgaaaaatacgaattcgacccgaaatcctaccgacgaaaatcgcttcctaccgaccgaaactcgaacgactcgtccccgaacgcgcactaaaaaaaactaaaaaaaatccccgaacaccgtccctccgcaaaaactaaaaaaaaaaacgtaaattaaaaacaaaaaaattta

SEQ ID NO: 36381 - DNA, 611 bp, Artificial Sequence
  chemically treated genomic DNA (Homo sapiens) CpG-island No: 36381
ttatttttacggtaaatcgtattcggttgcggtaatcgtcgttttattggttattacgttgattggtgcgtacgttagaaattcgttgattaaatatttttcggaatttattatttttatatcgtcgtattttgtttttcgcgttagttgcgttagcggcgaaattgtcgattagttgtaggatttttttatggtttaatttatggggtacgaaacggttgatgggggtttgtaatgcggacggggcgattagatgcggttggtagttgtagcgttcggtatgtaaaatttgtagggttattttgtcgtttttttgatgtatcgtttcggtaatggtgcgatggtgtgggatttggttggcgtcgttgagtattgcgttattttttatgttaacgtttgttaaatttggtgtaatgtcgtcgttgataattagcgttacgtcgttgacggggcgcgttcggtataaaacgttgttagtcgttcgtatcgttcgggtatttttttagttcggtgtgtattgagtttattaatacgcggttttttaacgtgttaaaatttaaatttagcggggcgtatagcgacgggtagtttatataatcgtttagtatgta

SEQ ID NO: 36382 - DNA, 611 bp, Artificial Sequence
  chemically treated genomic DNA (Homo sapiens) CpG-island No: 36382
tacatactaaacgattatataaactacccgtcgctatacgccccgctaaatttaaattttaacacgttaaaaaaccgcgtattaataaactcaatacacaccgaactaaaaaaatacccgaacgatacgaacgactaacaacgttttataccgaacgcgccccgtcaacgacgtaacgctaattatcaacgacgacattacaccaaatttaacaaacgttaacataaaaaataacgcaatactcaacgacgccaaccaaatcccacaccatcgcaccattaccgaaacgatacatcaaaaaaacgacaaaataaccctacaaattttacataccgaacgctacaactaccaaccgcatctaatcgccccgtccgcattacaaacccccatcaaccgtttcgtaccccataaattaaaccataaaaaaatcctacaactaatcgacaatttcgccgctaacgcaactaacgcgaaaaacaaaatacgacgatataaaaataataaattccgaaaaatatttaatcaacgaatttctaacgtacgcaccaatcaacgtaataaccaataaaacgacgattaccgcaaccgaatacgatttaccgtaaaaataa

SEQ ID NO: 36383 - DNA, 611 bp, Artificial Sequence
  chemically treated genomic DNA (Homo sapiens) CpG-island No: 36383
tatatattggacgattgtatgagttattcgtcgttgtgcgtttcgttggatttaggttttagtacgttaaagaatcgcgtgttgatgggtttaatgtatatcgggttggaggaatattcggacggtgcgagcggttggtagcgttttatgtcgaacgcgtttcgttagcggcgtggcgttgattgttagcggcggtattgtattagatttaataggcgttggtatggaaggtggcgtaatgtttaacgacgttagttagattttatattatcgtattattatcgaagcggtatattaggaaggcggtaaaatagttttgtaaattttgtatatcgggcgttatagttattaatcgtatttggtcgtttcgttcgtattgtaggtttttattaatcgtttcgtgttttatgagttaagttatgaagagattttgtaattgatcgataatttcgtcgttggcgtaattggcgcgggaggtaggatacgacggtgtagaggtgatgggtttcgaagggtatttgattaacgaatttttgacgtgcgtattaattagcgtagtgattagtggggcggcgattatcgtaatcggatgcgatttgtcgtagaagtag

SEQ ID NO: 36384 - DNA, 611 bp, Artificial Sequence
  chemically treated genomic DNA (Homo sapiens) CpG-island No: 36384
ctacttctacgacaaatcgcatccgattacgataatcgccgccccactaatcactacgctaattaatacgcacgtcaaaaattcgttaatcaaatacccttcgaaacccatcacctctacaccgtcgtatcctacctcccgcgccaattacgccaacgacgaaattatcgatcaattacaaaatctcttcataacttaactcataaaacacgaaacgattaataaaaacctacaatacgaacgaaacgaccaaatacgattaataactataacgcccgatatacaaaatttacaaaactattttaccgccttcctaatataccgcttcgataataatacgataatataaaatctaactaacgtcgttaaacattacgccaccttccataccaacgcctattaaatctaatacaataccgccgctaacaatcaacgccacgccgctaacgaaacgcgttcgacataaaacgctaccaaccgctcgcaccgtccgaatattcctccaacccgatatacattaaacccatcaacacgcgattctttaacgtactaaaacctaaatccaacgaaacgcacaacgacgaataactcatacaatcgtccaatatata

SEQ ID NO: 36385 - DNA, 680 bp, Artificial Sequence
  chemically treated genomic DNA (Homo sapiens) CpG-island No: 36385
gaggttcgtgttttttttagagggcgttacggttagcgagtagcgcgcgttgatgtcggagtttaagatttttatttatatcggtaattattttaacgtggttaattttttcggggcgtgtattaagtcgtagggtacggagcgggcggttcgttgggacggcgagatttcgggcgtagggcgtcgcgggcgggagggggcgcgggtgtaaacgcggagcgcgttcgtagcgcgtttcgggtttcgaacgtacggtcgtcgttcggtttcgtcgtaggtttttttatggtgatcgtggagttttgtaagtacggtaatttttttaattttttgcgcgttaagcgggacgtttttagtttttgcgcggtgagcgggcggtttgcggggcgtcgcgggcggcgggggaatggaggcgtttttgcggcggacgattgggcgttttcgagttagtttcgtgtattcgtaggagaagtttttcgagtagcgcggacgttttcgcgttatggtggagttcgttaggttggatcggaggcggtcggggagtagcgatagggtttttttcgcgcggttttcgaagatcgagggcggagcgaggcgggtttttttagattaagaaggtgagagtttggttttttttttttttttagtgtttgacgggttcggttatatttcgtgattag

SEQ ID NO: 36386 - DNA, 680 bp, Artificial Sequence
  chemically treated genomic DNA (Homo sapiens) CpG-island No: 36386
ctaatcacgaaatataaccgaacccgtcaaacactaaaaaaaaaaaaaaaaccaaactctcaccttcttaatctaaaaaaacccgcctcgctccgccctcgatcttcgaaaaccgcgcgaaaaaaaccctatcgctactccccgaccgcctccgatccaacctaacgaactccaccataacgcgaaaacgtccgcgctactcgaaaaacttctcctacgaatacacgaaactaactcgaaaacgcccaatcgtccgccgcaaaaacgcctccattcccccgccgcccgcgacgccccgcaaaccgcccgctcaccgcgcaaaaactaaaaacgtcccgcttaacgcgcaaaaaattaaaaaaattaccgtacttacaaaactccacgatcaccataaaaaaacctacgacgaaaccgaacgacgaccgtacgttcgaaacccgaaacgcgctacgaacgcgctccgcgtttacacccgcgccccctcccgcccgcgacgccctacgcccgaaatctcgccgtcccaacgaaccgcccgctccgtaccctacgacttaatacacgccccgaaaaaattaaccacgttaaaataattaccgatataaataaaaatcttaaactccgacatcaacgcgcgctactcgctaaccgtaacgccctctaaaaaaaacacgaacctc

SEQ ID NO: 36387 - DNA, 680 bp, Artificial Sequence
  chemically treated genomic DNA (Homo sapiens) CpG-island No: 36387
ttgattacgggatataatcgggttcgttaggtattaggaaaagggaagaggttaggtttttatttttttggtttggagaagttcgtttcgtttcgttttcggttttcgagaatcgcgcgaagaggattttgtcgttgtttttcggtcgttttcgatttagtttggcgagttttattatggcgcggaagcgttcgcgttgttcgggagattttttttgcggatgtacgaagttggttcgagggcgtttagtcgttcgtcgtagaggcgtttttattttttcgtcgttcgcggcgtttcgtaggtcgttcgtttatcgcgtaggggttgaaggcgtttcgtttggcgcgtaggaagttggagaggttgtcgtatttgtagaattttacgattattatgagggggtttgcggcgggatcgggcggcggtcgtgcgttcggaattcggggcgcgttgcgggcgcgtttcgcgtttgtattcgcgttttttttcgttcgcggcgttttgcgttcggggtttcgtcgttttagcgggtcgttcgtttcgtattttgcggtttggtgtacgtttcgaggaggttgattacgttgaggtggttgtcgatgtgaatgaggattttgagtttcgatattagcgcgcgttgttcgttggtcgtggcgttttttggaggggatacgggtttt

SEQ ID NO: 36388 - DNA, 680 bp, Artificial Sequence
  chemically treated genomic DNA (Homo sapiens) CpG-island No: 36388
aaaacccgtatcccctccaaaaaacgccacgaccaacgaacaacgcgcgctaatatcgaaactcaaaatcctcattcacatcgacaaccacctcaacgtaatcaacctcctcgaaacgtacaccaaaccgcaaaatacgaaacgaacgacccgctaaaacgacgaaaccccgaacgcaaaacgccgcgaacgaaaaaaaacgcgaatacaaacgcgaaacgcgcccgcaacgcgccccgaattccgaacgcacgaccgccgcccgatcccgccgcaaaccccctcataataatcgtaaaattctacaaatacgacaacctctccaacttcctacgcgccaaacgaaacgccttcaacccctacgcgataaacgaacgacctacgaaacgccgcgaacgacgaaaaaataaaaacgcctctacgacgaacgactaaacgccctcgaaccaacttcgtacatccgcaaaaaaaatctcccgaacaacgcgaacgcttccgcgccataataaaactcgccaaactaaatcgaaaacgaccgaaaaacaacgacaaaatcctcttcgcgcgattctcgaaaaccgaaaacgaaacgaaacgaacttctccaaaccaaaaaaataaaaacctaacctcttcccttttcctaatacctaacgaacccgattatatcccgtaatcaa

SEQ ID NO: 36389 - DNA, 514 bp, Artificial Sequence
  chemically treated genomic DNA (Homo sapiens) CpG-island No: 36389
  unsure (179)
cgagtttcgcgttagtagagcgttttttattcggtttttcgttcggtttgttatttttatttacggggcgtattgtgtgggttcgggcggttttcgttcgttcgttttttattttcgcggtaggttagcggcgggcggggacgtggcggttcggttagcgtatatgtcgcgattttatntcggcgtcggggttttcgttttttgcgcgtcggaagtcggtgttttggcggcgtgagttttacgcggcgggttttcggtttaggtattagggtcgcgtgcgcgagtcgttcggtaggggtagcggcggttttttcggcgcgcggatttagggaggaggtcggtttcggaggatgggggaggggtagaggcggaggcgacggaagtcgtcggacgtcgggggttgggcgtaggcggggcgagtgcgcgggtggcggttaggtttcggaaaggatatttgttgtacggttttttggatggtggtgtttggggattgggatttttttaatagttgtag

SEQ ID NO: 36390 - DNA, 514 bp, Artificial Sequence
  chemically treated genomic DNA (Homo sapiens) CpG-island No: 36390
  unsure (336)
ctacaactattaaaaaaatcccaatccccaaacaccaccatccaaaaaaccgtacaacaaatatcctttccgaaacctaaccgccacccgcgcactcgccccgcctacgcccaacccccgacgtccgacgacttccgtcgcctccgcctctacccctcccccatcctccgaaaccgacctcctccctaaatccgcgcgccgaaaaaaccgccgctacccctaccgaacgactcgcgcacgcgaccctaatacctaaaccgaaaacccgccgcgtaaaactcacgccgccaaaacaccgacttccgacgcgcaaaaaacgaaaaccccgacgccganataaaatcgcgacatatacgctaaccgaaccgccacgtccccgcccgccgctaacctaccgcgaaaataaaaaacgaacgaacgaaaaccgcccgaacccacacaatacgccccgtaaataaaaataacaaaccgaacgaaaaaccgaataaaaaacgctctactaacgcgaaactcg

SEQ ID NO: 36391 - DNA, 514 bp, Artificial Sequence
  chemically treated genomic DNA (Homo sapiens) CpG-island No: 36391
  unsure (336)
ttgtagttgttgaaggagttttagtttttagatattattatttagagaatcgtgtaataagtatttttttcgaggtttggtcgttattcgcgtattcgtttcgtttgcgtttagttttcggcgttcggcgattttcgtcgttttcgtttttgttttttttttatttttcgagatcggttttttttttgggttcgcgcgtcggggaagtcgtcgttgtttttgtcggacgattcgcgtacgcggttttgatgtttgggtcgggggttcgtcgcgtggggtttacgtcgttaaggtatcggttttcggcgcgtaggaggcggggatttcggcgtcggngtgaaatcgcgatatgtgcgttggtcgggtcgttacgttttcgttcgtcgttgatttgtcgcgggggtagggagcgggcgggcgggagtcgttcgggtttatataatgcgtttcgtgggtgggggtggtaggtcgagcgggaggtcgggtggagggcgttttgttgacgcggagttcg

SEQ ID NO: 36392 - DNA, 514 bp, Artificial Sequence
  chemically treated genomic DNA (Homo sapiens) CpG-island No: 36392
  unsure (179)
cgaactccgcgtcaacaaaacgccctccacccgacctcccgctcgacctaccacccccacccacgaaacgcattatataaacccgaacgactcccgcccgcccgctccctacccccgcgacaaatcaacgacgaacgaaaacgtaacgacccgaccaacgcacatatcgcgatttcacnccgacgccgaaatccccgcctcctacgcgccgaaaaccgataccttaacgacgtaaaccccacgcgacgaacccccgacccaaacatcaaaaccgcgtacgcgaatcgtccgacaaaaacaacgacgacttccccgacgcgcgaacccaaaaaaaaaaccgatctcgaaaaataaaaaaaaaacaaaaacgaaaacgacgaaaatcgccgaacgccgaaaactaaacgcaaacgaaacgaatacgcgaataacgaccaaacctcgaaaaaaatacttattacacgattctctaaataataatatctaaaaactaaaactccttcaacaactacaa

SEQ ID NO: 36393 - DNA, 850 bp, Artificial Sequence
  chemically treated genomic DNA (Homo sapiens) CpG-island No: 36393
tttcgcgtttcgaggaaaggagaatttcgcggcggcgaaggtcgattttggttcggttaggtacgttcgggtcgcggtttagttacgattcgggtagggtttcgcggtttttattagtttcgggaggagtttggtcggtcgggtcgttattatagtggcgtttcggttagttgggcgcgagcggaggcgcgttaagttttggcggcggcgttacggtcgggtagtacgggtttcgtaatttcgcgtcgttattttagcgttttcggaggaatcgggagcggggagtgggggaagggagggcgtcgcgttttattcggagagcgggcggtttttgttcgtcggcgtgtggttggggcgttgcgcggcggcgcggttgcgatagggagggagaagcggtggtgcgagcgttgggtcgcgggagacgagaggcgtcgtcgttatcgtagatagtttcgtaatatggtcgttcggcgttttcgcgggaaaaggcggggttgttcggcgttttttcgtttttttttgtcggtcggtcgttttcgcgtcgcggattgagcgttaacgtcgtcgttgggggtcgttttcgtttcgtttttttcgtaggttcgtagtcgtaggtttggtttcgggcgtggtcgggggtcgcggtttggggtcggttaacgcgaggtgggtggttgcgggttcgggagcgtttagggaaatagggcgaatgcgtcggagggtcgagtttttttagagagcgttgggttttagttaaatttgcggtcgagggaagcggagtcgtttagtttaaagttcggagtgtgttcgtcgtttttttaacgagtggaaatttgaaattttcgttggt

SEQ ID NO: 36394 - DNA, 850 bp, Artificial Sequence
  chemically treated genomic DNA (Homo sapiens) CpG-island No: 36394
accaacgaaaatttcaaatttccactcgttaaaaaaacgacgaacacactccgaactttaaactaaacgactccgcttccctcgaccgcaaatttaactaaaacccaacgctctctaaaaaaactcgaccctccgacgcattcgccctatttccctaaacgctcccgaacccgcaaccacccacctcgcgttaaccgaccccaaaccgcgacccccgaccacgcccgaaaccaaacctacgactacgaacctacgaaaaaaacgaaacgaaaacgacccccaacgacgacgttaacgctcaatccgcgacgcgaaaacgaccgaccgacaaaaaaaaacgaaaaaacgccgaacaaccccgccttttcccgcgaaaacgccgaacgaccatattacgaaactatctacgataacgacgacgcctctcgtctcccgcgacccaacgctcgcaccaccgcttctccctccctatcgcaaccgcgccgccgcgcaacgccccaaccacacgccgacgaacaaaaaccgcccgctctccgaataaaacgcgacgccctcccttcccccactccccgctcccgattcctccgaaaacgctaaaataacgacgcgaaattacgaaacccgtactacccgaccgtaacgccgccgccaaaacttaacgcgcctccgctcgcgcccaactaaccgaaacgccactataataacgacccgaccgaccaaactcctcccgaaactaataaaaaccgcgaaaccctacccgaatcgtaactaaaccgcgacccgaacgtacctaaccgaaccaaaatcgaccttcgccgccgcgaaattctcctttcctcgaaacgcgaaa

SEQ ID NO: 36395 - DNA, 850 bp, Artificial Sequence
  chemically treated genomic DNA (Homo sapiens) CpG-island No: 36395
attagcgggagttttaagtttttattcgttggggaggcggcgggtatatttcgagttttgggttgggcggtttcgtttttttcgatcgtaggtttagttggagtttagcgttttttggaagggttcgatttttcggcgtattcgttttatttttttgggcgttttcgagttcgtagttatttatttcgcgttggtcggttttagatcgcgattttcggttacgttcggagttaggtttgcggttgcgagtttgcgggaggggcggggcgggggcggtttttagcggcggcgttggcgtttagttcgcggcgcgaggacggtcggtcggtagggggaggcgggggggcgtcgggtagtttcgttttttttcgcggaggcgtcgagcggttatattgcggagttgtttgcggtggcggcggcgtttttcgtttttcgcggtttagcgttcgtattatcgtttttttttttttgtcgtagtcgcgtcgtcgcgtagcgttttagttatacgtcggcgggtagaagtcgttcgtttttcgggtaaggcgcggcgttttttttttttttatttttcgttttcggttttttcggagacgttaaggtggcggcgcgaagttgcggggttcgtgttgttcggtcgtggcgtcgtcgttagggtttggcgcgttttcgttcgcgtttagttggtcgaggcgttattgtggtaacggttcggtcggttaggtttttttcggggttggtaggggtcgcgaggttttgttcgagtcgtggttgagtcgcggttcgaacgtgtttggtcgggttaaagtcgattttcgtcgtcgcgggattttttttttttcggggcgcggag

SEQ ID NO: 36396 - DNA, 850 bp, Artificial Sequence
  chemically treated genomic DNA (Homo sapiens) CpG-island No: 36396
ctccgcgccccgaaaaaaaaaaaatcccgcgacgacgaaaatcgactttaacccgaccaaacacgttcgaaccgcgactcaaccacgactcgaacaaaacctcgcgacccctaccaaccccgaaaaaaacctaaccgaccgaaccgttaccacaataacgcctcgaccaactaaacgcgaacgaaaacgcgccaaaccctaacgacgacgccacgaccgaacaacacgaaccccgcaacttcgcgccgccaccttaacgtctccgaaaaaaccgaaaacgaaaaataaaaaaaaaaaaaacgccgcgccttacccgaaaaacgaacgacttctacccgccgacgtataactaaaacgctacgcgacgacgcgactacgacaaaaaaaaaaaaacgataatacgaacgctaaaccgcgaaaaacgaaaaacgccgccgccaccgcaaacaactccgcaatataaccgctcgacgcctccgcgaaaaaaaacgaaactacccgacgcccccccgcctccccctaccgaccgaccgtcctcgcgccgcgaactaaacgccaacgccgccgctaaaaaccgcccccgccccgcccctcccgcaaactcgcaaccgcaaacctaactccgaacgtaaccgaaaatcgcgatctaaaaccgaccaacgcgaaataaataactacgaactcgaaaacgcccaaaaaaataaaacgaatacgccgaaaaatcgaacccttccaaaaaacgctaaactccaactaaacctacgatcgaaaaaaacgaaaccgcccaacccaaaactcgaaatatacccgccgcctccccaacgaataaaaacttaaaactcccgctaat

SEQ ID NO: 36397 - DNA, 682 bp, Artificial Sequence
  chemically treated genomic DNA (Homo sapiens) CpG-island No: 36397
gtgtgtgtgtgaatgtgattattttaggatttttcgggtttcggagacgttatttttttttttgatatttttttttataaatcggtggcgcggcggaggcggtagagtcgggcgggaagcgcggggtcggtcggggcgttcgtcgttcgtcgtcgttttcgcgcgttcgggggtttcggcgtttttcgagttagggcggttagttcgcggttcgtcgtttgatagatgtttatcgttatggagttgtcgtagtagtatttttgggggttcgggcgagcgacgggagtcgggatttgagcgagcgtcggggttagcggagtcggagtcgtcgggatatgggtgagtacgcgcggcgattttggttcgggagttcgggcgtttagttttttttcgcgtcgcgggttttcgtattttcggaatcgggggcgacgtgtgtgttttgtatgtaaaagtttacgtcgttttgttgggtttttgattttgtattcggcgggaagggggagatcgggtcgagggggcgggatgtcggttcgggcgaggttgtaggagatgggcgcgatttcggcgggtcggcgggtgggcggcgatgttggtttaattggagtggttcgttggtggcggcgatggtggaagttttgggttggagggttgggagtttattgagtttcgtttaatttgattt

SEQ ID NO: 36398 - DNA, 682 bp, Artificial Sequence
  chemically treated genomic DNA (Homo sapiens) CpG-island No: 36398
aaatcaaattaaacgaaactcaataaactcccaaccctccaacccaaaacttccaccatcgccgccaccaacgaaccactccaattaaaccaacatcgccgcccacccgccgacccgccgaaatcgcgcccatctcctacaacctcgcccgaaccgacatcccgccccctcgacccgatctcccccttcccgccgaatacaaaatcaaaaacccaacaaaacgacgtaaacttttacatacaaaacacacacgtcgcccccgattccgaaaatacgaaaacccgcgacgcgaaaaaaaactaaacgcccgaactcccgaaccaaaatcgccgcgcgtactcacccatatcccgacgactccgactccgctaaccccgacgctcgctcaaatcccgactcccgtcgctcgcccgaacccccaaaaatactactacgacaactccataacgataaacatctatcaaacgacgaaccgcgaactaaccgccctaactcgaaaaacgccgaaacccccgaacgcgcgaaaacgacgacgaacgacgaacgccccgaccgaccccgcgcttcccgcccgactctaccgcctccgccgcgccaccgatttataaaaaaaaatatcaaaaaaaaaaataacgtctccgaaacccgaaaaatcctaaaataatcacattcacacacacac

SEQ ID NO: 36399 - DNA, 682 bp, Artificial Sequence
  chemically treated genomic DNA (Homo sapiens) CpG-island No: 36399
agattagattaggcgaaatttaataagtttttagttttttagtttaaagtttttattatcgtcgttattaacgagttattttaattgagttagtatcgtcgtttattcgtcggttcgtcggaatcgcgtttattttttgtaatttcgttcggatcggtatttcgttttttcggttcggttttttttttttcgtcgggtgtaaagttaaagatttagtaaggcgacgtgaatttttgtatgtagggtatatacgtcgttttcggtttcgggagtgcgggggttcgcggcgcggagggaggttgggcgttcgggttttcgggttaaggtcgtcgcgcgtgtttatttatgtttcggcggtttcggtttcgttggtttcggcgttcgtttagatttcggttttcgtcgttcgttcgagtttttaaaggtgttgttgcggtaattttatggcgatgagtatttgttaaacggcgagtcgcgagttggtcgttttagttcggggggcgtcggggttttcgggcgcgcggaggcggcggcgagcggcgggcgtttcggtcggtttcgcgtttttcgttcgattttgtcgttttcgtcgcgttatcgatttatggagagagatattaagggggaaaatggcgttttcggagttcgaggagttttggagtaattatatttatatatatat

SEQ ID NO: 36400 - DNA, 682 bp, Artificial Sequence
  chemically treated genomic DNA (Homo sapiens) CpG-island No: 36400
atatatatataaatataattactccaaaactcctcgaactccgaaaacgccattttcccccttaatatctctctccataaatcgataacgcgacgaaaacgacaaaatcgaacgaaaaacgcgaaaccgaccgaaacgcccgccgctcgccgccgcctccgcgcgcccgaaaaccccgacgccccccgaactaaaacgaccaactcgcgactcgccgtttaacaaatactcatcgccataaaattaccgcaacaacacctttaaaaactcgaacgaacgacgaaaaccgaaatctaaacgaacgccgaaaccaacgaaaccgaaaccgccgaaacataaataaacacgcgcgacgaccttaacccgaaaacccgaacgcccaacctccctccgcgccgcgaacccccgcactcccgaaaccgaaaacgacgtatataccctacatacaaaaattcacgtcgccttactaaatctttaactttacacccgacgaaaaaaaaaaaaccgaaccgaaaaaacgaaataccgatccgaacgaaattacaaaaaataaacgcgattccgacgaaccgacgaataaacgacgatactaactcaattaaaataactcgttaataacgacgataataaaaactttaaactaaaaaactaaaaacttattaaatttcgcctaatctaatct

SEQ ID NO: 36401 - DNA, 952 bp, Artificial Sequence
  chemically treated genomic DNA (Homo sapiens) CpG-island No: 36401
tgtcgtcggtttttatttaggtcgaggtggttcggttttatgtatcgcgacgtaacgcggggaggtagataaggtatagggcggcgtttataatttatgttaattcgttttatgtgttcgtcgaggcggtataaatcgtcgtgacgattagcggtttaatgatcgaagttaggttggtaagagtcgcgagcgatttttgaagttgtttttgatggtcgttatttatttgtttggatagtatggtttgtaacgcgggtatttcgatgtcgtcggaagcgagaagaattataatggggaaggttatttagtttcgcgtcgcgaacgttagtaagacgtagtttagcgcgtcggtcgttatgtcggcgataatggtttgtttttcgtcgaaacgtttggtggcgggattagtgacgaaggtttgagcgagggcgtgtaagatttcgaatatcgtaagcgataggtcgattatcgtcgcgttttagcgaaagcggttttcgtcgaaaatgatttagagcgttgtcggtatttgttttacgagttgtatgataaagaagatagttataagtgcggcgacgatagttatgtttcgcgtttatcggaaggagttgattgggttgaaggtttttaagggtatcggtcgacgtttttttttatgcgatttttgtattaggaagtagtttagtagtaggttgaggtcgttgagtatcgtcgtcgtaaggaatggtgtatgtaaggagatggcgtttaatagtttttcggttacggggtttgttattatatttacgtcgaaataagcgtttatgagttcgaagtggcgagttcgattttttttatcggtgatgtcggcgatataggcgttagtaatcgtatttgtggcgtcggtgatgtcggttacgatgcgttcggcgtagaggattaattaatagaaataatttgttttaaagaataaaga

SEQ ID NO: 36402 - DNA, 952 bp, Artificial Sequence
  chemically treated genomic DNA (Homo sapiens) CpG-island No: 36402
tctttattctttaaaacaaattatttctattaattaatcctctacgccgaacgcatcgtaaccgacatcaccgacgccacaaatacgattactaacgcctatatcgccgacatcaccgataaaaaaaatcgaactcgccacttcgaactcataaacgcttatttcgacgtaaatataataacaaaccccgtaaccgaaaaactattaaacgccatctccttacatacaccattccttacgacgacgatactcaacgacctcaacctactactaaactacttcctaatacaaaaatcgcataaaaaaaaacgtcgaccgatacccttaaaaaccttcaacccaatcaactccttccgataaacgcgaaacataactatcgtcgccgcacttataactatcttctttatcatacaactcgtaaaacaaataccgacaacgctctaaatcattttcgacgaaaaccgctttcgctaaaacgcgacgataatcgacctatcgcttacgatattcgaaatcttacacgccctcgctcaaaccttcgtcactaatcccgccaccaaacgtttcgacgaaaaacaaaccattatcgccgacataacgaccgacgcgctaaactacgtcttactaacgttcgcgacgcgaaactaaataaccttccccattataattcttctcgcttccgacgacatcgaaatacccgcgttacaaaccatactatccaaacaaataaataacgaccatcaaaaacaacttcaaaaatcgctcgcgactcttaccaacctaacttcgatcattaaaccgctaatcgtcacgacgatttataccgcctcgacgaacacataaaacgaattaacataaattataaacgccgccctataccttatctacctccccgcgttacgtcgcgatacataaaaccgaaccacctcgacctaaataaaaaccgacgaca

SEQ ID NO: 36403 - DNA, 952 bp, Artificial Sequence
  chemically treated genomic DNA (Homo sapiens) CpG-island No: 36403
tttttattttttggaatagattatttttattggttgattttttacgtcggacgtatcgtggtcggtattatcggcgttataggtgcggttgttggcgtttatatcgtcgatattatcgatggggaagatcgggttcgttatttcgggtttatgagcgtttgtttcggcgtgggtatggtggtaggtttcgtggtcgggggattgttgggcgttatttttttgtatgtattattttttgcggcggcggtgtttaacggttttaatttattattgggttgttttttaatgtaggagtcgtataagggagagcgtcgatcgatgtttttgagagtttttaatttagttagtttttttcggtgggcgcggggtatgattatcgtcgtcgtatttatgattgttttttttattatgtaattcgtaggataggtgtcggtagcgttttgggttattttcggcgaggatcgttttcgttggagcgcgacgatgatcggtttgtcgtttgcggtattcggaattttgtacgttttcgtttaagttttcgttattggtttcgttattaaacgtttcggcgagaagtaggttattatcgtcggtatggcggtcgacgcgttgggttacgttttgttggcgttcgcgacgcgaggttggatggttttttttattatgatttttttcgttttcggcggtatcgggatgttcgcgttgtaggttatgttgtttaggtaggtagatgacgattattagggatagttttaaggatcgttcgcggtttttattagtttaatttcgattattggatcgttgatcgttacggcgatttatgtcgtttcggcgagtatatggaacgggttggtatggattgtaggcgtcgttttatattttgtttgttttttcgcgttgcgtcgcggtgtatggagtcgggttatttcgatttgaatggaagtcggcggta

SEQ ID NO: 36404 - DNA, 952 bp, Artificial Sequence
  chemically treated genomic DNA (Homo sapiens) CpG-island No: 36404
taccgccgacttccattcaaatcgaaataacccgactccatacaccgcgacgcaacgcgaaaaaacaaacaaaatataaaacgacgcctacaatccataccaacccgttccatatactcgccgaaacgacataaatcgccgtaacgatcaacgatccaataatcgaaattaaactaataaaaaccgcgaacgatccttaaaactatccctaataatcgtcatctacctacctaaacaacataacctacaacgcgaacatcccgataccgccgaaaacgaaaaaaatcataataaaaaaaaccatccaacctcgcgtcgcgaacgccaacaaaacgtaacccaacgcgtcgaccgccataccgacgataataacctacttctcgccgaaacgtttaataacgaaaccaataacgaaaacttaaacgaaaacgtacaaaattccgaataccgcaaacgacaaaccgatcatcgtcgcgctccaacgaaaacgatcctcgccgaaaataacccaaaacgctaccgacacctatcctacgaattacataataaaaaaaacaatcataaatacgacgacgataatcataccccgcgcccaccgaaaaaaactaactaaattaaaaactctcaaaaacatcgatcgacgctctcccttatacgactcctacattaaaaaacaacccaataataaattaaaaccgttaaacaccgccgccgcaaaaaataatacatacaaaaaaataacgcccaacaatcccccgaccacgaaacctaccaccatacccacgccgaaacaaacgctcataaacccgaaataacgaacccgatcttccccatcgataatatcgacgatataaacgccaacaaccgcacctataacgccgataataccgaccacgatacgtccgacgtaaaaaatcaaccaataaaaataatctattccaaaaaataaaaa

SEQ ID NO: 36405 - DNA, 594 bp, Artificial Sequence
  chemically treated genomic DNA (Homo sapiens) CpG-island No: 36405
ttcgttttaatttaggatttttttagttttcgtgtgttttcgtttattttagttttcgtcgcgagttttttttttggttttttggtttggcggcgatcgtcggttagtttatttttcggagttgtattgtgagtgcgtttttgttttttggttttcggcggggagggtttttaggtagggtttgggttcgtttcgtgttttttcgagttttgttcgtttcgagtttttttgttgttcgcggttagaacggaggggtaaagtagttttcggcggtttagggggcggacggtcgtgttcgttttagggtcgcgcgaggtataggcgttgcgttttgcggagtcgttgggagaatttcggggtaggtttcggcgcggtaataagtttgcgttttgtttttttagggtagatacgtcgttattttgtagcgggtttcgggcgggttacgcgtgcggcgataggaatttaatttcggtcgattttgggttttaggaattcgttgtttacgtttgcggaggtgcggtagttttagttttaagcgtaggtatgtttttatttttgagcgggaggaaattatttagttttgagtacgtggtt

SEQ ID NO: 36406 - DNA, 594 bp, Artificial Sequence
  chemically treated genomic DNA (Homo sapiens) CpG-island No: 36406
aaccacgtactcaaaactaaataatttcctcccgctcaaaaataaaaacatacctacgcttaaaactaaaactaccgcacctccgcaaacgtaaacaacgaattcctaaaacccaaaatcgaccgaaattaaattcctatcgccgcacgcgtaacccgcccgaaacccgctacaaaataacgacgtatctaccctaaaaaaacaaaacgcaaacttattaccgcgccgaaacctaccccgaaattctcccaacgactccgcaaaacgcaacgcctatacctcgcgcgaccctaaaacgaacacgaccgtccgccccctaaaccgccgaaaactactttacccctccgttctaaccgcgaacaacaaaaaaactcgaaacgaacaaaactcgaaaaaacacgaaacgaacccaaaccctacctaaaaaccctccccgccgaaaaccaaaaaacaaaaacgcactcacaatacaactccgaaaaataaactaaccgacgatcgccgccaaaccaaaaaaccaaaaaaaaaactcgcgacgaaaactaaaataaacgaaaacacacgaaaactaaaaaaatcctaaattaaaacgaa

SEQ ID NO: 36407 - DNA, 594 bp, Artificial Sequence
  chemically treated genomic DNA (Homo sapiens) CpG-island No: 36407
ggttacgtgtttagggttgggtaattttttttcgtttaagggtaggaatatatttgcgtttaaaattgaggttgtcgtattttcgtagacgtagataacgaatttttggagtttaaggtcggtcggggttgggtttttgtcgtcgtacgcgtggttcgttcgaaattcgttataaagtagcggcgtgtttgttttagggaggtaaagcgtaaatttgttatcgcgtcgggatttgtttcgggatttttttagcggtttcgtaggacgtagcgtttgtgtttcgcgcggttttgggacgggtacggtcgttcgttttttgggtcgtcgagggttgttttattttttcgttttggtcgcgggtagtagaggagttcggggcgggtaaagttcgaggggatacggggcgagtttagattttgtttgggagtttttttcgtcggagattaaagggtagaaacgtatttatagtgtaatttcgagggataaattggtcgacgatcgtcgttaggttagaagattaagaagaaggttcgcggcgggaattgaagtgagcggggatatacgagggttgggaagattttgggttggggcgga

SEQ ID NO: 36408 - DNA, 594 bp, Artificial Sequence
  chemically treated genomic DNA (Homo sapiens) CpG-island No: 36408
tccgccccaacccaaaatcttcccaaccctcgtatatccccgctcacttcaattcccgccgcgaaccttcttcttaatcttctaacctaacgacgatcgtcgaccaatttatccctcgaaattacactataaatacgtttctaccctttaatctccgacgaaaaaaactcccaaacaaaatctaaactcgccccgtatcccctcgaactttacccgccccgaactcctctactacccgcgaccaaaacgaaaaaataaaacaaccctcgacgacccaaaaaacgaacgaccgtacccgtcccaaaaccgcgcgaaacacaaacgctacgtcctacgaaaccgctaaaaaaatcccgaaacaaatcccgacgcgataacaaatttacgctttacctccctaaaacaaacacgccgctactttataacgaatttcgaacgaaccacgcgtacgacgacaaaaacccaaccccgaccgaccttaaactccaaaaattcgttatctacgtctacgaaaatacgacaacctcaattttaaacgcaaatatattcctacccttaaacgaaaaaaaattacccaaccctaaacacgtaacc

SEQ ID NO: 36409 - DNA, 824 bp, Artificial Sequence
  chemically treated genomic DNA (Homo sapiens) CpG-island No: 36409
ttcgcgcgtagatatggtttattttcgtgttattgtatgagttatatttaggtcggtttcggatatcgatagttaatggtcgggttcgtttcgttttattcgggattggttgtgcgtgtcgcggttttttatttcgtttcgtttaggattttttcgggattggttgagttattcgatttttttaggggatcggttgcgcgtttcgtttttgtttagagttttttcgggattggttgcgggtttcgcgatttttttgttttttttttcgtttcgcgtcgtttttttggtttgtgcgttcgtcgtaggtcgtaggtttttttgttagttggagttgcgcggtgagtgtatttttagttttcggttttcggtttttcgcggggagggcgttcggtcggttcgtgggttcgattaggggttgggttcgttcggtgtttttacgagttttgttcgtttcgagtttttttgttttcggcggttagaacggaggggtagagtagttttcggcggttcggggggcgggcggcggtgttcgtttcggggttgcgcgaggtataggcgtcgcgtttagcggaatagtcggaggttttcggcgtaggtttgggtatcgtaataattttgcgttttgtttttttagggttgacgcgttattatgtagcgggtttcgggcgggttacgcgtgcgggataggaatttaattttagtcgattttgagttttaggagttcgttttttacgtttgcggaagtgtagttgttttagtttttagcgtaggtatgtttttagttttgagcggggtgggggaaggaatgagttagtttggagtat

SEQ ID NO: 36410 - DNA, 824 bp, Artificial Sequence
  chemically treated genomic DNA (Homo sapiens) CpG-island No: 36410
atactccaaactaactcattccttcccccaccccgctcaaaactaaaaacatacctacgctaaaaactaaaacaactacacttccgcaaacgtaaaaaacgaactcctaaaactcaaaatcgactaaaattaaattcctatcccgcacgcgtaacccgcccgaaacccgctacataataacgcgtcaaccctaaaaaaacaaaacgcaaaattattacgatacccaaacctacgccgaaaacctccgactattccgctaaacgcgacgcctatacctcgcgcaaccccgaaacgaacaccgccgcccgccccccgaaccgccgaaaactactctacccctccgttctaaccgccgaaaacaaaaaaactcgaaacgaacaaaactcgtaaaaacaccgaacgaacccaacccctaatcgaacccacgaaccgaccgaacgccctccccgcgaaaaaccgaaaaccgaaaactaaaaatacactcaccgcgcaactccaactaacaaaaaaacctacgacctacgacgaacgcacaaaccaaaaaaacgacgcgaaacgaaaaaaaaaacaaaaaaatcgcgaaacccgcaaccaatcccgaaaaaactctaaacaaaaacgaaacgcgcaaccgatcccctaaaaaaatcgaataactcaaccaatcccgaaaaaatcctaaacgaaacgaaataaaaaaccgcgacacgcacaaccaatcccgaataaaacgaaacgaacccgaccattaactatcgatatccgaaaccgacctaaatataactcatacaataacacgaaaataaaccatatctacgcgcgaa

SEQ ID NO: 36411 - DNA, 824 bp, Artificial Sequence
  chemically treated genomic DNA (Homo sapiens) CpG-island No: 36411
gtgttttaggttgatttatttttttttttatttcgtttaaggttaggaatatatttgcgttaagaattgaggtagttgtattttcgtagacgtaagagacgaatttttggagtttaaggtcggttggggttgggtttttgtttcgtacgcgtggttcgttcgaaattcgttatatagtggcgcgttagttttggggaagtaaagcgtaaaattgttacggtgtttagatttgcgtcgggaattttcggttgtttcgttgggcgcggcgtttgtgtttcgcgtagtttcgggacgggtatcgtcgttcgtttttcgggtcgtcgagggttgttttattttttcgttttggtcgtcgggagtagaggagttcgaggcgggtaaagttcgtggggatatcgggcgagtttagtttttgatcggatttacgggtcggtcgggcgtttttttcgcgggagatcgaaagtcgaagattggagatgtatttatcgcgtaattttagttgataaagaggtttgcgatttgcgacgggcgtataaattagagaggcggcgcggggcggggagggaagtaggagggtcgcgaggttcgtagttaatttcgggaagattttgggtaagggcggggcgcgtagtcgattttttggagaggtcgggtagtttagttaatttcgggaagattttgagcggggcggggtggagggtcgcggtacgtatagttaatttcggatggggcgggacgggttcggttattggttgtcggtgttcggggtcggtttaggtgtggtttatgtagtagtacggggataagttatgtttgcgcgcgga

SEQ ID NO: 36412 - DNA, 824 bp, Artificial Sequence
  chemically treated genomic DNA (Homo sapiens) CpG-island No: 36412
tccgcgcgcaaacataacttatccccgtactactacataaaccacacctaaaccgaccccgaacaccgacaaccaataaccgaacccgtcccgccccatccgaaattaactatacgtaccgcgaccctccaccccgccccgctcaaaatcttcccgaaattaactaaactacccgacctctccaaaaaatcgactacgcgccccgcccttacccaaaatcttcccgaaattaactacgaacctcgcgaccctcctacttccctccccgccccgcgccgcctctctaatttatacgcccgtcgcaaatcgcaaacctctttatcaactaaaattacgcgataaatacatctccaatcttcgactttcgatctcccgcgaaaaaaacgcccgaccgacccgtaaatccgatcaaaaactaaactcgcccgatatccccacgaactttacccgcctcgaactcctctactcccgacgaccaaaacgaaaaaataaaacaaccctcgacgacccgaaaaacgaacgacgatacccgtcccgaaactacgcgaaacacaaacgccgcgcccaacgaaacaaccgaaaattcccgacgcaaatctaaacaccgtaacaattttacgctttacttccccaaaactaacgcgccactatataacgaatttcgaacgaaccacgcgtacgaaacaaaaacccaaccccaaccgaccttaaactccaaaaattcgtctcttacgtctacgaaaatacaactacctcaattcttaacgcaaatatattcctaaccttaaacgaaataaaaaaaaaaataaatcaacctaaaacac

SEQ ID NO: 36413 - DNA, 641 bp, Artificial Sequence
  chemically treated genomic DNA (Homo sapiens) CpG-island No: 36413
tcggtcggtgatatttaagaggcgattttttcgttttttcgtttttggagggtgggcggtcgggggtgggggttatagtggttagcgttttcggagggcgtcggtttttaggtgcgggtggggttgcgtttcgtcgggttcggagaatttttattgggcgttcgcggcgcgtagataatgggtcggggaagcgttttatcgcggcgcgtaggtttttttcgagcgcggcgggaggcggcggcgttttcgcgggttagggtcgttagtttttcgtttttcggtcgttcgtcgttttttggttaggtttcgtcgtcgtcgttcgttgttttttttcgttttttttttttgcgatttcgcggttttttggcgaggcgcggtcggcggaaaagtttggtggggtggtcgcggtagcgatacgcgcggtcggtttcgggaaaataaaggggggatgtgtgtggtttagagttcggaaatggggcgtcggtgggggtcggggcggcgtagttttgttttttggagtttattgtttgtcgggtgtatatgtatacgcgtttaataagaaattaatatattttgtcgtcgtttatttatttatcgatggttaaatagacggcgtagttattttgtacggagagggtttt

SEQ ID NO: 36414 - DNA, 641 bp, Artificial Sequence
  chemically treated genomic DNA (Homo sapiens) CpG-island No: 36414
aaaaccctctccgtacaaaataactacgccgtctatttaaccatcgataaataaataaacgacgacaaaatatattaatttcttattaaacgcgtatacatatacacccgacaaacaataaactccaaaaaacaaaactacgccgccccgacccccaccgacgccccatttccgaactctaaaccacacacatcccccctttattttcccgaaaccgaccgcgcgtatcgctaccgcgaccaccccaccaaacttttccgccgaccgcgcctcgccaaaaaaccgcgaaatcgcaaaaaaaaaaaacgaaaaaaaacaacgaacgacgacgacgaaacctaaccaaaaaacgacgaacgaccgaaaaacgaaaaactaacgaccctaacccgcgaaaacgccgccgcctcccgccgcgctcgaaaaaaacctacgcgccgcgataaaacgcttccccgacccattatctacgcgccgcgaacgcccaataaaaattctccgaacccgacgaaacgcaaccccacccgcacctaaaaaccgacgccctccgaaaacgctaaccactataacccccacccccgaccgcccaccctccaaaaacgaaaaaacgaaaaaatcgcctcttaaatatcaccgaccga

SEQ ID NO: 36415 - DNA, 641 bp, Artificial Sequence
  chemically treated genomic DNA (Homo sapiens) CpG-island No: 36415
aaagtttttttcgtgtaaagtgattgcgtcgtttgtttggttatcgatggatagataagcggcggtaggatgtgttaattttttgttaagcgcgtgtgtatgtgtattcggtaaataataggttttaggaggtagagttgcgtcgtttcggtttttatcggcgttttattttcggattttgggttatatatattttttttttgttttttcggggtcggtcgcgcgtgtcgttgtcgcggttattttattaagttttttcgtcggtcgcgtttcgttaggaggtcgcgaggtcgtagggaggaagagcgggaggaagtagcgggcggcggcggcggggtttggttagggggcggcgggcgatcgggggacgggggattggcggttttggttcgcggaagcgtcgtcgtttttcgtcgcgttcggggaaggtttgcgcgtcgcgataaggcgttttttcggtttattgtttgcgcgtcgcggacgtttagtgaaagtttttcgggttcggcggggcgtagttttattcgtatttggaagtcggcgtttttcggggacgttggttattgtgatttttattttcggtcgtttattttttaaaagcggaagggcggaggggtcgttttttgggtgttatcggtcgg

SEQ ID NO: 36416 - DNA, 641 bp, Artificial Sequence
  chemically treated genomic DNA (Homo sapiens) CpG-island No: 36416
ccgaccgataacacccaaaaaacgacccctccgcccttccgcttttaaaaaataaacgaccgaaaataaaaatcacaataaccaacgtccccgaaaaacgccgacttccaaatacgaataaaactacgccccgccgaacccgaaaaactttcactaaacgtccgcgacgcgcaaacaataaaccgaaaaaacgccttatcgcgacgcgcaaaccttccccgaacgcgacgaaaaacgacgacgcttccgcgaaccaaaaccgccaatcccccgtcccccgatcgcccgccgccccctaaccaaaccccgccgccgccgcccgctacttcctcccgctcttcctccctacgacctcgcgacctcctaacgaaacgcgaccgacgaaaaaacttaataaaataaccgcgacaacgacacgcgcgaccgaccccgaaaaaacaaaaaaaaaatatatataacccaaaatccgaaaataaaacgccgataaaaaccgaaacgacgcaactctacctcctaaaacctattatttaccgaatacacatacacacgcgcttaacaaaaaattaacacatcctaccgccgcttatctatccatcgataaccaaacaaacgacgcaatcactttacacgaaaaaaacttt

SEQ ID NO: 36417 - DNA, 541 bp, Artificial Sequence
  chemically treated genomic DNA (Homo sapiens) CpG-island No: 36417
cgtcgatcgtcgtttttatagtttcggtttcggttgttggatgagaattagcgtggttcgtttaagggggaggggataggcgttgtaaggagtagagtcgcgggaagtaattttttaagttataatgttagtcgcgaatataggaaaaagtttatttcgtcgtcgcgggttttatgttttcgtcggtaatgattatgtttgtgggagtaacggttatcggcgcgcggttttttgggagttgtttgtttcggcgggtacgttcgtcggttatcggaaggattttattggtcggtgcgtgtaggtgagtttggcggttttaaggttggcgcggaggttttattgttagtcgggtgcggtcggagcgtaggattaggttagagtcgttttaagtgatttgggcgtgtcggagaaacgagtagggtttgcgggggttttttatgcggcgaggtcgagtaagggtaggggtttgatgggatcgagattttttcggttttagggacggggaaggtcggtttagttaggttttttttgtaggagcgtt

SEQ ID NO: 36418 - DNA, 541 bp, Artificial Sequence
  chemically treated genomic DNA (Homo sapiens) CpG-island No: 36418
aacgctcctacaaaaaaaacctaactaaaccgaccttccccgtccctaaaaccgaaaaaatctcgatcccatcaaacccctacccttactcgacctcgccgcataaaaaacccccgcaaaccctactcgtttctccgacacgcccaaatcacttaaaacgactctaacctaatcctacgctccgaccgcacccgactaacaataaaacctccgcgccaaccttaaaaccgccaaactcacctacacgcaccgaccaataaaatccttccgataaccgacgaacgtacccgccgaaacaaacaactcccaaaaaaccgcgcgccgataaccgttactcccacaaacataatcattaccgacgaaaacataaaacccgcgacgacgaaataaactttttcctatattcgcgactaacattataacttaaaaaattacttcccgcgactctactccttacaacgcctatcccctcccccttaaacgaaccacgctaattctcatccaacaaccgaaaccgaaactataaaaacgacgatcgacg

SEQ ID NO: 36419 - DNA, 541 bp, Artificial Sequence
  chemically treated genomic DNA (Homo sapiens) CpG-island No: 36419
ggcgtttttgtaggggaaatttgattggatcggtttttttcgtttttgaggtcggagagatttcgattttattaggtttttgtttttgttcggtttcgtcgtatgagggattttcgtaggttttgttcgttttttcggtacgtttagattatttggggcggttttggtttggttttgcgtttcggtcgtattcggttaatagtgaaattttcgcgttaattttgaggtcgttagatttatttgtacgtatcggttaatggggttttttcggtggtcggcggacgtgttcgtcggaataaataatttttagaaggtcgcgcgtcggtagtcgttgtttttataggtatagttattgtcggcgggagtatggggttcgcggcggcgggatgagtttttttttgtgttcgcgattagtattgtggtttagggagttgtttttcgcggttttgttttttgtagcgtttgtttttttttttttaaacgggttacgttggtttttatttagtaatcgaagtcgagattgtggaggcggcggtcggcg

SEQ ID NO: 36420 - DNA, 541 bp, Artificial Sequence
  chemically treated genomic DNA (Homo sapiens) CpG-island No: 36420
cgccgaccgccgcctccacaatctcgacttcgattactaaataaaaaccaacgtaacccgtttaaaaaaaaaaaaacaaacgctacaaaaaacaaaaccgcgaaaaacaactccctaaaccacaatactaatcgcgaacacaaaaaaaaactcatcccgccgccgcgaaccccatactcccgccgacaataactatacctataaaaacaacgactaccgacgcgcgaccttctaaaaattatttattccgacgaacacgtccgccgaccaccgaaaaaaccccattaaccgatacgtacaaataaatctaacgacctcaaaattaacgcgaaaatttcactattaaccgaatacgaccgaaacgcaaaaccaaaccaaaaccgccccaaataatctaaacgtaccgaaaaaacgaacaaaacctacgaaaatccctcatacgacgaaaccgaacaaaaacaaaaacctaataaaatcgaaatctctccgacctcaaaaacgaaaaaaaccgatccaatcaaatttcccctacaaaaacgcc

SEQ ID NO: 36421 - DNA, 522 bp, Artificial Sequence
  chemically treated genomic DNA (Homo sapiens) CpG-island No: 36421
gatcgtcgagggatatcgacgagtattttttttttgttgttcggtttcgttgtcgtttttaatcggttagttaagatggtcgtcgttgggtgaggtaagtggcgttcgcgggggcgtttgggagttgtagttcgggacggcggttgacgtattttttcgtcggtcgacgggcgttattgtagcgcgcgcgtcgggtgagtgtcgcgcgaaatttgcgttcgtcggggattgcgttgggcgggtttagaatcgttagttgggggcgagcgcggtttttgtatttttcgtcgagttcgggtattttgagtcggtcgtgtttgtagttttttcgtcgttttgtgggatgggtcggtgattcggaatttcgaggggagatagtgttttcggggcgtcgcggtggagagaatagatcgtttcggaagcgtggggtttgggttagggaggcgatttttttcgatgcgcgggatagaggaggttcggtgttttttcggggaggggaaaattggttttatttagttttgt

SEQ ID NO: 36422 - DNA, 522 bp, Artificial Sequence
  chemically treated genomic DNA (Homo sapiens) CpG-island No: 36422
acaaaactaaataaaaccaattttcccctccccgaaaaaacaccgaacctcctctatcccgcgcatcgaaaaaaatcgcctccctaacccaaaccccacgcttccgaaacgatctattctctccaccgcgacgccccgaaaacactatctcccctcgaaattccgaatcaccgacccatcccacaaaacgacgaaaaaactacaaacacgaccgactcaaaatacccgaactcgacgaaaaatacaaaaaccgcgctcgcccccaactaacgattctaaacccgcccaacgcaatccccgacgaacgcaaatttcgcgcgacactcacccgacgcgcgcgctacaataacgcccgtcgaccgacgaaaaaatacgtcaaccgccgtcccgaactacaactcccaaacgcccccgcgaacgccacttacctcacccaacgacgaccatcttaactaaccgattaaaaacgacaacgaaaccgaacaacaaaaaaaaaatactcgtcgatatccctcgacgatc

SEQ ID NO: 36423 - DNA, 522 bp, Artificial Sequence
  chemically treated genomic DNA (Homo sapiens) CpG-island No: 36423
ataggattggataggattagttttttttttttcgagaagatatcgagttttttttgtttcgcgtatcggaggggatcgtttttttggtttagattttacgttttcggagcgatttgttttttttatcgcggcgtttcgaaagtattgttttttttcggggtttcgggttatcgatttattttatagagcggcgggaggattgtaggtacggtcggtttagggtattcgagttcggcggaaaatgtagaggtcgcgttcgtttttaattaacggttttggattcgtttagcgtagttttcgacggacgtaggtttcgcgcggtatttattcggcgcgcgcgttataatggcgttcgtcggtcggcggggaagtgcgttagtcgtcgtttcgaattataatttttagacgttttcgcgggcgttatttgttttatttagcggcggttattttgattggtcggttaggggcggtagcgaagtcggatagtaggaggaggatattcgtcgatgtttttcggcggtt

SEQ ID NO: 36424 - DNA, 522 bp, Artificial Sequence
  chemically treated genomic DNA (Homo sapiens) CpG-island No: 36424
aaccgccgaaaaacatcgacgaatatcctcctcctactatccgacttcgctaccgcccctaaccgaccaatcaaaataaccgccgctaaataaaacaaataacgcccgcgaaaacgtctaaaaattataattcgaaacgacgactaacgcacttccccgccgaccgacgaacgccattataacgcgcgcgccgaataaataccgcgcgaaacctacgtccgtcgaaaactacgctaaacgaatccaaaaccgttaattaaaaacgaacgcgacctctacattttccgccgaactcgaataccctaaaccgaccgtacctacaatcctcccgccgctctataaaataaatcgataacccgaaaccccgaaaaaaaacaatactttcgaaacgccgcgataaaaaaaacaaatcgctccgaaaacgtaaaatctaaaccaaaaaaacgatcccctccgatacgcgaaacaaaaaaaactcgatatcttctcgaaaaaaaaaaaactaatcctatccaatcctat

SEQ ID NO: 36425 - DNA, 612 bp, Artificial Sequence
  chemically treated genomic DNA (Homo sapiens) CpG-island No: 36425
tttttattcgttttttttttttcgtacgtatttattcgtattaaggatatagagttttcgatttaatttgaaagggaagtagttttcgtttttgaaagagtagcgagggagggcgagcgaacgaacgtttcggattttattcgcgtttcggtttagattcgcgtttcggtttagattcgaattcgcggaagcgttttcgttgatgttttcgttcggattgttggagtcggggtcgtttcgggtttttttttttgtacgtagttttagggttacggttaggagcgagggcgaggggttttaggtttcggttcgcgtcgtttaggtttcgggaggcgagttttgtagcggtcggatttagggataaattttttcggcgggcgtcgtttatcgtgtgcgtagagtagggcgttaagtagtagcgcgttttattgtcgttttatggtgtcgttcgcgtcgttcgttcggggtttcgtcggttttcgtcggacggcgcggcggataagttcgcggagggttttcgagggggaagcgtttcgggtgtacggcggtttgcgcgtttcgtaagtcgttttcgggtcgtcgtcgtttttagtgttgttagagtcgacgttg

SEQ ID NO: 36426 - DNA, 612 bp, Artificial Sequence
  chemically treated genomic DNA (Homo sapiens) CpG-island No: 36426
caacgtcgactctaacaacactaaaaacgacgacgacccgaaaacgacttacgaaacgcgcaaaccgccgtacacccgaaacgcttccccctcgaaaaccctccgcgaacttatccgccgcgccgtccgacgaaaaccgacgaaaccccgaacgaacgacgcgaacgacaccataaaacgacaataaaacgcgctactacttaacgccctactctacgcacacgataaacgacgcccgccgaaaaaatttatccctaaatccgaccgctacaaaactcgcctcccgaaacctaaacgacgcgaaccgaaacctaaaacccctcgccctcgctcctaaccgtaaccctaaaactacgtacaaaaaaaaaaacccgaaacgaccccgactccaacaatccgaacgaaaacatcaacgaaaacgcttccgcgaattcgaatctaaaccgaaacgcgaatctaaaccgaaacgcgaataaaatccgaaacgttcgttcgctcgccctccctcgctactctttcaaaaacgaaaactacttccctttcaaattaaatcgaaaactctatatccttaatacgaataaatacgtacgaaaaaaaaaaaacgaataaaaa

SEQ ID NO: 36427 - DNA, 612 bp, Artificial Sequence
  chemically treated genomic DNA (Homo sapiens) CpG-island No: 36427
tagcgtcggttttggtagtattggaggcggcggcggttcgagggcgatttgcggggcgcgtaggtcgtcgtgtattcgggacgtttttttttcggggatttttcgcgggtttattcgtcgcgtcgttcggcgggagtcggcgggatttcgggcgagcggcgcgggcggtattatgaggcggtagtggggcgcgttgttgtttggcgttttgttttgcgtatacggtaagcggcgttcgtcgggaaagtttgtttttgggttcggtcgttgtaggattcgtttttcgggatttggacggcgcgggtcggggtttgagatttttcgttttcgtttttagtcgtggttttggggttgcgtgtaggggagaggattcggagcggtttcggttttagtagttcgagcgggggtattagcggaggcgttttcgcgggttcgggtttgggtcggggcgcgggtttgggtcggggcgcgggtaaggttcggggcgttcgttcgttcgttttttttcgttgtttttttaagagcgggggttgttttttttttaggttaggtcgggggttttgtgtttttggtgcgaatgaatgcgtgcgaagaaagggaggcgggtgagga

SEQ ID NO: 36428 - DNA, 612 bp, Artificial Sequence
  chemically treated genomic DNA (Homo sapiens) CpG-island No: 36428
tcctcacccgcctccctttcttcgcacgcattcattcgcaccaaaaacacaaaacccccgacctaacctaaaaaaaaaacaacccccgctcttaaaaaaacaacgaaaaaaaacgaacgaacgaacgccccgaaccttacccgcgccccgacccaaacccgcgccccgacccaaacccgaacccgcgaaaacgcctccgctaatacccccgctcgaactactaaaaccgaaaccgctccgaatcctctcccctacacgcaaccccaaaaccacgactaaaaacgaaaacgaaaaatctcaaaccccgacccgcgccgtccaaatcccgaaaaacgaatcctacaacgaccgaacccaaaaacaaactttcccgacgaacgccgcttaccgtatacgcaaaacaaaacgccaaacaacaacgcgccccactaccgcctcataataccgcccgcgccgctcgcccgaaatcccgccgactcccgccgaacgacgcgacgaataaacccgcgaaaaatccccgaaaaaaaaacgtcccgaatacacgacgacctacgcgccccgcaaatcgccctcgaaccgccgccgcctccaatactaccaaaaccgacgcta

SEQ ID NO: 36429 - DNA, 731 bp, Artificial Sequence
  chemically treated genomic DNA (Homo sapiens) CpG-island No: 36429
gtttatttatttatttatttgataattacgcgagaggtattttagtagggtcggttttcggggttttcgttttagttttggtaaatcgttgtcgttaggcgcggttttgtatcgttcgcgtttcgcggacgttgttattcgcgttacgttgcggcgcgttttggttatttggagtttaatttcggttttcgtcgtatacgagcgtttacgttttcggttttgttcgtcgtaggtttttcggttttcggttcgtttcgtcgttttagatttgtcgggttcgtggggtaagtggggcgcgcgtttggagatttttagtcgtttaggatttaggggtttttttgcgcgcgcgatgtttgtattcgagggtttcgcgggtggggtaggtttatcgattatttattttagttgggttagaattaagcggtttgttttaagtcgtttgaaatcgtttgggtcgtcgtatatttcgtagtgttttcgttttttattggttttcgacggatcgtttatcggatttttattggtttatttgaaaggtttgtgggtacgcgtcgttcgtagttttaaaggggtcgcgcgtagtcgtgtttttttttggattagacgtcgtttgtacgggtggggacgttggtcgttgtcgggggtaagtttgtcgattttagaaagaaaggcgaaagaatgtgtgtagattcgggtatttttggtcgttagtatgtttgttttatttaatt

SEQ ID NO: 36430 - DNA, 731 bp, Artificial Sequence
  chemically treated genomic DNA (Homo sapiens) CpG-island No: 36430
aattaaataaaacaaacatactaacgaccaaaaatacccgaatctacacacattctttcgcctttctttctaaaatcgacaaacttacccccgacaacgaccaacgtccccacccgtacaaacgacgtctaatccaaaaaaaaacacgactacgcgcgacccctttaaaactacgaacgacgcgtacccacaaacctttcaaataaaccaataaaaatccgataaacgatccgtcgaaaaccaataaaaaacgaaaacactacgaaatatacgacgacccaaacgatttcaaacgacttaaaacaaaccgcttaattctaacccaactaaaataaataatcgataaacctaccccacccgcgaaaccctcgaatacaaacatcgcgcgcgcaaaaaaacccctaaatcctaaacgactaaaaatctccaaacgcgcgccccacttaccccacgaacccgacaaatctaaaacgacgaaacgaaccgaaaaccgaaaaacctacgacgaacaaaaccgaaaacgtaaacgctcgtatacgacgaaaaccgaaattaaactccaaataaccaaaacgcgccgcaacgtaacgcgaataacaacgtccgcgaaacgcgaacgatacaaaaccgcgcctaacgacaacgatttaccaaaactaaaacgaaaaccccgaaaaccgaccctactaaaatacctctcgcgtaattatcaaataaataaataaataaac

SEQ ID NO: 36431 - DNA, 731 bp, Artificial Sequence
  chemically treated genomic DNA (Homo sapiens) CpG-island No: 36431
aattaaataaagtaaatatgttgacgattaaggatgttcgggtttatatatattttttcgtttttttttttggagtcggtagatttgttttcggtagcgattagcgtttttattcgtgtaggcggcgtttggtttagagggaaatacggttgcgcgcggtttttttaaggttgcgggcggcgcgtgtttataggttttttaaatggattaataaaagttcgatgggcggttcgtcgaggattaataaagaacgaggatattgcggggtgtgcggcggtttaagcggttttaaacggtttagagtaggtcgtttggttttgatttagttgaggtgagtggtcggtgggtttgttttattcgcgaggttttcgagtgtaggtatcgcgcgcgtagaggagtttttgaattttgggcggttggaggtttttagacgcgcgttttatttgttttacgaattcggtaggtttgaggcggcgaagcgagtcggaggtcgggggatttgcggcgggtagggtcgggggcgtgggcgttcgtgtgcggcggaggtcggggttgggttttaggtggttagagcgcgtcgtagcgtggcgcgggtggtagcgttcgcggggcgcgggcggtgtagggtcgcgtttggcggtagcgatttattaagattagggcgggggtttcgagagtcggttttgttagagtgtttttcgcgtaattgttaagtgaatgaataagtaagt

SEQ ID NO: 36432 - DNA, 731 bp, Artificial Sequence
  chemically treated genomic DNA (Homo sapiens) CpG-island No: 36432
acttacttattcattcacttaacaattacgcgaaaaacactctaacaaaaccgactctcgaaacccccgccctaatcttaataaatcgctaccgccaaacgcgaccctacaccgcccgcgccccgcgaacgctaccacccgcgccacgctacgacgcgctctaaccacctaaaacccaaccccgacctccgccgcacacgaacgcccacgcccccgaccctacccgccgcaaatcccccgacctccgactcgcttcgccgcctcaaacctaccgaattcgtaaaacaaataaaacgcgcgtctaaaaacctccaaccgcccaaaattcaaaaactcctctacgcgcgcgatacctacactcgaaaacctcgcgaataaaacaaacccaccgaccactcacctcaactaaatcaaaaccaaacgacctactctaaaccgtttaaaaccgcttaaaccgccgcacaccccgcaatatcctcgttctttattaatcctcgacgaaccgcccatcgaacttttattaatccatttaaaaaacctataaacacgcgccgcccgcaaccttaaaaaaaccgcgcgcaaccgtatttccctctaaaccaaacgccgcctacacgaataaaaacgctaatcgctaccgaaaacaaatctaccgactccaaaaaaaaaaacgaaaaaatatatataaacccgaacatccttaatcgtcaacatatttactttatttaatt

SEQ ID NO: 36433 - DNA, 780 bp, Artificial Sequence
  chemically treated genomic DNA (Homo sapiens) CpG-island No: 36433
tcgcggcggtttcgcgagttcgtcgggtgggtttagtttagcgtacgtcggagtcgagcgtagggggcggggaagggatttgttgtagttgtagtcgtttgggcgtttttggagcgcgcggtgattttttcggtcggttcgttttatgtagtttcgttgcggaagtgtagcggggggaggcggcggttatcgcggtattaagtacgagaggtcggggttcggttttttgtagtattaggttttgggagtcgcgcgcggcgcgttttagtggttcgattcgtcgtgcgttcggcgtttatcgtagtttgtatgtttcgcgttgcgttttgttcggttttcgtagttttttgttcgtatcgttgtagtcgggcgtcggagtaatatgtttattcgagtgaaatttgtcgtggttaattttatgggcggtattatggttggtagtttaggtttcgagtacggcggcggtagttgcggaggttcggatttgtttttgcgttttttttacgggcggttagagtttttggggttgttttaggacgaggtggagtgtagcgtcgattatatcgttcgttttatttttatttttaaggagattcggcggttgttttgggttattggttacgtagagtgagtgtagcgatatcggcggcgtttttgtttttttcgcggttttttttcgtacggttttagttttttttttttttgtttttcggtttagggttttattagttgcggcgtttaggttcggcgggagtttttatttatttggtattttttttt

SEQ ID NO: 36434 - DNA, 780 bp, Artificial Sequence
  chemically treated genomic DNA (Homo sapiens) CpG-island No: 36434
aaaaaaaaataccaaataaataaaaactcccgccgaacctaaacgccgcaactaataaaaccctaaaccgaaaaacaaaaaaaaaaaaaactaaaaccgtacgaaaaaaaaccgcgaaaaaaacaaaaacgccgccgatatcgctacactcactctacgtaaccaataacccaaaacaaccgccgaatctccttaaaaataaaaataaaacgaacgatataatcgacgctacactccacctcgtcctaaaacaaccccaaaaactctaaccgcccgtaaaaaaaacgcaaaaacaaatccgaacctccgcaactaccgccgccgtactcgaaacctaaactaccaaccataataccgcccataaaattaaccacgacaaatttcactcgaataaacatattactccgacgcccgactacaacgatacgaacaaaaaactacgaaaaccgaacaaaacgcaacgcgaaacatacaaactacgataaacgccgaacgcacgacgaatcgaaccactaaaacgcgccgcgcgcgactcccaaaacctaatactacaaaaaaccgaaccccgacctctcgtacttaataccgcgataaccgccgcctccccccgctacacttccgcaacgaaactacataaaacgaaccgaccgaaaaaatcaccgcgcgctccaaaaacgcccaaacgactacaactacaacaaatcccttccccgccccctacgctcgactccgacgtacgctaaactaaacccacccgacgaactcgcgaaaccgccgcga

SEQ ID NO: 36435 - DNA, 780 bp, Artificial Sequence
  chemically treated genomic DNA (Homo sapiens) CpG-island No: 36435
aaaaggaaatgttaggtaagtaagagttttcgtcgagtttggacgtcgtagttagtggagttttgggtcgagaagtaggagagaagagggttggaatcgtgcggggaagggtcgcgaggagagtaggggcgtcgtcggtgtcgttgtatttattttgcgtagttagtggtttagggtagtcgtcgagtttttttgaggatgaggatggggcgggcgatgtggtcggcgttgtattttatttcgttttgagatagttttaggaattttggtcgttcgtaggggaaacgtaggggtaggttcgagttttcgtagttgtcgtcgtcgtgttcggagtttgagttgttagttatgatgtcgtttatgaaattggttacggtagattttattcgagtgagtatattatttcggcgttcggttgtagcggtgcgagtaggaggttgcgggggtcgggtaaggcgtagcgcggggtatgtaggttgcggtgggcgtcgggcgtacggcgagtcgggttattgggacgcgtcgcgcgcggtttttagagtttagtgttgtagggggtcgagtttcggtttttcgtgtttagtgtcgcggtggtcgtcgttttttttcgttatattttcgtaacggagttgtatggagcgggtcgatcgggggagttatcgcgcgttttaggagcgtttaggcggttgtagttgtagtaggtttttttttcgttttttgcgttcggtttcggcgtgcgttgaattgagtttattcggcgagttcgcggagtcgtcgcgg

SEQ ID NO: 36436 - DNA, 780 bp, Artificial Sequence
  chemically treated genomic DNA (Homo sapiens) CpG-island No: 36436
ccgcgacgactccgcgaactcgccgaataaactcaattcaacgcacgccgaaaccgaacgcaaaaaacgaaaaaaaaacctactacaactacaaccgcctaaacgctcctaaaacgcgcgataactcccccgatcgacccgctccatacaactccgttacgaaaatataacgaaaaaaaacgacgaccaccgcgacactaaacacgaaaaaccgaaactcgaccccctacaacactaaactctaaaaaccgcgcgcgacgcgtcccaataacccgactcgccgtacgcccgacgcccaccgcaacctacataccccgcgctacgccttacccgacccccgcaacctcctactcgcaccgctacaaccgaacgccgaaataatatactcactcgaataaaatctaccgtaaccaatttcataaacgacatcataactaacaactcaaactccgaacacgacgacgacaactacgaaaactcgaacctacccctacgtttcccctacgaacgaccaaaattcctaaaactatctcaaaacgaaataaaatacaacgccgaccacatcgcccgccccatcctcatcctcaaaaaaactcgacgactaccctaaaccactaactacgcaaaataaatacaacgacaccgacgacgcccctactctcctcgcgacccttccccgcacgattccaaccctcttctctcctacttctcgacccaaaactccactaactacgacgtccaaactcgacgaaaactcttacttacctaacatttcctttt

SEQ ID NO: 36437 - DNA, 554 bp, Artificial Sequence
  chemically treated genomic DNA (Homo sapiens) CpG-island No: 36437
ggttgaggattttattgttacgttattatttgttgatgaagtggtttatttttagtttttcggtggtattatcggtatatcgaaattgatttcgcgtatttataacgattattattatagcgtgcgtcgtagcgtcgagatttgttagtttatataatagatacgttatttgtgcgcgatttcggcggtttataattacgttatgagttcgttaggatcgttgggcgttttttttgtcggaggaacggttgttttggcggtcgattttagcgttacgttttgttttttattgattgaaaaatattaggttaacgttatcgcgttggtgttattcgtagttagtttgtggttgtaggcgttgatcgaaggcgaaagtcgggcgtagtttgtttcgttgaaattgttataggtcggcggcgtacgtttttttgttatttttgcggcgcgtattttcgttgagattggttgttagttgtagtaggtgtttggtatggcggaagggttggtgaattatattcgatttgatgatagcgcggagaaattatttatattta

SEQ ID NO: 36438 - DNA, 554 bp, Artificial Sequence
  chemically treated genomic DNA (Homo sapiens) CpG-island No: 36438
taaatataaataatttctccgcgctatcatcaaatcgaatataattcaccaacccttccgccataccaaacacctactacaactaacaaccaatctcaacgaaaatacgcgccgcaaaaataacaaaaaaacgtacgccgccgacctataacaatttcaacgaaacaaactacgcccgactttcgccttcgatcaacgcctacaaccacaaactaactacgaataacaccaacgcgataacgttaacctaatatttttcaatcaataaaaaacaaaacgtaacgctaaaatcgaccgccaaaacaaccgttcctccgacaaaaaaaacgcccaacgatcctaacgaactcataacgtaattataaaccgccgaaatcgcgcacaaataacgtatctattatataaactaacaaatctcgacgctacgacgcacgctataataataatcgttataaatacgcgaaatcaatttcgatataccgataataccaccgaaaaactaaaaataaaccacttcatcaacaaataataacgtaacaataaaatcctcaacc

SEQ ID NO: 36439 - DNA, 554 bp, Artificial Sequence
  chemically treated genomic DNA (Homo sapiens) CpG-island No: 36439
tgggtatggataattttttcgcgttattattaagtcgggtgtagtttattagttttttcgttatgttaaatatttgttgtaattgatagttaattttagcgggaatacgcgtcgtaagggtggtagaaagacgtgcgtcgtcgatttgtaatagttttagcgaggtaagttgcgttcggttttcgttttcgattagcgtttgtaattataggttgattgcgggtggtattagcgcggtaacgttaatttgatgttttttaattaatgggaaatagagcgtggcgttgggatcggtcgttagaataatcgttttttcggtaagaaagacgtttagcgattttggcgaatttatggcgtagttatgagtcgtcgggatcgcgtataggtagcgtgtttgttgtgtgaattgataaatttcgacgttacgacgtacgttgtagtagtagtcgttatgagtgcgcgggattagtttcggtgtgtcggtggtgttatcggaaagttggaaataggttattttattagtaggtgatggcgtggtagtaaaatttttagtt

SEQ ID NO: 36440 - DNA, 554 bp, Artificial Sequence
  chemically treated genomic DNA (Homo sapiens) CpG-island No: 36440
aactaaaaattttactaccacgccatcacctactaataaaataacctatttccaactttccgataacaccaccgacacaccgaaactaatcccgcgcactcataacgactactactacaacgtacgtcgtaacgtcgaaatttatcaattcacacaacaaacacgctacctatacgcgatcccgacgactcataactacgccataaattcgccaaaatcgctaaacgtctttcttaccgaaaaaacgattattctaacgaccgatcccaacgccacgctctatttcccattaattaaaaaacatcaaattaacgttaccgcgctaataccacccgcaatcaacctataattacaaacgctaatcgaaaacgaaaaccgaacgcaacttacctcgctaaaactattacaaatcgacgacgcacgtctttctaccacccttacgacgcgtattcccgctaaaattaactatcaattacaacaaatatttaacataacgaaaaaactaataaactacacccgacttaataataacgcgaaaaaattatccataccca

SEQ ID NO: 36441 - DNA, 513 bp, Artificial Sequence
  chemically treated genomic DNA (Homo sapiens) CpG-island No: 36441
aaaaatcgttagagggatagcgttcggaaagtatatttagcgtggcgttaaaaatacgttttggtagatttttttacggtgcggtacggcgtacgcgggagtattattcgtttatttgtaatgtatttatcgtcgcggcggtaacggtttgttgcgtaaggacgtcgagaggattatgcggtggtgttaggttttttagtttgtttgcgaatatatattttataatgattgcggaatcgattaaattacgtcgggtacggggggaaaaatagttttttagatatatcgttaatttgatgttcggcgcgattaatgcgttgtaatttattggtaatagaaagcggcgttgttatttgaattattagatttatcgcgtttatattaatttttagtttaagattggaggttgcgatacgtagcgtaatttattcgattttagcgattgttcggtgattgttcgttgttttttagatacggagtcgtggtgtgatcggtaataaaacgtcgttattt

SEQ ID NO: 36442 - DNA, 513 bp, Artificial Sequence
  chemically treated genomic DNA (Homo sapiens) CpG-island No: 36442
aaataacgacgttttattaccgatcacaccacgactccgtatctaaaaaacaacgaacaatcaccgaacaatcgctaaaatcgaataaattacgctacgtatcgcaacctccaatcttaaactaaaaattaatataaacgcgataaatctaataattcaaataacaacgccgctttctattaccaataaattacaacgcattaatcgcgccgaacatcaaattaacgatatatctaaaaaactatttttccccccgtacccgacgtaatttaatcgattccgcaatcattataaaatatatattcgcaaacaaactaaaaaacctaacaccaccgcataatcctctcgacgtccttacgcaacaaaccgttaccgccgcgacgataaatacattacaaataaacgaataatactcccgcgtacgccgtaccgcaccgtaaaaaaatctaccaaaacgtatttttaacgccacgctaaatatactttccgaacgctatccctctaacgattttt

SEQ ID NO: 36443 - DNA, 513 bp, Artificial Sequence
  chemically treated genomic DNA (Homo sapiens) CpG-island No: 36443
aagtagcgacgttttattgtcggttatattacggtttcgtgtttaaagaataacgagtaattatcgaatagtcgttgaaatcgggtgaattacgttgcgtgtcgtaatttttagttttgaattggggattgatatgggcgcggtggatttggtgatttaggtggtaacgtcgttttttgttgttagtgggttataacgtattggtcgcgtcggatattaggttggcggtgtatttaaagggttgttttttttttcgtattcggcgtgatttagtcgatttcgtagttattgtagagtgtatgttcgtaggtaggttggaaaatttgatattatcgtataattttttcgacgtttttgcgtagtaaatcgttgtcgtcgcggcgatggatgtattataggtagacgaatggtattttcgcgtacgtcgtgtcgtatcgtggaaagatttgttaagacgtgtttttgacgttacgttggatatgtttttcgggcgttatttttttggcgattttt

SEQ ID NO: 36444 - DNA, 513 bp, Artificial Sequence
  chemically treated genomic DNA (Homo sapiens) CpG-island No: 36444
aaaaatcgccaaaaaaataacgcccgaaaaacatatccaacgtaacgtcaaaaacacgtcttaacaaatctttccacgatacgacacgacgtacgcgaaaataccattcgtctacctataatacatccatcgccgcgacgacaacgatttactacgcaaaaacgtcgaaaaaattatacgataatatcaaattttccaacctacctacgaacatacactctacaataactacgaaatcgactaaatcacgccgaatacgaaaaaaaaaacaaccctttaaatacaccgccaacctaatatccgacgcgaccaatacgttataacccactaacaacaaaaaacgacgttaccacctaaatcaccaaatccaccgcgcccatatcaatccccaattcaaaactaaaaattacgacacgcaacgtaattcacccgatttcaacgactattcgataattactcgttattctttaaacacgaaaccgtaatataaccgacaataaaacgtcgctactt

SEQ ID NO: 36445 - DNA, 783 bp, Artificial Sequence
  chemically treated genomic DNA (Homo sapiens) CpG-island No: 36445
  unsure (776)
cgcggggtagagtcgcggttcggattttttttttttcggcgtttcgagttgcggaagtttaggtcgttcgtcgtttttcggcgtacgcggtcgcgtttcgtcgtttttttcggtaatttttttcggggcggagttttcgggttttttttattatcggtatttgtcgcgggcgttcgagttgcgggtacggggtattttgaggttgtgtattcgggatttcggcgcgtattgttcgcgggttacgcggtgagggtggttgcgggcgagagggtttatgttttaggggaagtttaaggttcgttagtcgcggcggttgcgacgagatttggtaagagttaaacgtcggttttaggagtagcgagtgcgcgcgattttttagatcgacgcgttttttttgtttttcgtttttttttttagttagcgtttcgttcgcgtttcgttcggttgttgcggaggcggttttttaggaattttttaggaatcggttttacgtgatcgcgggtttcgttattgttttaaagaggttcggtcgtaatatataggttttagggaagatcgggtgagagcgttcgggtgtagggcgggcggtgtgtacgtcggggtcggtttgtttttggttttatatttcggggtgttcgggcgtaagttagagattttttcggtcgtcggttatagttaatttcgtttcggcggtcggagtttgttttttattcgggttagttgagcgttcgggtttagggaaggatagcgatttttggtttttggtttgttacggnggtgggt

SEQ ID NO: 36446 - DNA, 783 bp, Artificial Sequence
  chemically treated genomic DNA (Homo sapiens) CpG-island No: 36446
  unsure (8)
acccaccnccgtaacaaaccaaaaaccaaaaatcgctatccttccctaaacccgaacgctcaactaacccgaataaaaaacaaactccgaccgccgaaacgaaattaactataaccgacgaccgaaaaaatctctaacttacgcccgaacaccccgaaatataaaaccaaaaacaaaccgaccccgacgtacacaccgcccgccctacacccgaacgctctcacccgatcttccctaaaacctatatattacgaccgaacctctttaaaacaataacgaaacccgcgatcacgtaaaaccgattcctaaaaaattcctaaaaaaccgcctccgcaacaaccgaacgaaacgcgaacgaaacgctaactaaaaaaaaaaacgaaaaacaaaaaaaacgcgtcgatctaaaaaatcgcgcgcactcgctactcctaaaaccgacgtttaactcttaccaaatctcgtcgcaaccgccgcgactaacgaaccttaaacttcccctaaaacataaaccctctcgcccgcaaccaccctcaccgcgtaacccgcgaacaatacgcgccgaaatcccgaatacacaacctcaaaataccccgtacccgcaactcgaacgcccgcgacaaataccgataataaaaaaaacccgaaaactccgccccgaaaaaaattaccgaaaaaaacgacgaaacgcgaccgcgtacgccgaaaaacgacgaacgacctaaacttccgcaactcgaaacgccgaaaaaaaaaaaatccgaaccgcgactctaccccgcg

SEQ ID NO: 36447 - DNA, 783 bp, Artificial Sequence
  chemically treated genomic DNA (Homo sapiens) CpG-island No: 36447
  unsure (8)
atttattntcgtggtaggttaagggttaaggatcgttatttttttttgaattcgggcgtttagttggttcgggtagggggtaggtttcggtcgtcgaaacggggttggttgtagtcggcggtcggggagatttttagtttgcgttcgagtatttcggggtgtggggttagaggtaggtcgatttcggcgtgtatatcgttcgttttgtattcgagcgtttttattcggttttttttgaagtttgtgtattgcgatcgagtttttttaaagtagtagcggggttcgcggttacgtgaggtcgatttttggaaagtttttggaaagtcgttttcgtagtagtcgggcggggcgcgagcggagcgttgattggggagggaggcggggagtaagggaggcgcgtcggtttgggaagtcgcgcgtattcgttgtttttgggatcgacgtttaatttttgttaagtttcgtcgtagtcgtcgcggttggcgggttttgggttttttttgaagtatgagttttttcgttcgtagttatttttatcgcgtggttcgcggatagtgcgcgtcggggtttcgggtgtatagttttaggatatttcgtgttcgtagttcgggcgttcgcggtaggtatcggtagtgggggaagttcgaaggtttcgtttcgaggagagttatcggggagggcggcgaggcgcggtcgcgtgcgtcggggagcggcggacggtttgggttttcgtagttcggagcgtcggggaagagagagttcgaatcgcggttttgtttcgcg

SEQ ID NO: 36448 - DNA, 783 bp, Artificial Sequence
  chemically treated genomic DNA (Homo sapiens) CpG-island No: 36448
  unsure (776)
cgcgaaacaaaaccgcgattcgaactctctcttccccgacgctccgaactacgaaaacccaaaccgtccgccgctccccgacgcacgcgaccgcgcctcgccgccctccccgataactctcctcgaaacgaaaccttcgaacttcccccactaccgatacctaccgcgaacgcccgaactacgaacacgaaatatcctaaaactatacacccgaaaccccgacgcgcactatccgcgaaccacgcgataaaaataactacgaacgaaaaaactcatacttcaaaaaaaacccaaaacccgccaaccgcgacgactacgacgaaacttaacaaaaattaaacgtcgatcccaaaaacaacgaatacgcgcgacttcccaaaccgacgcgcctcccttactccccgcctccctccccaatcaacgctccgctcgcgccccgcccgactactacgaaaacgactttccaaaaactttccaaaaatcgacctcacgtaaccgcgaaccccgctactactttaaaaaaactcgatcgcaatacacaaacttcaaaaaaaaccgaataaaaacgctcgaatacaaaacgaacgatatacacgccgaaatcgacctacctctaaccccacaccccgaaatactcgaacgcaaactaaaaatctccccgaccgccgactacaaccaaccccgtttcgacgaccgaaacctaccccctacccgaaccaactaaacgcccgaattcaaaaaaaaataacgatccttaacccttaacctaccacganaataaat

SEQ ID NO: 36449 - DNA, 826 bp, Artificial Sequence
  chemically treated genomic DNA (Homo sapiens) CpG-island No: 36449
cgattatggaagtcgcgttcggcgggggtttcgtagtttattttcgacgttcgggtagtcgttttcgcggtagtgttagtttttgaatttggtcgttaagattttgggttgtagtcgtagtttcgttcgggagttagatgttgttgggtttgcggggttcgcggtatcgatttgttgattgtatttcgtgtaaagggaggcgttcgacgtttttttcggtcggggttcgagttcgggagtttaattttgagtagttgcggaaaatagtaaattttttagcgtgttaagaagttatttttaagaagtttttttcgcgttttgcgtttcgttaggtttgagtttttggagaattattttttttacgtatttttaaggatttaggattttgcgagcgtgtttttcgcggttttttggaagtaagggacgtatttttattttattttttgttttttatttcgatttcgttttttagttgtttttttggggaggcgttttttttcgtacgcgtcgcggtcgatcggttttttatttgtttgatcgagttttcgtagggttttcgttagacgcgtcgtttgcggggatggttttttcgtcgatttcgcggttttttattggtttcgcgtttttttttcgttattttcggagggtttaaggtatcgtagggttatgagagaagggttatcgcggtaaagataggtggtcgttcgagttggggttagagaagggttcgcgtttttttttgaagttagtgcgaattttaaaacgagtttttgcggggtgttcgaaatggtggtagagagagaagggatggggtttttttttttta

SEQ ID NO: 36450 - DNA, 826 bp, Artificial Sequence
  chemically treated genomic DNA (Homo sapiens) CpG-island No: 36450
taaaaaaaaaaaaccccatcccttctctctctaccaccatttcgaacaccccgcaaaaactcgttttaaaattcgcactaacttcaaaaaaaaacgcgaacccttctctaaccccaactcgaacgaccacctatctttaccgcgataacccttctctcataaccctacgataccttaaaccctccgaaaataacgaaaaaaaaacgcgaaaccaataaaaaaccgcgaaatcgacgaaaaaaccatccccgcaaacgacgcgtctaacgaaaaccctacgaaaactcgatcaaacaaataaaaaaccgatcgaccgcgacgcgtacgaaaaaaaacgcctccccaaaaaaacaactaaaaaacgaaatcgaaataaaaaacaaaaaataaaataaaaatacgtcccttacttccaaaaaaccgcgaaaaacacgctcgcaaaatcctaaatccttaaaaatacgtaaaaaaaataattctccaaaaactcaaacctaacgaaacgcaaaacgcgaaaaaaacttcttaaaaataacttcttaacacgctaaaaaatttactattttccgcaactactcaaaattaaactcccgaactcgaaccccgaccgaaaaaaacgtcgaacgcctccctttacacgaaatacaatcaacaaatcgataccgcgaaccccgcaaacccaacaacatctaactcccgaacgaaactacgactacaacccaaaatcttaacgaccaaattcaaaaactaacactaccgcgaaaacgactacccgaacgtcgaaaataaactacgaaacccccgccgaacgcgacttccataatcg

SEQ ID NO: 36451 - DNA, 826 bp, Artificial Sequence
  chemically treated genomic DNA (Homo sapiens) CpG-island No: 36451
tggggagaaagagttttattttttttttttttgttattatttcggatatttcgtagggattcgttttgggattcgtattgattttaaggaaggacgcgaatttttttttgattttagttcgggcggttatttgtttttgtcgcggtgattttttttttatgattttgcggtgttttgagtttttcgggaatggcggggaagggacgcggagttagtgggggatcgcggggtcggcggaggagttattttcgtaggcggcgcgtttggcgaaggttttgcgggagttcggttagataggtagggagtcgatcggtcgcgacgcgtgcgggagggagcgtttttttaaggaagtagttaggaagcggggtcgaggtgggaagtaaagaataagatggaaatacgttttttgtttttaagggatcgcggagagtacgttcgtagggttttgggtttttgggaatgcgtaaggaaagtggttttttagggatttaggtttggcggagcgtagagcgcgggaagagttttttggaaatagttttttagtacgttggaagatttattgtttttcgtagttgtttagggttaggttttcgggttcgaatttcggtcggggaaagcgtcgggcgtttttttttgtacggggtgtaattagtaagtcggtgtcgcgggtttcgtaggtttagtagtatttggttttcgggcggagttgcggttgtagtttaggattttggcggttaagtttagggattgatattgtcgcgagggcggttgttcgggcgtcgagagtaggttgcgaagttttcgtcgagcgcggtttttatggtcg

SEQ ID NO: 36452 - DNA, 826 bp, Artificial Sequence
  chemically treated genomic DNA (Homo sapiens) CpG-island No: 36452
cgaccataaaaaccgcgctcgacgaaaacttcgcaacctactctcgacgcccgaacaaccgccctcgcgacaatatcaatccctaaacttaaccgccaaaatcctaaactacaaccgcaactccgcccgaaaaccaaatactactaaacctacgaaacccgcgacaccgacttactaattacaccccgtacaaaaaaaaacgcccgacgctttccccgaccgaaattcgaacccgaaaacctaaccctaaacaactacgaaaaacaataaatcttccaacgtactaaaaaactatttccaaaaaactcttcccgcgctctacgctccgccaaacctaaatccctaaaaaaccactttccttacgcattcccaaaaacccaaaaccctacgaacgtactctccgcgatcccttaaaaacaaaaaacgtatttccatcttattctttacttcccacctcgaccccgcttcctaactacttccttaaaaaaacgctccctcccgcacgcgtcgcgaccgatcgactccctacctatctaaccgaactcccgcaaaaccttcgccaaacgcgccgcctacgaaaataactcctccgccgaccccgcgatcccccactaactccgcgtcccttccccgccattcccgaaaaactcaaaacaccgcaaaatcataaaaaaaaaatcaccgcgacaaaaacaaataaccgcccgaactaaaatcaaaaaaaaattcgcgtccttccttaaaatcaatacgaatcccaaaacgaatccctacgaaatatccgaaataataacaaaaaaaaaaaaaataaaactctttctcccca

SEQ ID NO: 36453 - DNA, 608 bp, Artificial Sequence
  chemically treated genomic DNA (Homo sapiens) CpG-island No: 36453
gattttttcggtgcgttttttagcgcggtttttttcggtgcgttagttatcgtggtttttttcggcgcgtttttcggcgcggtttttttcggggttttttagcgcggcgtttttttgggggtttttcggcgtagtttttttcggggatttttcggcgtcgtttttttcggggtattcggggtttttcggcgcggtttttttcgggggtttttcggcgcggttgttttcgggggtttttcggcgcggtttttttcgggggtttttcgtcgcggttttgtttttttcgggggttttttagtatggttttttttcgcgcggttttttttgggtttttttagcgcggtatttttttgggggttttttagcgcggtatttttttcgggggttttttagcgcggtattttttcggcggttttttagtgcggtttttttagattttttttagcgcggttttttttatttttttgggagggtttgaatacggttagtacggatttgggcggacggcgcgggacgggtgattattggcgttgttgaggtgagttgtgtgtttcgcggtcgttttagattataggcgttagtagtgtagtttggtttgggtagtgcgt

SEQ ID NO: 36454 - DNA, 608 bp, Artificial Sequence
  chemically treated genomic DNA (Homo sapiens) CpG-island No: 36454
acgcactacccaaaccaaactacactactaacgcctataatctaaaacgaccgcgaaacacacaactcacctcaacaacgccaataatcacccgtcccgcgccgtccgcccaaatccgtactaaccgtattcaaaccctcccaaaaaaataaaaaaaaccgcgctaaaaaaaatctaaaaaaaccgcactaaaaaaccgccgaaaaaataccgcgctaaaaaacccccgaaaaaaataccgcgctaaaaaacccccaaaaaaataccgcgctaaaaaaacccaaaaaaaaccgcgcgaaaaaaaaccatactaaaaaacccccgaaaaaaacaaaaccgcgacgaaaaacccccgaaaaaaaccgcgccgaaaaacccccgaaaacaaccgcgccgaaaaacccccgaaaaaaaccgcgccgaaaaaccccgaataccccgaaaaaaacgacgccgaaaaatccccgaaaaaaactacgccgaaaaacccccaaaaaaacgccgcgctaaaaaaccccgaaaaaaaccgcgccgaaaaacgcgccgaaaaaaaccacgataactaacgcaccgaaaaaaaccgcgctaaaaaacgcaccgaaaaaatc

SEQ ID NO: 36455 - DNA, 608 bp, Artificial Sequence
  chemically treated genomic DNA (Homo sapiens) CpG-island No: 36455
gcgtattgtttaggttaggttgtattgttgacgtttgtgatttgggacggtcgcggggtatatagtttattttagtaacgttagtgattattcgtttcgcgtcgttcgtttaggttcgtgttgatcgtgtttaaatttttttagagagatggggagggtcgcgttgaggagagtttgggagaatcgtattgaggagtcgtcgggagagtgtcgcgttgaggagttttcggggagagtgtcgcgttgaggagtttttaggagagtgtcgcgttgaggaggtttagggaggatcgcgcggaggagaattatgttgaggagttttcggggagaatagaatcgcggcgagaggttttcggagagaatcgcgtcgaagaattttcggggataatcgcgtcgaagaattttcggggagaatcgcgtcgaaaagtttcgggtgtttcgaggagaacggcgtcgaggagttttcggggagaattgcgtcgaggagtttttagaagagcgtcgcgttgaggagtttcgaggagaatcgcgtcgaggggcgcgtcggggagaattacgatgattgacgtatcgaggaggatcgcgttgaggggcgtatcgggagaatt

SEQ ID NO: 36456 - DNA, 608 bp, Artificial Sequence
  chemically treated genomic DNA (Homo sapiens) CpG-island No: 36456
aattctcccgatacgcccctcaacgcgatcctcctcgatacgtcaatcatcgtaattctccccgacgcgcccctcgacgcgattctcctcgaaactcctcaacgcgacgctcttctaaaaactcctcgacgcaattctccccgaaaactcctcgacgccgttctcctcgaaacacccgaaacttttcgacgcgattctccccgaaaattcttcgacgcgattatccccgaaaattcttcgacgcgattctctccgaaaacctctcgccgcgattctattctccccgaaaactcctcaacataattctcctccgcgcgatcctccctaaacctcctcaacgcgacactctcctaaaaactcctcaacgcgacactctccccgaaaactcctcaacgcgacactctcccgacgactcctcaatacgattctcccaaactctcctcaacgcgaccctccccatctctctaaaaaaatttaaacacgatcaacacgaacctaaacgaacgacgcgaaacgaataatcactaacgttactaaaataaactatataccccgcgaccgtcccaaatcacaaacgtcaacaatacaacctaacctaaacaatacgc

SEQ ID NO: 36457 - DNA, 503 bp, Artificial Sequence
  chemically treated genomic DNA (Homo sapiens) CpG-island No: 36457
gagggtgggagtggcgcgggtagggagcggaggggggggtgggggggggcggggtgggtcgtcgtttgttgttgtgtgatgtgagagtgttaagagtagcggacggggggggtagtggggcgggaggggagcggggaggggatttagtgtagtgggtgggaggcggcgcgtcgtagggaacgggcgggggggtgggattggggaagggagttgtggtggttaagcgtggaggtggagtgtgtggaggggagttagcgggcgtcgggtgaggtcgggttgacgtataagggtaggagtttgtttagaagcgcggggtgttaggtgcgtagagtgggggtcgtttgtgtttttagcgttagtttgtgtttgagaatcgatgagtagaagaaggaagggtagattcgtgggttcgttgcgtttcgtttgggttcgtgatttgttttagtgatattcgtagtaggtagggttatgatttttattaaaagtttttttagttttttttg

SEQ ID NO: 36458 - DNA, 503 bp, Artificial Sequence
  chemically treated genomic DNA (Homo sapiens) CpG-island No: 36458
caaaaaaaactaaaaaaacttttaataaaaatcataaccctacctactacgaatatcactaaaacaaatcacgaacccaaacgaaacgcaacgaacccacgaatctacccttccttcttctactcatcgattctcaaacacaaactaacgctaaaaacacaaacgacccccactctacgcacctaacaccccgcgcttctaaacaaactcctacccttatacgtcaacccgacctcacccgacgcccgctaactcccctccacacactccacctccacgcttaaccaccacaactcccttccccaatcccacccccccgcccgttccctacgacgcgccgcctcccacccactacactaaatcccctccccgctcccctcccgccccactaccccccccgtccgctactcttaacactctcacatcacacaacaacaaacgacgacccaccccgcccccccccacccccccctccgctccctacccgcgccactcccaccctc

SEQ ID NO: 36459 - DNA, 503 bp, Artificial Sequence
  chemically treated genomic DNA (Homo sapiens) CpG-island No: 36459
taaagaggattgaggaggtttttgatagggattatagttttgtttgttgcggatattattggagtaggttacgggtttaagcgaagcgtagcgaatttacgagtttgttttttttttttttgtttatcggtttttaggtataggttgacgttggagatataaacgatttttattttgcgtatttaatatttcgcgtttttggataggtttttatttttatacgttagttcgattttattcggcgttcgttgatttttttttatatattttatttttacgtttaattattataatttttttttttaattttattttttcgttcgttttttacggcgcgtcgttttttatttattatattaaatttttttttcgtttttttttcgttttattgtttttttcgttcgttgtttttagtatttttatattatatagtaataaacggcgatttatttcgtttttttttattttttttttcgttttttattcgcgttatttttattttt

SEQ ID NO: 36460 - DNA, 503 bp, Artificial Sequence
  chemically treated genomic DNA (Homo sapiens) CpG-island No: 36460
aaaaataaaaataacgcgaataaaaaacgaaaaaaaaaataaaaaaaaacgaaataaatcgccgtttattactatataatataaaaatactaaaaacaacgaacgaaaaaaacaataaaacgaaaaaaaaacgaaaaaaaaatttaatataataaataaaaaacgacgcgccgtaaaaaacgaacgaaaaaataaaattaaaaaaaaaaattataataattaaacgtaaaaataaaatatataaaaaaaaatcaacgaacgccgaataaaatcgaactaacgtataaaaataaaaacctatccaaaaacgcgaaatattaaatacgcaaaataaaaatcgtttatatctccaacgtcaacctatacctaaaaaccgataaacaaaaaaaaaaaaaacaaactcgtaaattcgctacgcttcgcttaaacccgtaacctactccaataatatccgcaacaaacaaaactataatccctatcaaaaacctcctcaatcctcttta

SEQ ID NO: 36461 - DNA, 746 bp, Artificial Sequence
  chemically treated genomic DNA (Homo sapiens) CpG-island No: 36461
ttgcggaggagggcgggggtcgggtaagtagagggcgtttagttcgggggcgtcggtttgggttgggcgtttagagtttatttcggcgcgcgggtcgcgggcgcgtggggtagtggtttttttagtcgggaagttgttgtttacgtttcggtggttgttgcggtttcgttagggttgtatcggggtttcgcgtagacgttttttcgcgatttgttgtagtttaggcggtggcggtggcggtagtagcggcggcggtggaggtggcgcgggcgatagttcggttcggcgcggtttttgaattgtttaatttttgttcgcgtcgggtttaagcgttcggtcgttgttttcgcgttgagcgtttgcgtatcgggtttcgtttaggtgaggggcgtgtgttcggagttcgttgggcgcgttcggttcggttcggtttcgtcgtacgttcgtttttttggtttggtcgaggatttcggggtttggacgtgttaacgttattttcgcgcgtcgaagttgtgacggtttattaagtagagatttgcgaggtatatagagagggaatgaggcggaatcgttcgggggttcgttgatattgtagagtttttcgtagtatcgttgttttaaatttcgtttttttaggcgtgcgcgtatagcgagttagaggaggtttcgtttcgatttggggtttttcgcggtttttagttcgggggttcgggttttcgaagagatttttggtaatggtagaggtt

SEQ ID NO: 36462 - DNA, 746 bp, Artificial Sequence
  chemically treated genomic DNA (Homo sapiens) CpG-island No: 36462
aacctctaccattaccaaaaatctcttcgaaaacccgaacccccgaactaaaaaccgcgaaaaaccccaaatcgaaacgaaacctcctctaactcgctatacgcgcacgcctaaaaaaacgaaatttaaaacaacgatactacgaaaaactctacaatatcaacgaacccccgaacgattccgcctcattccctctctatatacctcgcaaatctctacttaataaaccgtcacaacttcgacgcgcgaaaataacgttaacacgtccaaaccccgaaatcctcgaccaaaccaaaaaaacgaacgtacgacgaaaccgaaccgaaccgaacgcgcccaacgaactccgaacacacgcccctcacctaaacgaaacccgatacgcaaacgctcaacgcgaaaacaacgaccgaacgcttaaacccgacgcgaacaaaaattaaacaattcaaaaaccgcgccgaaccgaactatcgcccgcgccacctccaccgccgccgctactaccgccaccgccaccgcctaaactacaacaaatcgcgaaaaaacgtctacgcgaaaccccgatacaaccctaacgaaaccgcaacaaccaccgaaacgtaaacaacaacttcccgactaaaaaaaccactaccccacgcgcccgcgacccgcgcgccgaaataaactctaaacgcccaacccaaaccgacgcccccgaactaaacgccctctacttacccgacccccgccctcctccgcaa

SEQ ID NO: 36463 - DNA, 746 bp, Artificial Sequence
  chemically treated genomic DNA (Homo sapiens) CpG-island No: 36463
gatttttgttattgttaaggattttttcggggattcgagttttcgggttgaggatcgcgggggattttaggtcgggacggagttttttttggttcgttgtgcgcgtacgtttggaaaggcgggatttaaggtagcgatgttgcgggaggttttgtagtgttaacgagttttcgaacggtttcgttttattttttttttgtgtgtttcgtaagtttttgtttagtaaatcgttatagtttcggcgcgcgagagtggcgttggtacgtttaaatttcggggttttcggttaggttaggggggcgggcgtgcggcggggtcgggtcgggtcgggcgcgtttagcgggtttcgggtatacgttttttatttgggcgaggttcggtgcgtaggcgtttagcgcgggggtagcggtcgggcgtttaagttcggcgcgggtaagagttggatagtttaggggtcgcgtcgggtcgagttgtcgttcgcgttatttttatcgtcgtcgttgttatcgttatcgttatcgtttgggttgtagtagatcgcgggagaacgtttgcgcgaagtttcggtgtagttttggcgggatcgtagtaattatcggagcgtgagtaatagtttttcggttggaggagttattgttttacgcgttcgcggttcgcgcgtcgaggtaagttttgggcgtttagtttagatcggcgttttcggattgggcgttttttgtttgttcggttttcgttttttttcgtag

SEQ ID NO: 36464 - DNA, 746 bp, Artificial Sequence
  chemically treated genomic DNA (Homo sapiens) CpG-island No: 36464
ctacgaaaaaaaacgaaaaccgaacaaacaaaaaacgcccaatccgaaaacgccgatctaaactaaacgcccaaaacttacctcgacgcgcgaaccgcgaacgcgtaaaacaataactcctccaaccgaaaaactattactcacgctccgataattactacgatcccgccaaaactacaccgaaacttcgcgcaaacgttctcccgcgatctactacaacccaaacgataacgataacgataacaacgacgacgataaaaataacgcgaacgacaactcgacccgacgcgacccctaaactatccaactcttacccgcgccgaacttaaacgcccgaccgctacccccgcgctaaacgcctacgcaccgaacctcgcccaaataaaaaacgtatacccgaaacccgctaaacgcgcccgacccgacccgaccccgccgcacgcccgcccccctaacctaaccgaaaaccccgaaatttaaacgtaccaacgccactctcgcgcgccgaaactataacgatttactaaacaaaaacttacgaaacacacaaaaaaaaaataaaacgaaaccgttcgaaaactcgttaacactacaaaacctcccgcaacatcgctaccttaaatcccgcctttccaaacgtacgcgcacaacgaaccaaaaaaaactccgtcccgacctaaaatcccccgcgatcctcaacccgaaaactcgaatccccgaaaaaatccttaacaataacaaaaatc

SEQ ID NO: 36465 - DNA, 649 bp, Artificial Sequence
  chemically treated genomic DNA (Homo sapiens) CpG-island No: 36465
agagttcgcgggagaagtcgagttcgggaggttttttttggcggtcgtcgtttttagtttattttcgtcgttggttttcgtcgtttatattttaggattattattagcggcgagtttggttttttgtagttttttttgcgaagaatttgtttttgacgttggttcggtcgttatttcgtgttttagcggttgtaggttttcggggttgttttttatatcgggtcgttcgtttttagttttatggagatcgcggttattttttcgtagttagcgttttggacgttatgatagttgtattggtagtaatagcgttttggcgcggtttcggttaggtacgttatcggggagagtattaagaacgcgcgcgggcgcgcgttatcgttttgttcgtgcgttttgagtttgttttcgtttgattgcgcgttgagaggcgaaggcgaattatttagtagtcgtttacgtggtttagtttttttcgtgcgttcgatcgagttcgttttcggaaggtcgggcgtggagggcgtggttaggagggcgcggtcggggggcgcgttttcgcggtttagttttagtaggaaaatatttttttattatgtggtcggaagttgaatttcggggtagtttttttgtgtgcggtttttttaaaggg

SEQ ID NO: 36466 - DNA, 649 bp, Artificial Sequence
  chemically treated genomic DNA (Homo sapiens) CpG-island No: 36466
ccctttaaaaaaaccgcacacaaaaaaactaccccgaaattcaacttccgaccacataataaaaaaatattttcctactaaaactaaaccgcgaaaacgcgccccccgaccgcgccctcctaaccacgccctccacgcccgaccttccgaaaacgaactcgatcgaacgcacgaaaaaaactaaaccacgtaaacgactactaaataattcgccttcgcctctcaacgcgcaatcaaacgaaaacaaactcaaaacgcacgaacaaaacgataacgcgcgcccgcgcgcgttcttaatactctccccgataacgtacctaaccgaaaccgcgccaaaacgctattactaccaatacaactatcataacgtccaaaacgctaactacgaaaaaataaccgcgatctccataaaactaaaaacgaacgacccgatataaaaaacaaccccgaaaacctacaaccgctaaaacacgaaataacgaccgaaccaacgtcaaaaacaaattcttcgcaaaaaaaactacaaaaaaccaaactcgccgctaataataatcctaaaatataaacgacgaaaaccaacgacgaaaataaactaaaaacgacgaccgccaaaaaaaacctcccgaactcgacttctcccgcgaactct

SEQ ID NO: 36467 - DNA, 649 bp, Artificial Sequence
  chemically treated genomic DNA (Homo sapiens) CpG-island No: 36467
ttttttaaagaagtcgtatataagggagttgtttcggagtttaattttcggttatatagtgagaggatgtttttttattggagttgagtcgcgggggcgcgtttttcggtcgcgtttttttagttacgttttttacgttcggtttttcgagagcgagttcggtcggacgtacggaaagggttgggttacgtgggcggttgttgagtggttcgttttcgttttttagcgcgtagttaggcggaggtaagtttagagcgtacggatagagcggtagcgcgcgttcgcgcgcgtttttagtatttttttcggtgacgtgtttgatcgaggtcgcgttagggcgttgttgttgttaatatagttgttatggcgtttaaggcgttggttgcggagaagtggtcgcggtttttatagagttgggggcgggcggttcggtatggagagtagtttcgagagtttgtagtcgttagaatacggggtggcggtcgggttagcgttagggataggtttttcgtaggaagggttataggagattaggttcgtcgttggtgatggttttggggtatgggcggcggagattagcggcgggaatgggttgggggcggcggtcgttaggaggagtttttcggattcggtttttttcgcgggtttt

SEQ ID NO: 36468 - DNA, 649 bp, Artificial Sequence
  chemically treated genomic DNA (Homo sapiens) CpG-island No: 36468
aaaacccgcgaaaaaaaccgaatccgaaaaactcctcctaacgaccgccgcccccaacccattcccgccgctaatctccgccgcccataccccaaaaccatcaccaacgacgaacctaatctcctataacccttcctacgaaaaacctatccctaacgctaacccgaccgccaccccgtattctaacgactacaaactctcgaaactactctccataccgaaccgcccgcccccaactctataaaaaccgcgaccacttctccgcaaccaacgccttaaacgccataacaactatattaacaacaacaacgccctaacgcgacctcgatcaaacacgtcaccgaaaaaaatactaaaaacgcgcgcgaacgcgcgctaccgctctatccgtacgctctaaacttacctccgcctaactacgcgctaaaaaacgaaaacgaaccactcaacaaccgcccacgtaacccaaccctttccgtacgtccgaccgaactcgctctcgaaaaaccgaacgtaaaaaacgtaactaaaaaaacgcgaccgaaaaacgcgcccccgcgactcaactccaataaaaaaacatcctctcactatataaccgaaaattaaactccgaaacaactcccttatatacgacttctttaaaaaa

SEQ ID NO: 36469 - DNA, 1003 bp, Artificial Sequence
  chemically treated genomic DNA (Homo sapiens) CpG-island No: 36469
agtttttacgacggggaaaggtcgtattgatagagaaggaagttatacgaagtggtagtggtcggattcgagtttcgagtttagtatacgcgggggaaaaggaagcgggcggtttttggagaaacggggatggagttgtagatgcgagttcgcgaggtaggtttcgtggtgttcgggtatcggtaggaagaatggaggaggggaggcgaggttgcgaggtgtcggggagtcgggcggcgggtcggttcgcggtcgattttattttagttcgcgttcgggatttttttagtttcggtattcggcgtgcgtttcgcgtgcgtcgatttttttcggaggaatagttatcgttttatattcggggattggagaaattcggtaattttgcgcgagaaatgttttttattttgtagtacgtcgagaaagaaaaaaatgttaggcgatgacggcggaggaaggatgatttatttatgttgtttttcgagggtgaggaatcggcggggcgaggcgaaggtttgtggtgcgggcggcgcggttttgtgttttttttttattttcgtttttttcgtagttagggagggattcgcggggggcgtcgcggggaggagtagttggtgttttgtaggcggcgcggtcgagcggggacgagcggcggggggcggggcggggcggggcggggcgggattggcgggcgtattgcgggcggatcggtttcgagcggcgggcggcggaggcgtggaatcggtttgaagagtttcggtttcgattcgtagtttacgagcgtttcgttttttttatcgagtatgtttagtgttttttttatttttttttttgtggcgagcgaggttaagcgtgcgggtgggcgtgtgtttgtagatcggttgtagcgcggtagaggatttttatggcggtcgtttgagaggcggagggcgggttcggagaaaatagggaatggggatattgagttcgatttgttagtagaggatttatcgttgttttgtttttt

SEQ ID NO: 36470 - DNA, 1003 bp, Artificial Sequence
  chemically treated genomic DNA (Homo sapiens) CpG-island No: 36470
aaaaaacaaaacaacgataaatcctctactaacaaatcgaactcaatatccccattccctattttctccgaacccgccctccgcctctcaaacgaccgccataaaaatcctctaccgcgctacaaccgatctacaaacacacgcccacccgcacgcttaacctcgctcgccacaaaaaaaaaaataaaaaaaacactaaacatactcgataaaaaaaacgaaacgctcgtaaactacgaatcgaaaccgaaactcttcaaaccgattccacgcctccgccgcccgccgctcgaaaccgatccgcccgcaatacgcccgccaatcccgccccgccccgccccgccccgccccccgccgctcgtccccgctcgaccgcgccgcctacaaaacaccaactactcctccccgcgacgccccccgcgaatccctccctaactacgaaaaaaacgaaaataaaaaaaaaacacaaaaccgcgccgcccgcaccacaaaccttcgcctcgccccgccgattcctcaccctcgaaaaacaacataaataaatcatccttcctccgccgtcatcgcctaacatttttttctttctcgacgtactacaaaataaaaaacatttctcgcgcaaaattaccgaatttctccaatccccgaatataaaacgataactattcctccgaaaaaaatcgacgcacgcgaaacgcacgccgaataccgaaactaaaaaaatcccgaacgcgaactaaaataaaatcgaccgcgaaccgacccgccgcccgactccccgacacctcgcaacctcgcctcccctcctccattcttcctaccgatacccgaacaccacgaaacctacctcgcgaactcgcatctacaactccatccccgtttctccaaaaaccgcccgcttccttttcccccgcgtatactaaactcgaaactcgaatccgaccactaccacttcgtataacttccttctctatcaatacgacctttccccgtcgtaaaaact

SEQ ID NO: 36471 - DNA, 1003 bp, Artificial Sequence
  chemically treated genomic DNA (Homo sapiens) CpG-island No: 36471
ggaaagtaaggtagcggtgagttttttgttagtagatcgggtttaatatttttattttttgtttttttcgggttcgtttttcgttttttaggcggtcgttatgaagattttttgtcgcgttgtagtcggtttgtaaatatacgtttattcgtacgtttagtttcgttcgttatagagggaggggtggaaaaggtattgagtatgttcggtggggagggcggggcgttcgtgggttgcgagtcggggtcggagttttttaggtcggttttacgttttcgtcgttcgtcgttcggagtcggttcgttcgtagtgcgttcgttagtttcgtttcgtttcgtttcgtttcgtttttcgtcgttcgttttcgttcggtcgcgtcgtttgtagagtattagttgttttttttcgcggcgtttttcgcgggtttttttttggttgcgggagagacggaggtagagggaggatatagagtcgcgtcgttcgtattatagattttcgtttcgtttcgtcggttttttattttcggggagtaatatgggtaagttatttttttttcgtcgttatcgtttgatatttttttttttttcggcgtgttgtagggtgggaagtatttttcgcgtaaagttgtcggatttttttagttttcgggtgtgagacggtggttgttttttcggggagagtcggcgtacgcggaacgtacgtcgggtgtcggggttgggagggtttcgagcgcgggttggggtggggtcggtcgcggatcgattcgtcgttcggtttttcggtatttcgtagtttcgtttttttttttttattttttttgtcggtgttcgggtattacggagtttgtttcgcgggttcgtatttgtagttttattttcgtttttttagaggtcgttcgtttttttttttttcgcgtgtattgagttcgaggttcgggttcgattattattatttcgtgtaatttttttttttgttagtgcgattttttttcgtcgtggagatt

SEQ ID NO: 36472 - DNA, 1003 bp, Artificial Sequence
  chemically treated genomic DNA (Homo sapiens) CpG-island No: 36472
aatctccacgacgaaaaaaaatcgcactaacaaaaaaaaaaattacacgaaataataataatcgaacccgaacctcgaactcaatacacgcgaaaaaaaaaaaaacgaacgacctctaaaaaaacgaaaataaaactacaaatacgaacccgcgaaacaaactccgtaatacccgaacaccgacaaaaaaaataaaaaaaaaaaaacgaaactacgaaataccgaaaaaccgaacgacgaatcgatccgcgaccgaccccaccccaacccgcgctcgaaaccctcccaaccccgacacccgacgtacgttccgcgtacgccgactctccccgaaaaaacaaccaccgtctcacacccgaaaactaaaaaaatccgacaactttacgcgaaaaatacttcccaccctacaacacgccgaaaaaaaaaaaaatatcaaacgataacgacgaaaaaaaaataacttacccatattactccccgaaaataaaaaaccgacgaaacgaaacgaaaatctataatacgaacgacgcgactctatatcctccctctacctccgtctctcccgcaaccaaaaaaaaacccgcgaaaaacgccgcgaaaaaaaacaactaatactctacaaacgacgcgaccgaacgaaaacgaacgacgaaaaacgaaacgaaacgaaacgaaacgaaactaacgaacgcactacgaacgaaccgactccgaacgacgaacgacgaaaacgtaaaaccgacctaaaaaactccgaccccgactcgcaacccacgaacgccccgccctccccaccgaacatactcaataccttttccacccctccctctataacgaacgaaactaaacgtacgaataaacgtatatttacaaaccgactacaacgcgacaaaaaatcttcataacgaccgcctaaaaaacgaaaaacgaacccgaaaaaaacaaaaaataaaaatattaaacccgatctactaacaaaaaactcaccgctaccttactttcc

SEQ ID NO: 36473 - DNA, 651 bp, Artificial Sequence
  chemically treated genomic DNA (Homo sapiens) CpG-island No: 36473
  unsure (222)
gcgtcggtgacggacgtggtaacgagtgcggttcgtttcgtcgggagttgattggttgcgcggggcggtttcgagggttcggtcgtaggagtttcgcgtattttagttttgtagttttcggagttagtgtcgcgcgttcgtcgtttcgcgtttttttgttcgtcgtattttcgggagtcggggcgtatttagttcgtagcgtcgttttttcgttcgcgtcgntttcgatcgtaggtcgagggtcgttattggtcggggggatcgggtagtagtttgcggtcgcggagtcgggtaacgttggggattgcgttttttgttttcggaggtttttggaagtttgcggtaggacgcgcgcggggaggcggcggaggtagtttcgacgtcgcggagaatagggcgtagagtcggtatgggtatcgggcgtagcgaggggggtcgtcgcggggtagttttgggcgtgttgttggcgttgggcgcggcgtttttggtcgtgggttcggttagcgagtacgattacgtgagtttttagtcggatatcggttcgtattagagcgggcgtttttatattaagttattttagtgcgtggatattttcgcggatttgcggttgtgttataacgtgggttataagaagatggtgttgtttaattt

SEQ ID NO: 36474 - DNA, 651 bp, Artificial Sequence
  chemically treated genomic DNA (Homo sapiens) CpG-island No: 36474
  unsure (430)
aaattaaacaacaccatcttcttataacccacgttataacacaaccgcaaatccgcgaaaatatccacgcactaaaataacttaatataaaaacgcccgctctaatacgaaccgatatccgactaaaaactcacgtaatcgtactcgctaaccgaacccacgaccaaaaacgccgcgcccaacgccaacaacacgcccaaaactaccccgcgacgacccccctcgctacgcccgatacccataccgactctacgccctattctccgcgacgtcgaaactacctccgccgcctccccgcgcgcgtcctaccgcaaacttccaaaaacctccgaaaacaaaaaacgcaatccccaacgttacccgactccgcgaccgcaaactactacccgatccccccgaccaataacgaccctcgacctacgatcgaaancgacgcgaacgaaaaaacgacgctacgaactaaatacgccccgactcccgaaaatacgacgaacaaaaaaacgcgaaacgacgaacgcgcgacactaactccgaaaactacaaaactaaaatacgcgaaactcctacgaccgaaccctcgaaaccgccccgcgcaaccaatcaactcccgacgaaacgaaccgcactcgttaccacgtccgtcaccgacgc

SEQ ID NO: 36475 - DNA, 651 bp, Artificial Sequence
  chemically treated genomic DNA (Homo sapiens) CpG-island No: 36475
  unsure (430)
aggttgggtagtattatttttttgtagtttacgttgtggtatagtcgtaggttcgcggggatgtttacgtattgaggtggtttggtgtagaagcgttcgttttggtacgggtcgatgttcgattggaagtttacgtagtcgtattcgttggtcgagtttacggttagaagcgtcgcgtttagcgttagtagtacgtttagggttgtttcgcggcggtttttttcgttgcgttcgatgtttatgtcggttttgcgttttgtttttcgcgacgtcggggttgttttcgtcgttttttcgcgcgcgttttgtcgtaaatttttagggattttcggggataaaaggcgtagtttttagcgttgttcggtttcgcggtcgtaagttgttgttcggttttttcggttagtggcggttttcggtttgcggtcgaagncggcgcgggcggggaggcggcgttgcgggttgggtgcgtttcggttttcggaggtgcggcgagtaggaaggcgcggggcggcgggcgcgcggtattgatttcggaggttgtagggttggagtgcgcggggtttttacggtcgagttttcggagtcgtttcgcgtagttaattagttttcggcggggcgagtcgtattcgttattacgttcgttatcggcgt

SEQ ID NO: 36476 - DNA, 651 bp, Artificial Sequence
  chemically treated genomic DNA (Homo sapiens) CpG-island No: 36476
  unsure (222)
acgccgataacgaacgtaataacgaatacgactcgccccgccgaaaactaattaactacgcgaaacgactccgaaaactcgaccgtaaaaaccccgcgcactccaaccctacaacctccgaaatcaataccgcgcgcccgccgccccgcgccttcctactcgccgcacctccgaaaaccgaaacgcacccaacccgcaacgccgcctccccgcccgcgccgncttcgaccgcaaaccgaaaaccgccactaaccgaaaaaaccgaacaacaacttacgaccgcgaaaccgaacaacgctaaaaactacgccttttatccccgaaaatccctaaaaatttacgacaaaacgcgcgcgaaaaaacgacgaaaacaaccccgacgtcgcgaaaaacaaaacgcaaaaccgacataaacatcgaacgcaacgaaaaaaaccgccgcgaaacaaccctaaacgtactactaacgctaaacgcgacgcttctaaccgtaaactcgaccaacgaatacgactacgtaaacttccaatcgaacatcgacccgtaccaaaacgaacgcttctacaccaaaccacctcaatacgtaaacatccccgcgaacctacgactataccacaacgtaaactacaaaaaaataatactacccaacct

SEQ ID NO: 36477 - DNA, 538 bp, Artificial Sequence
  chemically treated genomic DNA (Homo sapiens) CpG-island No: 36477
atcggtttatttattcgtgtcgttggttttgcgaggtcgtgcgcgattcgtgcgagtcggttatgtagtttttcggtttttattggttcgagatgtttaagtgtgataagtttttcgagggggacgtttgtatcgttatgacgtcgtttaatgttatcgaagtttttaagttttaaggtaaggttgtttttttttacgtgcgcgagtcgttttttttatttttcggtcggagttgtaggagaattcgcgttattttacgttcgttcgtcgttgggtttcggtgttggggattgagggttcgaggttgttcgtatgttgtgtacgtgatttttaagcgcgtttggtttgttttaggtatcgtttagcgtttttcgcgatttaggtgtacggcggggttggttcgggagcggtagttttgcgttttggtttcgtagggattcgttgtggttttcggagtcgttttttttgggatttaatttcgttttttttatatttgaaataaagttttgcgttttaaataataggggagttttttttt

SEQ ID NO: 36478 - DNA, 538 bp, Artificial Sequence
  chemically treated genomic DNA (Homo sapiens) CpG-island No: 36478
aaaaaaaaactcccctattatttaaaacgcaaaactttatttcaaatataaaaaaaacgaaattaaatcccaaaaaaaacgactccgaaaaccacaacgaatccctacgaaaccaaaacgcaaaactaccgctcccgaaccaaccccgccgtacacctaaatcgcgaaaaacgctaaacgatacctaaaacaaaccaaacgcgcttaaaaatcacgtacacaacatacgaacaacctcgaaccctcaatccccaacaccgaaacccaacgacgaacgaacgtaaaataacgcgaattctcctacaactccgaccgaaaaataaaaaaaacgactcgcgcacgtaaaaaaaaacaaccttaccttaaaacttaaaaacttcgataacattaaacgacgtcataacgatacaaacgtccccctcgaaaaacttatcacacttaaacatctcgaaccaataaaaaccgaaaaactacataaccgactcgcacgaatcgcgcacgacctcgcaaaaccaacgacacgaataaataaaccgat

SEQ ID NO: 36479 - DNA, 538 bp, Artificial Sequence
  chemically treated genomic DNA (Homo sapiens) CpG-island No: 36479
agagggaagtttttttgttatttaaagcgtaaggttttgttttaggtatgggaaaggcgaagttggattttaggaagagcggtttcggggattatagcgagtttttgcgaggttaaggcgtagagttgtcgttttcgggttagtttcgtcgtgtatttgggtcgcgaggggcgttgagcgatatttgggatagattagacgcgtttaggaattacgtgtatagtatgcgagtaatttcgggtttttagtttttagtatcgggatttagcggcgggcgggcgtagggtggcgcgggtttttttgtagtttcggtcgggggatggagggggcggttcgcgtacgtgggaggaggtagttttattttggggtttggaggtttcggtggtattgggcggcgttatggcgatgtagacgtttttttcggggaatttgttatatttaagtatttcgggttagtagaagtcgaagaattgtatgatcggttcgtacgagtcgcgtacggtttcgtagagttagcgatacgggtagatgggtcggt

SEQ ID NO: 36480 - DNA, 538 bp, Artificial Sequence
  chemically treated genomic DNA (Homo sapiens) CpG-island No: 36480
accgacccatctacccgtatcgctaactctacgaaaccgtacgcgactcgtacgaaccgatcatacaattcttcgacttctactaacccgaaatacttaaatataacaaattccccgaaaaaaacgtctacatcgccataacgccgcccaataccaccgaaacctccaaaccccaaaataaaactacctcctcccacgtacgcgaaccgccccctccatcccccgaccgaaactacaaaaaaacccgcgccaccctacgcccgcccgccgctaaatcccgatactaaaaactaaaaacccgaaattactcgcatactatacacgtaattcctaaacgcgtctaatctatcccaaatatcgctcaacgcccctcgcgacccaaatacacgacgaaactaacccgaaaacgacaactctacgccttaacctcgcaaaaactcgctataatccccgaaaccgctcttcctaaaatccaacttcgcctttcccatacctaaaacaaaaccttacgctttaaataacaaaaaaacttccctct

SEQ ID NO: 36481 - DNA, 522 bp, Artificial Sequence
  chemically treated genomic DNA (Homo sapiens) CpG-island No: 36481
gcgtcgggagggagcgtatcgcgttacgtgttcgttcggcgtttcgtttttatttcggttacgtttttcgcgttttttttaaagtttcgttttttagtttcgttattttcgttcgtttcgtttttcgtagttttaagtttagcgttttcggaggcgcggacggtggggtttcgcgttttttgtgtcgggttttgatcgtcgcgcgcgtttatttattttagcggtcgcgggcggaggggcgtacgcgcgcgtagttttttcggagggcggtggggcgaatagtaacgcgcgtattttagtttttggttgttgtgttgagattagttcgcgcgttcgcgcgtttttttttcgaggattcggagtcgttcgcgtattcgttaggggtcgtcgtttcgagttttaggcggacgcgtacgcgttttcgtcgttcggattttagttagttcgtttttcggttatttttggatttttggttgtatttttttttttttttttttttttttttttttttttttttttttt

SEQ ID NO: 36482 - DNA, 522 bp, Artificial Sequence
  chemically treated genomic DNA (Homo sapiens) CpG-island No: 36482
aaaaaaaaaaaaaaaaaaaaaaaaaaaaaaaaaaaaaaaaaaaatacaaccaaaaatccaaaaataaccgaaaaacgaactaactaaaatccgaacgacgaaaacgcgtacgcgtccgcctaaaactcgaaacgacgacccctaacgaatacgcgaacgactccgaatcctcgaaaaaaaaacgcgcgaacgcgcgaactaatctcaacacaacaaccaaaaactaaaatacgcgcgttactattcgccccaccgccctccgaaaaaactacgcgcgcgtacgcccctccgcccgcgaccgctaaaataaataaacgcgcgcgacgatcaaaacccgacacaaaaaacgcgaaaccccaccgtccgcgcctccgaaaacgctaaacttaaaactacgaaaaacgaaacgaacgaaaataacgaaactaaaaaacgaaactttaaaaaaaacgcgaaaaacgtaaccgaaataaaaacgaaacgccgaacgaacacgtaacgcgatacgctccctcccgacgc

SEQ ID NO: 36483 - DNA, 522 bp, Artificial Sequence
  chemically treated genomic DNA (Homo sapiens) CpG-island No: 36483
aaaaggaaagggaggggagagagaaagagagaaaagaggaaagatataattaaaagtttagaggtggtcggggggcgagttggttggggttcgggcggcgggaacgcgtgcgcgttcgtttgagattcggggcggcggtttttggcgagtgcgcgggcggtttcgagttttcgagggagaggcgcgcgggcgcgcgggttagttttagtatagtagttaagagttagggtacgcgcgttgttgttcgttttatcgtttttcgaggggattgcgcgcgcgtgcgttttttcgttcgcggtcgttgaggtgaatgagcgcgcgcggcggttaaagttcgatataaaaggcgcggggttttatcgttcgcgttttcgggagcgttgagtttgaggttgcgaggggcggggcggacgagagtggcggggttgaggggcggggttttgagggaagcgcgaggggcgtggtcggggtgggggcggggcgtcgggcgggtacgtggcgcggtgcgttttttttcggcgt

SEQ ID NO: 36484 - DNA, 522 bp, Artificial Sequence
  chemically treated genomic DNA (Homo sapiens) CpG-island No: 36484
acgccgaaaaaaaacgcaccgcgccacgtacccgcccgacgccccgcccccaccccgaccacgcccctcgcgcttccctcaaaaccccgcccctcaaccccgccactctcgtccgccccgcccctcgcaacctcaaactcaacgctcccgaaaacgcgaacgataaaaccccgcgccttttatatcgaactttaaccgccgcgcgcgctcattcacctcaacgaccgcgaacgaaaaaacgcacgcgcgcgcaatcccctcgaaaaacgataaaacgaacaacaacgcgcgtaccctaactcttaactactatactaaaactaacccgcgcgcccgcgcgcctctccctcgaaaactcgaaaccgcccgcgcactcgccaaaaaccgccgccccgaatctcaaacgaacgcgcacgcgttcccgccgcccgaaccccaaccaactcgccccccgaccacctctaaacttttaattatatctttcctcttttctctctttctctctcccctccctttcctttt

SEQ ID NO: 36485 - DNA, 511 bp, Artificial Sequence
  chemically treated genomic DNA (Homo sapiens) CpG-island No: 36485
cgataggtcgattatcgtcgcgttttagcgaaagcggttttcgtcgaaaatgatttagagcgttgtcggtatttgttttacgagttgtatgataaagaagatagttataagtgcggcgacgatagttatgtttcgcgtttatcggaaggagttgattgggttgaaggtttttaagggtatcggtcgacgtttttttttatgcgatttttgtattaggaagtagtttagtagtaggttgaggtcgttgagtatcgtcgtcgtaaggaatggtgtatgtaaggagatggcgtttaatagtttttcggttacggggtttgttattatatttacgtcgaaataagcgtttatgagttcgaagtggcgagttcgattttttttatcggtgatgtcggcgatataggcgttagtaatcgtatttgtggcgtcggtgatgtcggttacgatgcgttcggcgtagaggatttgttgttttaaaattttatgtttagtaaaattattatttagaaatgaa

SEQ ID NO: 36486 - DNA, 511 bp, Artificial Sequence
  chemically treated genomic DNA (Homo sapiens) CpG-island No: 36486
ttcatttctaaataataattttactaaacataaaattttaaaacaacaaatcctctacgccgaacgcatcgtaaccgacatcaccgacgccacaaatacgattactaacgcctatatcgccgacatcaccgataaaaaaaatcgaactcgccacttcgaactcataaacgcttatttcgacgtaaatataataacaaaccccgtaaccgaaaaactattaaacgccatctccttacatacaccattccttacgacgacgatactcaacgacctcaacctactactaaactacttcctaatacaaaaatcgcataaaaaaaaacgtcgaccgatacccttaaaaaccttcaacccaatcaactccttccgataaacgcgaaacataactatcgtcgccgcacttataactatcttctttatcatacaactcgtaaaacaaataccgacaacgctctaaatcattttcgacgaaaaccgctttcgctaaaacgcgacgataatcgacctatcg

SEQ ID NO: 36487 - DNA, 511 bp, Artificial Sequence
  chemically treated genomic DNA (Homo sapiens) CpG-island No: 36487
tttatttttaaataataattttattggatataggattttagggtagtagattttttacgtcggacgtatcgtggtcggtattatcggcgttataggtgcggttgttggcgtttatatcgtcgatattatcgatggggaagatcgggttcgttatttcgggtttatgagcgtttgtttcggcgtgggtatggtggtaggtttcgtggtcgggggattgttgggcgttatttttttgtatgtattattttttgcggcggcggtgtttaacggttttaatttattattgggttgttttttaatgtaggagtcgtataagggagagcgtcgatcgatgtttttgagagtttttaatttagttagtttttttcggtgggcgcggggtatgattatcgtcgtcgtatttatgattgttttttttattatgtaattcgtaggataggtgtcggtagcgttttgggttattttcggcgaggatcgttttcgttggagcgcgacgatgatcggtttgtcg

SEQ ID NO: 36488 - DNA, 511 bp, Artificial Sequence
  chemically treated genomic DNA (Homo sapiens) CpG-island No: 36488
cgacaaaccgatcatcgtcgcgctccaacgaaaacgatcctcgccgaaaataacccaaaacgctaccgacacctatcctacgaattacataataaaaaaaacaatcataaatacgacgacgataatcataccccgcgcccaccgaaaaaaactaactaaattaaaaactctcaaaaacatcgatcgacgctctcccttatacgactcctacattaaaaaacaacccaataataaattaaaaccgttaaacaccgccgccgcaaaaaataatacatacaaaaaaataacgcccaacaatcccccgaccacgaaacctaccaccatacccacgccgaaacaaacgctcataaacccgaaataacgaacccgatcttccccatcgataatatcgacgatataaacgccaacaaccgcacctataacgccgataataccgaccacgatacgtccgacgtaaaaaatctactaccctaaaatcctatatccaataaaattattatttaaaaataaa

SEQ ID NO: 36489 - DNA, 529 bp, Artificial Sequence
  chemically treated genomic DNA (Homo sapiens) CpG-island No: 36489
tatgtcgacgtcgacgcgggcgtttagtagtgggtggaggcggatgtttttagcgtcgggtgtaaggtttttcgttggttttttttcgttaatgcgttcggttcgggattaagatatcgcgttttgagcgtcggcggcgattttagttttttttttcgcgtttcgtttttcgggaggacgcgtcgggcgtcgcgtcgtatttgtgttttacggggcggttttgttttatcgtttttcggaggcgatgttcggttcgagaggataggcgcgggcgtttttttcggggtagcgggggtagatttggcgtcgcggggacgtttttagcgcgttagacgtcgcgcgtttatttggggtcgtcgtttcgttatcggtaattttatttttcgtcgtagttttttttttcgtcgttatcgtaggagttatttggtcggtttcgtagtttcgcggttggtagtatggaggagtttcgggttcgttttgtttcggtttaggcggcggttttggagtagggaagcggggattggcgggt

SEQ ID NO: 36490 - DNA, 529 bp, Artificial Sequence
  chemically treated genomic DNA (Homo sapiens) CpG-island No: 36490
acccgccaatccccgcttccctactccaaaaccgccgcctaaaccgaaacaaaacgaacccgaaactcctccatactaccaaccgcgaaactacgaaaccgaccaaataactcctacgataacgacgaaaaaaaaaactacgacgaaaaataaaattaccgataacgaaacgacgaccccaaataaacgcgcgacgtctaacgcgctaaaaacgtccccgcgacgccaaatctacccccgctaccccgaaaaaaacgcccgcgcctatcctctcgaaccgaacatcgcctccgaaaaacgataaaacaaaaccgccccgtaaaacacaaatacgacgcgacgcccgacgcgtcctcccgaaaaacgaaacgcgaaaaaaaaaactaaaatcgccgccgacgctcaaaacgcgatatcttaatcccgaaccgaacgcattaacgaaaaaaaaccaacgaaaaaccttacacccgacgctaaaaacatccgcctccacccactactaaacgcccgcgtcgacgtcgacata

SEQ ID NO: 36491 - DNA, 529 bp, Artificial Sequence
  chemically treated genomic DNA (Homo sapiens) CpG-island No: 36491
gttcgttagttttcgtttttttgttttagagtcgtcgtttgggtcggggtagggcgggttcggggtttttttatgttgttagtcgcggggttgcggagtcgattaagtggtttttgcgatggcggcggaagaggaggttgcggcgggaggtgaggttgtcggtggcgaggcgacggttttaggtgggcgcgcggcgtttgacgcgttgggggcgttttcgcgacgttaggtttgttttcgttgtttcgagggaagcgttcgcgtttgttttttcgggtcgggtatcgttttcgaggggcggtgggataaggtcgtttcgtggggtataggtgcggcgcggcgttcggcgcgttttttcggggagcgggacgcggggaggggagttggggtcgtcgtcggcgtttaggacgcggtgttttggtttcgggtcgggcgtattggcgaaagggagttagcgggggattttgtattcggcgttgggagtattcgtttttatttattgttgggcgttcgcgtcggcgtcggtatg

SEQ ID NO: 36492 - DNA, 529 bp, Artificial Sequence
  chemically treated genomic DNA (Homo sapiens) CpG-island No: 36492
cataccgacgccgacgcgaacgcccaacaataaataaaaacgaatactcccaacgccgaatacaaaatcccccgctaactccctttcgccaatacgcccgacccgaaaccaaaacaccgcgtcctaaacgccgacgacgaccccaactcccctccccgcgtcccgctccccgaaaaaacgcgccgaacgccgcgccgcacctataccccacgaaacgaccttatcccaccgcccctcgaaaacgatacccgacccgaaaaaacaaacgcgaacgcttccctcgaaacaacgaaaacaaacctaacgtcgcgaaaacgcccccaacgcgtcaaacgccgcgcgcccacctaaaaccgtcgcctcgccaccgacaacctcacctcccgccgcaacctcctcttccgccgccatcgcaaaaaccacttaatcgactccgcaaccccgcgactaacaacataaaaaaaccccgaacccgccctaccccgacccaaacgacgactctaaaacaaaaaaacgaaaactaacgaac

SEQ ID NO: 36493 - DNA, 696 bp, Artificial Sequence
  chemically treated genomic DNA (Homo sapiens) CpG-island No: 36493
  unsure (196)
gatttggaagtatgttcgcgtgataatttaaaaattgtattcgattggcgttgtcgtgtcgatattatacgttaagtggacggtgttgcgttttatatgtttgcgcgggcgaatatcgatattcgtgacgtatcgttgtatgtatcgagtagttattgattttttgcgtatttcgtgtttatcgaacgcgttggtnataggttggatgattagtgatgcgcgaagtcggtttagttcgaaattatcggagttatagttataagatgtagattcgggatatttgttatatttgagtcgagtttggtaattcggataaaattttgttttttagtcgttgttatcgtatagatagatgcgattattgagacggattggacgtcggaaatggtgtaattagtataaagattatgatgttatggtcggtcggtttcggcgtagaattcgtcgggagttgcggtgagatagttagtatcgttttttgattgtttttaatttgtggagggattcgagttacgtgtgttcgttattcgcgggagaatgcgtaggagacgtttgtgaatggcgcgtatgatataagtgttagtgtgatcgtgcgcgtgtatggcgcgtgatgattttggtgttatttgtttttagggttaaaatggtagatttggagttataatcgtagaatcgcgaatggagttagtttttaaa

SEQ ID NO: 36494 - DNA, 696 bp, Artificial Sequence
  chemically treated genomic DNA (Homo sapiens) CpG-island No: 36494
  unsure (501)
tttaaaaactaactccattcgcgattctacgattataactccaaatctaccattttaaccctaaaaacaaataacaccaaaatcatcacgcgccatacacgcgcacgatcacactaacacttatatcatacgcgccattcacaaacgtctcctacgcattctcccgcgaataacgaacacacgtaactcgaatccctccacaaattaaaaacaatcaaaaaacgatactaactatctcaccgcaactcccgacgaattctacgccgaaaccgaccgaccataacatcataatctttatactaattacaccatttccgacgtccaatccgtctcaataatcgcatctatctatacgataacaacgactaaaaaacaaaattttatccgaattaccaaactcgactcaaatataacaaatatcccgaatctacatcttataactataactccgataatttcgaactaaaccgacttcgcgcatcactaatcatccaacctatnaccaacgcgttcgataaacacgaaatacgcaaaaaatcaataactactcgatacatacaacgatacgtcacgaatatcgatattcgcccgcgcaaacatataaaacgcaacaccgtccacttaacgtataatatcgacacgacaacgccaatcgaatacaatttttaaattatcacgcgaacatacttccaaatc

SEQ ID NO: 36495 - DNA, 696 bp, Artificial Sequence
  chemically treated genomic DNA (Homo sapiens) CpG-island No: 36495
  unsure (501)
tttgggaattggttttattcgcggttttgcgattatggttttaggtttgttattttggttttgggagtagatgatattagggttattacgcgttatgtacgcgtacggttatattagtatttgtgttatgcgcgttatttataggcgttttttgcgtattttttcgcggataacgggtatacgtggttcgaatttttttataggttagagatagttaggaagcggtattaattgttttatcgtagttttcgacgggttttacgtcggggtcggtcggttatgatattatggtttttgtattagttatattattttcgacgtttagttcgttttaatggtcgtatttatttgtgcgatggtagcggttggagagtaggattttattcggattgttagattcgatttagatatggtagatgtttcgagtttgtattttatagttgtgatttcggtaatttcgagttaggtcggtttcgcgtattattggttatttagtttgtnattagcgcgttcggtaagtacggagtacgtagaggattaatggttattcgatatatgtagcggtgcgttacgaatatcggtattcgttcgcgtagatatgtgaaacgtaatatcgtttatttggcgtatgatgtcggtacggtagcgttagtcggatataatttttgggttattacgcgagtatgtttttaggtt

SEQ ID NO: 36496 - DNA, 696 bp, Artificial Sequence
  chemically treated genomic DNA (Homo sapiens) CpG-island No: 36496
  unsure (196)
aacctaaaaacatactcgcgtaataacccaaaaattatatccgactaacgctaccgtaccgacatcatacgccaaataaacgatattacgtttcacatatctacgcgaacgaataccgatattcgtaacgcaccgctacatatatcgaataaccattaatcctctacgtactccgtacttaccgaacgcgctaatnacaaactaaataaccaataatacgcgaaaccgacctaactcgaaattaccgaaatcacaactataaaatacaaactcgaaacatctaccatatctaaatcgaatctaacaatccgaataaaatcctactctccaaccgctaccatcgcacaaataaatacgaccattaaaacgaactaaacgtcgaaaataatataactaatacaaaaaccataatatcataaccgaccgaccccgacgtaaaacccgtcgaaaactacgataaaacaattaataccgcttcctaactatctctaacctataaaaaaattcgaaccacgtatacccgttatccgcgaaaaaatacgcaaaaaacgcctataaataacgcgcataacacaaatactaatataaccgtacgcgtacataacgcgtaataaccctaatatcatctactcccaaaaccaaaataacaaacctaaaaccataatcgcaaaaccgcgaataaaaccaattcccaaa

SEQ ID NO: 36497 - DNA, 642 bp, Artificial Sequence
  chemically treated genomic DNA (Homo sapiens) CpG-island No: 36497
atttacggcggttttgggcgggtttatttatcgtgtcggagacgcgtttttattcgttcgcggtttcgcggttcgtacggattgggcgtagcgggggtttttaaatttgtttcgtaggtcggggatttatcgttttagcggtgttttcggttcggtattcgatttttttttttaggtatcgtcgtttcggttttatagtttcggttttatttcgtttttcgcgcgtttatttttcgtcgcggcgtaacgtcggtcgcggaagattagtttatcgtcgtattttcgtcgttttagcggaaattttttcgagttttttgtttttgttaagagtttcgacgtttttaagggggcggggtacgtgatttttcgcggagggattttgtattttttttacggattttaaaaaagagtttcgtttttaagttgtcgtttcgagtttttttcgcggtttttttagttttttttggttttgtcgagttagttttttcgtttggcgttagggcggagagcggaatttgggcgtcgggtttatttcgcgattgatttgcgttggggaacgggggaagatagaggggcggaaggagatcgtttttggttttattacgttttttaaaggttttcgatttgttttgttttcgttgt

SEQ ID NO: 36498 - DNA, 642 bp, Artificial Sequence
  chemically treated genomic DNA (Homo sapiens) CpG-island No: 36498
acaacgaaaacaaaacaaatcgaaaacctttaaaaaacgtaataaaaccaaaaacgatctccttccgcccctctatcttcccccgttccccaacgcaaatcaatcgcgaaataaacccgacgcccaaattccgctctccgccctaacgccaaacgaaaaaactaactcgacaaaaccaaaaaaaactaaaaaaaccgcgaaaaaaactcgaaacgacaacttaaaaacgaaactcttttttaaaatccgtaaaaaaaatacaaaatccctccgcgaaaaatcacgtaccccgcccccttaaaaacgtcgaaactcttaacaaaaacaaaaaactcgaaaaaatttccgctaaaacgacgaaaatacgacgataaactaatcttccgcgaccgacgttacgccgcgacgaaaaataaacgcgcgaaaaacgaaataaaaccgaaactataaaaccgaaacgacgatacctaaaaaaaaaaatcgaataccgaaccgaaaacaccgctaaaacgataaatccccgacctacgaaacaaatttaaaaacccccgctacgcccaatccgtacgaaccgcgaaaccgcgaacgaataaaaacgcgtctccgacacgataaataaacccgcccaaaaccgccgtaaat

SEQ ID NO: 36499 - DNA, 642 bp, Artificial Sequence
  chemically treated genomic DNA (Homo sapiens) CpG-island No: 36499
atagcgaaaataaaataaatcggggatttttaaaaggcgtaatgagattagaaacgattttttttcgtttttttgttttttttcgttttttaacgtagattaatcgcggaataagttcgacgtttagatttcgtttttcgttttagcgttaggcgggaggattggttcggtaaagttaaggagagttagggaggtcgcgagagaggttcgagacggtagtttaggggcgggatttttttttaaagttcgtggaggaagtgtaggattttttcgcggggagttacgtgtttcgtttttttgggggcgtcgaaatttttaataaaaataaggggttcggggaggttttcgttgaggcggcgggggtgcggcggtgggttggtttttcgcggtcggcgttgcgtcgcggcggagggtgggcgcgcggggagcgggatggagtcggggttgtgaggtcgaggcggcggtgtttgggaggaagggtcggatgtcggatcgggggtatcgttgaggcggtgggttttcgatttgcgagataggtttggaagttttcgttgcgtttagttcgtgcggatcgcgaggtcgcgggcgggtggaggcgcgttttcggtacggtgagtggattcgtttagggtcgtcgtgggt

SEQ ID NO: 36500 - DNA, 642 bp, Artificial Sequence
  chemically treated genomic DNA (Homo sapiens) CpG-island No: 36500
acccacgacgaccctaaacgaatccactcaccgtaccgaaaacgcgcctccacccgcccgcgacctcgcgatccgcacgaactaaacgcaacgaaaacttccaaacctatctcgcaaatcgaaaacccaccgcctcaacgatacccccgatccgacatccgacccttcctcccaaacaccgccgcctcgacctcacaaccccgactccatcccgctccccgcgcgcccaccctccgccgcgacgcaacgccgaccgcgaaaaaccaacccaccgccgcacccccgccgcctcaacgaaaacctccccgaaccccttatttttattaaaaatttcgacgcccccaaaaaaacgaaacacgtaactccccgcgaaaaaatcctacacttcctccacgaactttaaaaaaaaatcccgcccctaaactaccgtctcgaacctctctcgcgacctccctaactctccttaactttaccgaaccaatcctcccgcctaacgctaaaacgaaaaacgaaatctaaacgtcgaacttattccgcgattaatctacgttaaaaaacgaaaaaaaacaaaaaaacgaaaaaaaatcgtttctaatctcattacgccttttaaaaatccccgatttattttattttcgctat

SEQ ID NO: 36501 - DNA, 501 bp, Artificial Sequence
  chemically treated genomic DNA (Homo sapiens) CpG-island No: 36501
agcgttcggtcgttttttttttttttaggcgtatgcgtagcgtatttttcggttatcgtacgtttttttagtgggggtttagagacgttgacgttatcgtgcggtttgtaagtaattttttcgtttttttaaggaaaatgagtttacggattttcggttttttttagttacgagaaaacgttttttttttttttattttagtgttaacgatttttttagttcgttttttttcggtcgtatttttttgtattttcgttggatcgggaaggcggcggggaggaataggaagggtgaaagattaagttcgcgtagtttataaggagtgggcgagtttaggaatcggttcgcgagggcggagtcgaggaagtcggtatttttttttttttttttttttttttttttttttttttagtttttttcgcgagcggacgcggtagcgtttttgtttcgtttttttttattttttttttttttttttttttttttttttttttttttttt

SEQ ID NO: 36502 - DNA, 501 bp, Artificial Sequence
  chemically treated genomic DNA (Homo sapiens) CpG-island No: 36502
aaaaaaaaaaaaaaaaaaaaaaaaaaaaaaaaaaaaaaaaataaaaaaaaacgaaacaaaaacgctaccgcgtccgctcgcgaaaaaaactaaaaaaaaaaaaaaaaaaaaaaaaaaaaaaaaaaaaataccgacttcctcgactccgccctcgcgaaccgattcctaaactcgcccactccttataaactacgcgaacttaatctttcacccttcctattcctccccgccgccttcccgatccaacgaaaatacaaaaaaatacgaccgaaaaaaaacgaactaaaaaaatcgttaacactaaaataaaaaaaaaaaaaacgttttctcgtaactaaaaaaaaccgaaaatccgtaaactcattttccttaaaaaaacgaaaaaattacttacaaaccgcacgataacgtcaacgtctctaaacccccactaaaaaaacgtacgataaccgaaaaatacgctacgcatacgcctaaaaaaaaaaaaaacgaccgaacgct

SEQ ID NO: 36503 - DNA, 501 bp, Artificial Sequence
  chemically treated genomic DNA (Homo sapiens) CpG-island No: 36503
gaaaagaaaaaaaaaaaaagaaaggggaaaggggggaaaaataagaaaaagcgagatagaggcgttgtcgcgttcgttcgcggggaaggttggggagggaggggaagagaggggaagggaggaagaagtgtcggttttttcggtttcgttttcgcggatcgatttttagattcgtttattttttgtaaattacgcggatttggttttttattttttttgttttttttcgtcgttttttcggtttaacgaaagtatagagaagtgcggtcgaaaggagacgggttggggaagtcgttggtattaggatggaaggagggaggacgttttttcgtggttaagaaaagtcgaaggttcgtggatttattttttttgaaggagcggaagggttgtttgtagatcgtacggtgacgttagcgtttttgggtttttattgagggggcgtgcggtggtcggagagtgcgttgcgtatgcgtttggggaagaaagaagcggtcgagcgtt

SEQ ID NO: 36504 - DNA, 501 bp, Artificial Sequence
  chemically treated genomic DNA (Homo sapiens) CpG-island No: 36504
aacgctcgaccgcttctttcttccccaaacgcatacgcaacgcactctccgaccaccgcacgccccctcaataaaaacccaaaaacgctaacgtcaccgtacgatctacaaacaacccttccgctccttcaaaaaaaataaatccacgaaccttcgacttttcttaaccacgaaaaaacgtcctccctccttccatcctaataccaacgacttccccaacccgtctcctttcgaccgcacttctctatactttcgttaaaccgaaaaaacgacgaaaaaaaacaaaaaaaataaaaaaccaaatccgcgtaatttacaaaaaataaacgaatctaaaaatcgatccgcgaaaacgaaaccgaaaaaaccgacacttcttcctcccttcccctctcttcccctccctccccaaccttccccgcgaacgaacgcgacaacgcctctatctcgctttttcttatttttcccccctttcccctttctttttttttttttcttttc

SEQ ID NO: 36505 - DNA, 528 bp, Artificial Sequence
  chemically treated genomic DNA (Homo sapiens) CpG-island No: 36505
tgggttcgagttcgagtcgtagtcgggggagttagttagttttcggttaaggtagtaggttagttttaggaagggcgggcgattgagtcgagggagtcggcggttgggtttttttttcggttcgcgattttcggcgtcgtcgtcgtcgttatcgttatcgttatcgttttcgttttgtcgtcgtcgtcgttgtagagtatcgtagtttcgtcgcgttttcgcgttcgcgtcgttagtcgtttgggagttcgagcgtcgagttcggggcggaggagaggggcgttggcgcgagagttcgggcgagggagtcgcgaagggagaagggggcgggcggagggaggagtagggagagtgggagaagggggagggagagaggagagcgagggagagttggagagagcgagagtaaagagcgagcgagggagaggagagagagagagaggagagagaaagatatacgtacgtagagatatacggttattggaattttattagaaaaaagtgagtcgagtaagggttagcgggaga

SEQ ID NO: 36506 - DNA, 528 bp, Artificial Sequence
  chemically treated genomic DNA (Homo sapiens) CpG-island No: 36506
tctcccgctaacccttactcgactcacttttttctaataaaattccaataaccgtatatctctacgtacgtatatctttctctctcctctctctctctctcctctccctcgctcgctctttactctcgctctctccaactctccctcgctctcctctctccctcccccttctcccactctccctactcctccctccgcccgcccccttctcccttcgcgactccctcgcccgaactctcgcgccaacgcccctctcctccgccccgaactcgacgctcgaactcccaaacgactaacgacgcgaacgcgaaaacgcgacgaaactacgatactctacaacgacgacgacgacaaaacgaaaacgataacgataacgataacgacgacgacgacgccgaaaatcgcgaaccgaaaaaaaaacccaaccgccgactccctcgactcaatcgcccgcccttcctaaaactaacctactaccttaaccgaaaactaactaactcccccgactacgactcgaactcgaaccca

SEQ ID NO: 36507 - DNA, 528 bp, Artificial Sequence
  chemically treated genomic DNA (Homo sapiens) CpG-island No: 36507
tttttcgttaatttttgttcggtttatttttttttaatggaattttagtgatcgtgtgtttttgcgtgcgtgtgtttttttttttttttttttttttttttttttttttcgttcgttttttgttttcgttttttttagttttttttcgtttttttttttttttttttttttttttattttttttgttttttttttcgttcgttttttttttttttcgcggttttttcgttcgggttttcgcgttagcgtttttttttttcgtttcgggttcggcgttcgggtttttaggcggttggcggcgcgggcgcgggagcgcggcggagttacgatgttttgtagcggcggcggcgataaggcgaaggcggtggcggtggcggtggcggcggcggcggcgtcggggatcgcgggtcgagaggagagtttagtcgtcggttttttcggtttaatcgttcgttttttttgggattgatttgttgttttggtcggaaattgattggttttttcggttacggttcgggttcgaattta

SEQ ID NO: 36508 - DNA, 528 bp, Artificial Sequence
  chemically treated genomic DNA (Homo sapiens) CpG-island No: 36508
taaattcgaacccgaaccgtaaccgaaaaaaccaatcaatttccgaccaaaacaacaaatcaatcccaaaaaaaacgaacgattaaaccgaaaaaaccgacgactaaactctcctctcgacccgcgatccccgacgccgccgccgccgccaccgccaccgccaccgccttcgccttatcgccgccgccgctacaaaacatcgtaactccgccgcgctcccgcgcccgcgccgccaaccgcctaaaaacccgaacgccgaacccgaaacgaaaaaaaaaaacgctaacgcgaaaacccgaacgaaaaaaccgcgaaaaaaaaaaaaaacgaacgaaaaaaaaaacaaaaaaaataaaaaaaaaaaaaaaaaaaaaaaaaaacgaaaaaaaactaaaaaaaacgaaaacaaaaaacgaacgaaaaaaaaaaaaaaaaaaaaaaaaaaaaaaaaaaacacacgcacgcaaaaacacacgatcactaaaattccattaaaaaaaaataaaccgaacaaaaattaacgaaaaa

SEQ ID NO: 36509 - DNA, 659 bp, Artificial Sequence
  chemically treated genomic DNA (Homo sapiens) CpG-island No: 36509
ttatcgcgaaaggtcggtttggttgcgatagtttgggtaagaggtgtaggtcggtttggttttttgttattcggagttgggtaagcgggtgggagaatagcgaagatagcgtgagtttgggtcgttgtttcgaggttttcgttcggttttttttgtcgattcgttacgtttgtttggatttaatttttaggttgtcggcgttcgttcgttcgttggtttcgcggtgtgagagggaagtattcgtgtttgtggttggtggttggcgtttggagggttcgtatattcgttcggtcgcgtcgtttgttcgcggtagtcgcgtttttgaatcgcggagtcgtgtttgtgtttgattcgcgggcgtcggtggcgcgcggtcgaggtcggtgtcggcggggcggggcggtcgcggcggaggtagaggaagagggagcgggagttttgcgaggtcgggcgtcgttatggaattgggttcggagttttcgtatcgtcgtcgtatgtttttcgtttgtagtttttttttcgcgtcgtagttcgtcgtgaaggcgttatttggcgttttagtcgtcgggggattgtcgtttgttattaatttgatcgttattatggattagttgtagggtttgggtaggtaaggagagatcggcgggcggtgtttcggg

SEQ ID NO: 36510 - DNA, 659 bp, Artificial Sequence
  chemically treated genomic DNA (Homo sapiens) CpG-island No: 36510
cccgaaacaccgcccgccgatctctccttacctacccaaaccctacaactaatccataataacgatcaaattaataacaaacgacaatcccccgacgactaaaacgccaaataacgccttcacgacgaactacgacgcgaaaaaaaaactacaaacgaaaaacatacgacgacgatacgaaaactccgaacccaattccataacgacgcccgacctcgcaaaactcccgctccctcttcctctacctccgccgcgaccgccccgccccgccgacaccgacctcgaccgcgcgccaccgacgcccgcgaatcaaacacaaacacgactccgcgattcaaaaacgcgactaccgcgaacaaacgacgcgaccgaacgaatatacgaaccctccaaacgccaaccaccaaccacaaacacgaatacttccctctcacaccgcgaaaccaacgaacgaacgaacgccgacaacctaaaaattaaatccaaacaaacgtaacgaatcgacaaaaaaaaccgaacgaaaacctcgaaacaacgacccaaactcacgctatcttcgctattctcccacccgcttacccaactccgaataacaaaaaaccaaaccgacctacacctcttacccaaactatcgcaaccaaaccgacctttcgcgataa

SEQ ID NO: 36511 - DNA, 659 bp, Artificial Sequence
  chemically treated genomic DNA (Homo sapiens) CpG-island No: 36511
ttcggagtatcgttcgtcggtttttttttatttgtttagattttgtagttggtttatagtgacggttaggttggtgataggcgatagtttttcggcggttgaagcgttaaatagcgtttttacgacgggttgcgacgcgggaggggggttgtaggcgaagagtatgcggcggcggtgcgggggtttcgggtttagttttatggcggcgttcggtttcgtagagttttcgttttttttttttttgttttcgtcgcgatcgtttcgtttcgtcgatatcggtttcggtcgcgcgttatcggcgttcgcgggttaaatataaatacgatttcgcggtttagggacgcggttgtcgcgggtaagcggcgcggtcgggcgggtgtgcggattttttaggcgttagttattagttataggtacgggtgttttttttttatatcgcgaggttagcgggcgggcgggcgtcggtaatttgaagattaaatttaaataaacgtggcgggtcggtaagagaagtcgggcgagagtttcgaggtaacggtttaggtttacgttgttttcgttgtttttttattcgtttgtttagtttcgggtagtagaaaattaagtcgatttatattttttatttaggttgtcgtagttaggtcggtttttcgcggtaa

SEQ ID NO: 36512 - DNA, 659 bp, Artificial Sequence
  chemically treated genomic DNA (Homo sapiens) CpG-island No: 36512
ttaccgcgaaaaaccgacctaactacgacaacctaaataaaaaatataaatcgacttaattttctactacccgaaactaaacaaacgaataaaaaaacaacgaaaacaacgtaaacctaaaccgttacctcgaaactctcgcccgacttctcttaccgacccgccacgtttatttaaatttaatcttcaaattaccgacgcccgcccgcccgctaacctcgcgatataaaaaaaaaacacccgtacctataactaataactaacgcctaaaaaatccgcacacccgcccgaccgcgccgcttacccgcgacaaccgcgtccctaaaccgcgaaatcgtatttatatttaacccgcgaacgccgataacgcgcgaccgaaaccgatatcgacgaaacgaaacgatcgcgacgaaaacaaaaaaaaaaaaaacgaaaactctacgaaaccgaacgccgccataaaactaaacccgaaacccccgcaccgccgccgcatactcttcgcctacaacccccctcccgcgtcgcaacccgtcgtaaaaacgctatttaacgcttcaaccgccgaaaaactatcgcctatcaccaacctaaccgtcactataaaccaactacaaaatctaaacaaataaaaaaaaaccgacgaacgatactccgaa

SEQ ID NO: 36513 - DNA, 761 bp, Artificial Sequence
  chemically treated genomic DNA (Homo sapiens) CpG-island No: 36513
  unsure (524, 671)
gttagtagttcgggtagttttacgtttagtacgttttcggggtttttaggcgtcgcgcgtttttagtttcgtcggcgttcgttttcgggtgttcgtttcgggcgtcgtttatcgtttcgtagtgtcgcgttgttttttcggtcgaggcgggttgggtgttcgcgttgatttcgggcggtttagttcgcgttagcgtttttttgaggggacgcggtttttagcgttcgttttcgttcgggacggtggcgttattacgcggggcgggagcggcgtgggtttggggttggtacgttatcgggagcggcggggtggatattgacgttatcgcgcggggcggtcgtgggcgggtcggagatattggagtgggtcgggtagcgtacgacgttattacgcgagcgttgtgtttcggttggcgggacggggacgggaaaggagagtgttcggtgcgtgggttgcgcgtgttgcgttttttcgagttttacgggtattttttttatttgtttgtggttcggagtacgcgcggntttttgttcggcgtcgcgttcgacgcgttttcgggtgcgtggttgcgttcgtttgaggttcgggatagtgtcgtcgttaaatttaaaggttgatcgtttttgggagttgttggtaaacgtgggggtgcgcggtcgttgagttatcgngggtggcggtgggatgagagggcggcgtttttgtttgcggttattttgcggttaggaggacgggtgagagggcgtcgcgtttcggaggtt

SEQ ID NO: 36514 - DNA, 761 bp, Artificial Sequence
  chemically treated genomic DNA (Homo sapiens) CpG-island No: 36514
  unsure (91, 238)
aacctccgaaacgcgacgccctctcacccgtcctcctaaccgcaaaataaccgcaaacaaaaacgccgccctctcatcccaccgccacccncgataactcaacgaccgcgcacccccacgtttaccaacaactcccaaaaacgatcaacctttaaatttaacgacgacactatcccgaacctcaaacgaacgcaaccacgcacccgaaaacgcgtcgaacgcgacgccgaacaaaaanccgcgcgtactccgaaccacaaacaaataaaaaaaatacccgtaaaactcgaaaaaacgcaacacgcgcaacccacgcaccgaacactctcctttcccgtccccgtcccgccaaccgaaacacaacgctcgcgtaataacgtcgtacgctacccgacccactccaatatctccgacccgcccacgaccgccccgcgcgataacgtcaatatccaccccgccgctcccgataacgtaccaaccccaaacccacgccgctcccgccccgcgtaataacgccaccgtcccgaacgaaaacgaacgctaaaaaccgcgtcccctcaaaaaaacgctaacgcgaactaaaccgcccgaaatcaacgcgaacacccaacccgcctcgaccgaaaaaacaacgcgacactacgaaacgataaacgacgcccgaaacgaacacccgaaaacgaacgccgacgaaactaaaaacgcgcgacgcctaaaaaccccgaaaacgtactaaacgtaaaactacccgaactactaac

SEQ ID NO: 36515 - DNA, 761 bp, Artificial Sequence
  chemically treated genomic DNA (Homo sapiens) CpG-island No: 36515
  unsure (91, 238)
gattttcgaagcgcggcgtttttttattcgtttttttggtcgtaaaatgatcgtaaatagggacgtcgtttttttattttatcgttatttncggtggtttagcggtcgcgtatttttacgtttgttagtagtttttagaggcggttagtttttgggtttgacgacggtattatttcgggttttaggcgagcgtagttacgtattcggaagcgcgtcgggcgcgacgtcgagtaaaaantcgcgcgtgtttcgagttataggtaagtggggagggtgttcgtggagttcgaggggacgtagtacgcgtagtttacgtatcgagtatttttttttttcgttttcgtttcgttagtcgagatataacgttcgcgtgatgacgtcgtgcgttgttcggtttattttagtattttcgattcgtttacggtcgtttcgcgcgatgacgttagtatttatttcgtcgttttcggtgacgtgttagttttaggtttacgtcgttttcgtttcgcgtgatgacgttatcgtttcgggcggaggcgggcgttgggagtcgcgtttttttagaggggcgttggcgcgggttgagtcgttcgggattagcgcgagtatttagttcgtttcggtcgggagggtagcgcggtattgcggggcgatgagcggcgttcggggcgagtattcggaggcgggcgtcggcggggttgggggcgcgcggcgtttgagaatttcgggggcgtgttgagcgtggagttgttcgggttgttggt

SEQ ID NO: 36516 - DNA, 761 bp, Artificial Sequence
  chemically treated genomic DNA (Homo sapiens) CpG-island No: 36516
  unsure (524, 671)
accaacaacccgaacaactccacgctcaacacgcccccgaaattctcaaacgccgcgcgcccccaaccccgccgacgcccgcctccgaatactcgccccgaacgccgctcatcgccccgcaataccgcgctaccctcccgaccgaaacgaactaaatactcgcgctaatcccgaacgactcaacccgcgccaacgcccctctaaaaaaacgcgactcccaacgcccgcctccgcccgaaacgataacgtcatcacgcgaaacgaaaacgacgtaaacctaaaactaacacgtcaccgaaaacgacgaaataaatactaacgtcatcgcgcgaaacgaccgtaaacgaatcgaaaatactaaaataaaccgaacaacgcacgacgtcatcacgcgaacgttatatctcgactaacgaaacgaaaacgaaaaaaaaaaatactcgatacgtaaactacgcgtactacgtcccctcgaactccacgaacaccctccccacttacctataactcgaaacacgcgcgantttttactcgacgtcgcgcccgacgcgcttccgaatacgtaactacgctcgcctaaaacccgaaataataccgtcgtcaaacccaaaaactaaccgcctctaaaaactactaacaaacgtaaaaatacgcgaccgctaaaccaccgnaaataacgataaaataaaaaaacgacgtccctatttacgatcattttacgaccaaaaaaacgaataaaaaaacgccgcgcttcgaaaatc

SEQ ID NO: 36517 - DNA, 1263 bp, Artificial Sequence
  chemically treated genomic DNA (Homo sapiens) CpG-island No: 36517
gcgttttgcggatcgattttcgggtgaagtcgtttatttttttcgaggtcgagatggcggcgttggtagttttcgtcggcggcgacgacgacgatattttcgcggttttgacgtttggtagtttcggttgttgtttgtaaggtacgggtagcggcggagacggtaggaggaggcgggggagaggcgcggggtgttcgcgtttttgcgtttcggttttacggtttttcggtttcgggacgtcgtcgagttttttttcgtcgttcgttaacgttttacggttatattttagcgtcggaggtttttggttttcggcgcgcggcgagttttcggggttgacggagggaagggcgggggcggaggggggtgaagaagttgttgattttgggcgcgtagagcgggtggaagagagttcgaagtttagataattgaggcgggggtacgggggtgcgggtgtcgagcgcgtttttcgtcgtttttgttttcgtcgttagttagtcggtcggttagtattttagcggtcgttgttagcgtagttcgttttgtttggagtttttttttagggcgttgttatcgcgggttttttcggagttattgtcgcggtgttcgtttttttcggttaacgtcggttttttatcgttcggggcgttgtttcgtagtttcggttttttgcgtgtatatattcgttttttgtcgcgttgggcggttcgaatttttttttttacgcgttcgtcggtcgtttacggagaattttaggcgagcgatcgttataatttgagaaggtggttggtataggcgattggggagtgtgtgcgcgtgtgcgcgcgttagggcgcgcggttcggggaggggtttcgtaaggggtgggaaggaggggtttgattgataattttcgcggggtttcgttcgttttttggtgcggcggcggggaagggggcgggaaagtatgttagtttttttagttaattatacggttaagcggtagcgacggcgtgaggtgcggttttttgaggtagaggagtggggcgggttgtgtgacgggtttcggttatagttaatcgtaagtgaagacggcgagcggggtgtttttgcgttagaataaatgcggtaaatcgtttgggagggaggggaagcgtttttttattagcgggtatttttgcgtttacgcgcgattgttttaggttgttattgtttttttgatcgtttacgagaagattgggaaatttgagagggtgcgtttagagagtaaaatagagcgtttttttt

SEQ ID NO: 36518 - DNA, 1263 bp, Artificial Sequence
  chemically treated genomic DNA (Homo sapiens) CpG-island No: 36518
aaaaaaaacgctctattttactctctaaacgcaccctctcaaatttcccaatcttctcgtaaacgatcaaaaaaacaataacaacctaaaacaatcgcgcgtaaacgcaaaaatacccgctaataaaaaaacgcttcccctccctcccaaacgatttaccgcatttattctaacgcaaaaacaccccgctcgccgtcttcacttacgattaactataaccgaaacccgtcacacaacccgccccactcctctacctcaaaaaaccgcacctcacgccgtcgctaccgcttaaccgtataattaactaaaaaaactaacatactttcccgcccccttccccgccgccgcaccaaaaaacgaacgaaaccccgcgaaaattatcaatcaaacccctccttcccaccccttacgaaacccctccccgaaccgcgcgccctaacgcgcgcacacgcgcacacactccccaatcgcctataccaaccaccttctcaaattataacgatcgctcgcctaaaattctccgtaaacgaccgacgaacgcgtaaaaaaaaaaattcgaaccgcccaacgcgacaaaaaacgaatatatacacgcaaaaaaccgaaactacgaaacaacgccccgaacgataaaaaaccgacgttaaccgaaaaaaacgaacaccgcgacaataactccgaaaaaacccgcgataacaacgccctaaaaaaaaactccaaacaaaacgaactacgctaacaacgaccgctaaaatactaaccgaccgactaactaacgacgaaaacaaaaacgacgaaaaacgcgctcgacacccgcacccccgtacccccgcctcaattatctaaacttcgaactctcttccacccgctctacgcgcccaaaatcaacaacttcttcacccccctccgcccccgcccttccctccgtcaaccccgaaaactcgccgcgcgccgaaaaccaaaaacctccgacgctaaaatataaccgtaaaacgttaacgaacgacgaaaaaaaactcgacgacgtcccgaaaccgaaaaaccgtaaaaccgaaacgcaaaaacgcgaacaccccgcgcctctcccccgcctcctcctaccgtctccgccgctacccgtaccttacaaacaacaaccgaaactaccaaacgtcaaaaccgcgaaaatatcgtcgtcgtcgccgccgacgaaaactaccaacgccgccatctcgacctcgaaaaaaataaacgacttcacccgaaaatcgatccgcaaaacgc

SEQ ID NO: 36519 - DNA, 1263 bp, Artificial Sequence
  chemically treated genomic DNA (Homo sapiens) CpG-island No: 36519
ggaaggggcgttttattttgttttttgaacgtatttttttaagttttttagttttttcgtagacggttaggagagtaatgatagtttggagtagtcgcgcgtgagcgtaaaaatgttcgttggtggaggagcgtttttttttttttttaagcgatttgtcgtatttgttttgacgtaggggtatttcgttcgtcgtttttatttacgattggttgtggtcgaagttcgttatatagttcgttttatttttttgttttaagaggtcgtattttacgtcgtcgttgtcgtttagtcgtgtgattggttaagagggttggtatgttttttcgttttttttttcgtcgtcgtattaagaggcgggcgggatttcgcggaagttgttagttaaattttttttttttattttttgcgaggttttttttcgggtcgcgcgttttggcgcgcgtatacgcgtatatattttttagtcgtttgtattaattatttttttaagttgtagcggtcgttcgtttggggtttttcgtgggcggtcgacgggcgcgtgggggagggggttcgggtcgtttagcgcggtaaggagcgagtgtgtgtacgtagagggtcggggttacggggtagcgtttcgggcgatgaggggtcggcgttgatcgggaagagcgggtatcgcggtagtggtttcgaggggattcgcgatggtagcgttttgagaggaggttttaggtagggcgggttgcgttggtagcggtcgttgaggtgttggtcggtcggttggttggcgacgggggtagaagcgacgagaggcgcgttcggtattcgtattttcgtgttttcgttttagttgtttaaatttcgggtttttttttattcgttttgcgcgtttagagttaataatttttttattttttttcgttttcgttttttttttcgttagtttcgggagttcgtcgcgcgtcggggattaggaattttcggcgttgagatgtggtcgtgaggcgttggcgggcggcgaggagaagttcggcggcgtttcggggtcggagggtcgtggggtcggggcgtaggggcgcgagtatttcgcgtttttttttcgtttttttttgtcgttttcgtcgttgttcgtgttttgtaagtagtagtcggagttgttaagcgttagggtcgcggagatgtcgtcgtcgtcgtcgtcggcgggggttgttagcgtcgttatttcggtttcggagaaagtggacggttttattcggaaatcggttcgtaaggcgt

SEQ ID NO: 36520 - DNA, 1263 bp, Artificial Sequence
  chemically treated genomic DNA (Homo sapiens) CpG-island No: 36520
acgccttacgaaccgatttccgaataaaaccgtccactttctccgaaaccgaaataacgacgctaacaacccccgccgacgacgacgacgacgacatctccgcgaccctaacgcttaacaactccgactactacttacaaaacacgaacaacgacgaaaacgacaaaaaaaaacgaaaaaaaaacgcgaaatactcgcgcccctacgccccgaccccacgaccctccgaccccgaaacgccgccgaacttctcctcgccgcccgccaacgcctcacgaccacatctcaacgccgaaaattcctaatccccgacgcgcgacgaactcccgaaactaacgaaaaaaaaaacgaaaacgaaaaaaaataaaaaaattattaactctaaacgcgcaaaacgaataaaaaaaaacccgaaatttaaacaactaaaacgaaaacacgaaaatacgaataccgaacgcgcctctcgtcgcttctacccccgtcgccaaccaaccgaccgaccaacacctcaacgaccgctaccaacgcaacccgccctacctaaaacctcctctcaaaacgctaccatcgcgaatcccctcgaaaccactaccgcgatacccgctcttcccgatcaacgccgacccctcatcgcccgaaacgctaccccgtaaccccgaccctctacgtacacacactcgctccttaccgcgctaaacgacccgaaccccctcccccacgcgcccgtcgaccgcccacgaaaaaccccaaacgaacgaccgctacaacttaaaaaaataattaatacaaacgactaaaaaatatatacgcgtatacgcgcgccaaaacgcgcgacccgaaaaaaaacctcgcaaaaaataaaaaaaaaaaatttaactaacaacttccgcgaaatcccgcccgcctcttaatacgacgacgaaaaaaaaaacgaaaaaacataccaaccctcttaaccaatcacacgactaaacgacaacgacgacgtaaaatacgacctcttaaaacaaaaaaataaaacgaactatataacgaacttcgaccacaaccaatcgtaaataaaaacgacgaacgaaatacccctacgtcaaaacaaatacgacaaatcgcttaaaaaaaaaaaaaaacgctcctccaccaacgaacatttttacgctcacgcgcgactactccaaactatcattactctcctaaccgtctacgaaaaaactaaaaaacttaaaaaaatacgttcaaaaaacaaaataaaacgccccttcc

SEQ ID NO: 36521 - DNA, 599 bp, Artificial Sequence
  chemically treated genomic DNA (Homo sapiens) CpG-island No: 36521
atcgtcggtttttcgttttatatagaggataacgagaattttaagttcgacgagaaggggaattagttcgagaatagcgaagattcggagttcgatcggaagaagtcgggtaacgcgtgtgataacgatatgaattgtaacgacgacggttatagttttagtaattcggatagtcgcgatagcgacgatagtttcgagtattcggattttgagaattttaaggcgggcgaggacggtttcggtgttttgggcgcgatgtagattaaggtggagcgttacgtggagagcgagtcggatttgcggttgtagaattgcgagttatttacgttcgatagcgttaaggattcggatagcgtaggcgaggcgggcgcgtaggtttttagtaagtattagaagcgtaagaaaaggcggaaacggtaaaagggcggtagcgttagtcgtcggcgtttgtttagcgcgtcgagtttaggcggtttggacgcgggtttggtggagttttcgcggttgttgtttttttttaatagtgtttcggtgtttaagattaagacggagattttagaatttattaatttcgataatgatagtagtatttggaatta

SEQ ID NO: 36522 - DNA, 599 bp, Artificial Sequence
  chemically treated genomic DNA (Homo sapiens) CpG-island No: 36522
taattccaaatactactatcattatcgaaattaataaattctaaaatctccgtcttaatcttaaacaccgaaacactattaaaaaaaaacaacaaccgcgaaaactccaccaaacccgcgtccaaaccgcctaaactcgacgcgctaaacaaacgccgacgactaacgctaccgcccttttaccgtttccgccttttcttacgcttctaatacttactaaaaacctacgcgcccgcctcgcctacgctatccgaatccttaacgctatcgaacgtaaataactcgcaattctacaaccgcaaatccgactcgctctccacgtaacgctccaccttaatctacatcgcgcccaaaacaccgaaaccgtcctcgcccgccttaaaattctcaaaatccgaatactcgaaactatcgtcgctatcgcgactatccgaattactaaaactataaccgtcgtcgttacaattcatatcgttatcacacgcgttacccgacttcttccgatcgaactccgaatcttcgctattctcgaactaattccccttctcgtcgaacttaaaattctcgttatcctctatataaaacgaaaaaccgacgat

SEQ ID NO: 36523 - DNA, 599 bp, Artificial Sequence
  chemically treated genomic DNA (Homo sapiens) CpG-island No: 36523
tagttttagatgttgttgttattgtcgaaattgatgggttttgagattttcgttttgattttgagtatcgaggtattgttgggggaggatagtagtcgcgggggttttattaggttcgcgtttaggtcgtttgggttcgacgcgttggataggcgtcggcggttggcgttgtcgtttttttgtcgttttcgtttttttttgcgtttttggtgtttgttggaggtttgcgcgttcgtttcgtttgcgttgttcgagtttttggcgttgtcggacgtgagtgattcgtagttttgtagtcgtaggttcgattcgttttttacgtagcgttttattttgatttgtatcgcgtttagagtatcgaagtcgttttcgttcgttttggggtttttaaagttcgagtgttcgaagttgtcgtcgttgtcgcggttgttcgggttattggagttgtggtcgtcgtcgttgtagtttatgtcgttgttatacgcgttgttcgatttttttcggtcgggtttcgggttttcgttgttttcggattggttttttttttcgtcggatttggagttttcgttgttttttgtgtggggcggggggtcggcggt

SEQ ID NO: 36524 - DNA, 599 bp, Artificial Sequence
  chemically treated genomic DNA (Homo sapiens) CpG-island No: 36524
accgccgaccccccgccccacacaaaaaacaacgaaaactccaaatccgacgaaaaaaaaaaccaatccgaaaacaacgaaaacccgaaacccgaccgaaaaaaatcgaacaacgcgtataacaacgacataaactacaacgacgacgaccacaactccaataacccgaacaaccgcgacaacgacgacaacttcgaacactcgaactttaaaaaccccaaaacgaacgaaaacgacttcgatactctaaacgcgatacaaatcaaaataaaacgctacgtaaaaaacgaatcgaacctacgactacaaaactacgaatcactcacgtccgacaacgccaaaaactcgaacaacgcaaacgaaacgaacgcgcaaacctccaacaaacaccaaaaacgcaaaaaaaaacgaaaacgacaaaaaaacgacaacgccaaccgccgacgcctatccaacgcgtcgaacccaaacgacctaaacgcgaacctaataaaacccccgcgactactatcctcccccaacaatacctcgatactcaaaatcaaaacgaaaatctcaaaacccatcaatttcgacaataacaacaacatctaaaacta

SEQ ID NO: 36525 - DNA, 535 bp, Artificial Sequence
  chemically treated genomic DNA (Homo sapiens) CpG-island No: 36525
cgtagtagtcgtcggttcgcggtagagattattagatttcggtaggtacgagtcgtagtcgtggtgcgtaggaagagttcgtagtcgtttatgttgttcgatgttttttagttttagttttagttttttttttttagcgtcgtagggatatatacgtttgatgacgttattggttcgcgataacgtgtagtatttattgcgtttgcgcggtttttcgtagtaggggatggagaggttagaagggcgggaaggttattatttgtcgcgtttaaggttttagttacgtgtatttggttggttcgcgtcgtttgatgacgttatacgtttacgtttttcgtcggttttattgcgtttgcgcggttaaaggagttggtcggaggaaattgtaggttcggggtcgcgggtatttcggcgggtataatttttggtcgtcgtgacggcggtgacggatttgttttttatatattagcggttgtttttataaatgttagttatgggaaatttttttgtgtatagaaatttaaaggtcggttta

SEQ ID NO: 36526 - DNA, 535 bp, Artificial Sequence
  chemically treated genomic DNA (Homo sapiens) CpG-island No: 36526
taaaccgacctttaaatttctatacacaaaaaaatttcccataactaacatttataaaaacaaccgctaatatataaaaaacaaatccgtcaccgccgtcacgacgaccaaaaattatacccgccgaaatacccgcgaccccgaacctacaatttcctccgaccaactcctttaaccgcgcaaacgcaataaaaccgacgaaaaacgtaaacgtataacgtcatcaaacgacgcgaaccaaccaaatacacgtaactaaaaccttaaacgcgacaaataataaccttcccgcccttctaacctctccatcccctactacgaaaaaccgcgcaaacgcaataaatactacacgttatcgcgaaccaataacgtcatcaaacgtatatatccctacgacgctaaaaaaaaaaaactaaaactaaaactaaaaaacatcgaacaacataaacgactacgaactcttcctacgcaccacgactacgactcgtacctaccgaaatctaataatctctaccgcgaaccgacgactactacg

SEQ ID NO: 36527 - DNA, 535 bp, Artificial Sequence
  chemically treated genomic DNA (Homo sapiens) CpG-island No: 36527
tgagtcggtttttaggtttttgtatatagggagattttttatggttggtatttatggaaataatcgttggtatgtgaaaaataggttcgttatcgtcgttacgacggttagagattatattcgtcgagatgttcgcggtttcgggtttataatttttttcggttagtttttttggtcgcgtaagcgtagtggggtcggcgggaagcgtaggcgtgtgacgttattaggcggcgcgggttagttaggtgtacgtgattaaggttttgggcgcggtaggtggtagttttttcgtttttttggtttttttattttttgttgcgggggatcgcgtaagcgtagtgagtattgtacgttgtcgcgggttagtaacgttattagacgtgtgtgtttttgcggcgttaagaaggggagattgaggttgaggttggggaatatcgggtagtatgagcggttgcgggttttttttgcgtattacggttgcggttcgtgtttgtcggggtttggtggtttttatcgcgaatcggcggttattgcg

SEQ ID NO: 36528 - DNA, 535 bp, Artificial Sequence
  chemically treated genomic DNA (Homo sapiens) CpG-island No: 36528
cgcaataaccgccgattcgcgataaaaaccaccaaaccccgacaaacacgaaccgcaaccgtaatacgcaaaaaaaacccgcaaccgctcatactacccgatattccccaacctcaacctcaatctccccttcttaacgccgcaaaaacacacacgtctaataacgttactaacccgcgacaacgtacaatactcactacgcttacgcgatcccccgcaacaaaaaataaaaaaaccaaaaaaacgaaaaaactaccacctaccgcgcccaaaaccttaatcacgtacacctaactaacccgcgccgcctaataacgtcacacgcctacgcttcccgccgaccccactacgcttacgcgaccaaaaaaactaaccgaaaaaaattataaacccgaaaccgcgaacatctcgacgaatataatctctaaccgtcgtaacgacgataacgaacctatttttcacataccaacgattatttccataaataccaaccataaaaaatctccctatatacaaaaacctaaaaaccgactca

SEQ ID NO: 36529 - DNA, 860 bp, Artificial Sequence
  chemically treated genomic DNA (Homo sapiens) CpG-island No: 36529
cgcgtcggattgtttatcgtacgggtcgtaagaggggttgttacgggtgggagggggtcggcgattttgggggggttcgggttattttcgtatattatttgacgttattttcgttttcgtttaggtgcgaaattttttgtttttcggttgggcgcgcgattttaaaggcgttttgaagaaattcgagtttcgaagatttttttagtgggttgggggttgtgacggaagagattcgggagagggggttggggtagaggaaaggcggggggcgtttggagttggtttgagcgaggcggcggttttggagtggaatttcgggatttcgttttaatttcgtcgggcgggttttttcggattttttagagtttggttttttcgtttttcggttttcgtttgttcggtgttagttttcgttcgtcgtagtttcgcggtttttttttttttaatttttcggttttttttattttttttagatttcgtttggggttttgttggtttttgggagataaaaatcgttttaaatagcggcggcgcgttgttaggataaatagggtcgggcgggttatgtgcgtttggttatcggtttcgggtcgggacgtcgggttttagcgggttcgggaaggggtagcgggcggagtttcgggtatttaggtttcggtgacgatttttaaagtagggggttttttttagaagcggtttgcgcgttttttcggttttcgtttaggtcgtagggaggggtcggcggagatcgttcgttaagcgttcggagtttatagggcgtgggttacggtcgttgcgttgtttggttagtcgcgttttttggtgaagttattgggtgagcgcgtcgggtttggatttgg

SEQ ID NO: 36530 - DNA, 860 bp, Artificial Sequence
  chemically treated genomic DNA (Homo sapiens) CpG-island No: 36530
ccaaatccaaacccgacgcgctcacccaataacttcaccaaaaaacgcgactaaccaaacaacgcaacgaccgtaacccacgccctataaactccgaacgcttaacgaacgatctccgccgacccctccctacgacctaaacgaaaaccgaaaaaacgcgcaaaccgcttctaaaaaaaaccccctactttaaaaatcgtcaccgaaacctaaatacccgaaactccgcccgctaccccttcccgaacccgctaaaacccgacgtcccgacccgaaaccgataaccaaacgcacataacccgcccgaccctatttatcctaacaacgcgccgccgctatttaaaacgatttttatctcccaaaaaccaacaaaaccccaaacgaaatctaaaaaaaataaaaaaaaccgaaaaattaaaaaaaaaaaaaccgcgaaactacgacgaacgaaaactaacaccgaacaaacgaaaaccgaaaaacgaaaaaaccaaactctaaaaaatccgaaaaaacccgcccgacgaaattaaaacgaaatcccgaaattccactccaaaaccgccgcctcgctcaaaccaactccaaacgccccccgcctttcctctaccccaaccccctctcccgaatctcttccgtcacaacccccaacccactaaaaaaatcttcgaaactcgaatttcttcaaaacgcctttaaaatcgcgcgcccaaccgaaaaacaaaaaatttcgcacctaaacgaaaacgaaaataacgtcaaataatatacgaaaataacccgaacccccccaaaatcgccgaccccctcccacccgtaacaacccctcttacgacccgtacgataaacaatccgacgcg

SEQ ID NO: 36531 - DNA, 860 bp, Artificial Sequence
  chemically treated genomic DNA (Homo sapiens) CpG-island No: 36531
ttaagtttaggttcggcgcgtttatttagtaattttattagggggcgcggttggttaggtaacgtagcgatcgtgatttacgttttatgggtttcgagcgtttagcgggcggttttcgtcggtttttttttacgatttgggcgggaatcgagagagcgcgtaggtcgtttttaaaaggggttttttattttgggagtcgttatcggagtttgggtgttcggagtttcgttcgttattttttttcgggttcgttggagttcggcgtttcgattcggggtcggtaattaggcgtatatggttcgttcggttttgtttgttttggtagcgcgtcgtcgttatttgaagcggtttttattttttagaaattagtaaaattttaagcggagtttagggaagatgaaaggggtcgaagggttggggaggggaggatcgcgaggttgcggcgggcgggagttggtatcggataggcggagatcgggaggcgagagggttagattttggggggttcggaggagttcgttcggcggggttgaggcgggatttcggggttttattttagggtcgtcgtttcgtttagattagttttaagcgtttttcgttttttttttgttttagttttttttttcgggtttttttcgttatagtttttagtttattaaagaagttttcggaattcggatttttttaaagcgtttttgaagtcgcgcgtttagtcggagggtaggagatttcgtatttgggcgggggcgggagtggcgttaggtgatgtgcgggggtaattcgagtttttttaggatcgtcggtttttttttattcgtagtagttttttttgcgattcgtgcggtggatagttcgacgcg

SEQ ID NO: 36532 - DNA, 860 bp, Artificial Sequence
  chemically treated genomic DNA (Homo sapiens) CpG-island No: 36532
cgcgtcgaactatccaccgcacgaatcgcaaaaaaaactactacgaataaaaaaaaaccgacgatcctaaaaaaactcgaattacccccgcacatcacctaacgccactcccgcccccgcccaaatacgaaatctcctaccctccgactaaacgcgcgacttcaaaaacgctttaaaaaaatccgaattccgaaaacttctttaataaactaaaaactataacgaaaaaaacccgaaaaaaaaaactaaaacaaaaaaaaaacgaaaaacgcttaaaactaatctaaacgaaacgacgaccctaaaataaaaccccgaaatcccgcctcaaccccgccgaacgaactcctccgaaccccccaaaatctaaccctctcgcctcccgatctccgcctatccgataccaactcccgcccgccgcaacctcgcgatcctcccctccccaacccttcgacccctttcatcttccctaaactccgcttaaaattttactaatttctaaaaaataaaaaccgcttcaaataacgacgacgcgctaccaaaacaaacaaaaccgaacgaaccatatacgcctaattaccgaccccgaatcgaaacgccgaactccaacgaacccgaaaaaaaataacgaacgaaactccgaacacccaaactccgataacgactcccaaaataaaaaaccccttttaaaaacgacctacgcgctctctcgattcccgcccaaatcgtaaaaaaaaaccgacgaaaaccgcccgctaaacgctcgaaacccataaaacgtaaatcacgatcgctacgttacctaaccaaccgcgccccctaataaaattactaaataaacgcgccgaacctaaacttaa

SEQ ID NO: 36533 - DNA, 899 bp, Artificial Sequence
  chemically treated genomic DNA (Homo sapiens) CpG-island No: 36533
gttcgtagtttacgtaataggcggagttttagggttttagcgacggcgggttttggggattagaggatgcgggcgtcgcgggttagacgtttagaaggacggaaagtgttttgcggtcgtagattttcggggtcgtgtattcgcgatttggattataggagattggggtagtaaaaggtgggggaaggcgcggtaaagttgtagggtcgttcggagaagttttcggagcgcgtagggaggtggggacgttagttaggtatttgtaggagttcggacgtatttagttagtttcgttttgcgacgtcgtttgttcgcgttgtagggattaggtttcgcggcgcggtttcgcgtttgtcgtcgcggcggcgaggagagcggggtggttcgcgtcggtcggtttgttcgtcggtttcgtttcgttagagcgaggttttcgggagttgcgggcggggcggggtcggacgggacggggcggggttcgtcgttcggtcgtcgttttattggtcgtagtttcgttagtttttcgtttcgggttcgtagtcgggcgtttcgggtcgagggcgcgggcggttgaggattgcggggtttcgatcgttagataggcggatagatttatagatttagatgttgttttgtcggtcgcgcgttttcgtttaggtttaagtgtagagttatttcggagcggtaggcgttgttcgggtgggattaggagcgcgtttcgcgttttttatttgcgcgtttttttgggtcggaagcgtcgtggttttgcgggaaaaagatgatttttttcgcggtttcggcggttggggtaatcgtttttttaaagtcgcggtttaagcgatattttgttaatttgtttggatttttttaggaaatcgcgaggtttaaatttgttttaa

SEQ ID NO: 36534 - DNA, 899 bp, Artificial Sequence
  chemically treated genomic DNA (Homo sapiens) CpG-island No: 36534
ttaaaacaaatttaaacctcgcgatttcctaaaaaaatccaaacaaattaacaaaatatcgcttaaaccgcgactttaaaaaaacgattaccccaaccgccgaaaccgcgaaaaaaatcatctttttcccgcaaaaccacgacgcttccgacccaaaaaaacgcgcaaataaaaaacgcgaaacgcgctcctaatcccacccgaacaacgcctaccgctccgaaataactctacacttaaacctaaacgaaaacgcgcgaccgacaaaacaacatctaaatctataaatctatccgcctatctaacgatcgaaaccccgcaatcctcaaccgcccgcgccctcgacccgaaacgcccgactacgaacccgaaacgaaaaactaacgaaactacgaccaataaaacgacgaccgaacgacgaaccccgccccgtcccgtccgaccccgccccgcccgcaactcccgaaaacctcgctctaacgaaacgaaaccgacgaacaaaccgaccgacgcgaaccaccccgctctcctcgccgccgcgacgacaaacgcgaaaccgcgccgcgaaacctaatccctacaacgcgaacaaacgacgtcgcaaaacgaaactaactaaatacgtccgaactcctacaaatacctaactaacgtccccacctccctacgcgctccgaaaacttctccgaacgaccctacaactttaccgcgccttcccccaccttttactaccccaatctcctataatccaaatcgcgaatacacgaccccgaaaatctacgaccgcaaaacactttccgtccttctaaacgtctaacccgcgacgcccgcatcctctaatccccaaaacccgccgtcgctaaaaccctaaaactccgcctattacgtaaactacgaac

SEQ ID NO: 36535 - DNA, 899 bp, Artificial Sequence
  chemically treated genomic DNA (Homo sapiens) CpG-island No: 36535
ttaaaataagtttgggtttcgcgattttttgaggaaatttaggtaaattagtaaagtgtcgtttgggtcgcgattttagaaaggcggttgttttagtcgtcggggtcgcgggggaggttatttttttttcgtagggttacggcgttttcggtttaggagggcgcgtaggtgggaggcgcggggcgcgtttttggttttattcggatagcgtttgtcgtttcggggtgattttgtatttgggtttgggcgggggcgcgcggtcggtagggtagtatttaggtttatgggtttgttcgtttgtttggcggtcggagtttcgtagtttttagtcgttcgcgttttcggttcggggcgttcggttgcgggttcgaagcgaggggttggcggagttgcgattaatggggcggcggtcgagcggcgggtttcgtttcgtttcgttcggtttcgtttcgttcgtagttttcgggagtttcgttttagcggggcgggatcgacggatagatcggtcgacgcgggttatttcgtttttttcgtcgtcgcggcggtaggcgcggggtcgcgtcgcgaggtttgatttttgtagcgcgggtaggcggcgtcgtagagcggagttagttggatgcgttcggatttttgtaggtatttggttggcgtttttatttttttgcgcgtttcggagattttttcgggcgattttgtaattttatcgcgtttttttttattttttgttgttttagttttttgtggtttaggtcgcgggtgtacgatttcgagggtttacggtcgtagagtatttttcgtttttttgggcgtttggttcgcggcgttcgtattttttggtttttagagttcgtcgtcgttggagttttaaggtttcgtttgttgcgtgaattgcgggt

SEQ ID NO: 36536 - DNA, 899 bp, Artificial Sequence
  chemically treated genomic DNA (Homo sapiens) CpG-island No: 36536
acccgcaattcacgcaacaaacgaaaccttaaaactccaacgacgacgaactctaaaaaccaaaaaatacgaacgccgcgaaccaaacgcccaaaaaaacgaaaaatactctacgaccgtaaaccctcgaaatcgtacacccgcgacctaaaccacaaaaaactaaaacaacaaaaaataaaaaaaaacgcgataaaattacaaaatcgcccgaaaaaatctccgaaacgcgcaaaaaaataaaaacgccaaccaaatacctacaaaaatccgaacgcatccaactaactccgctctacgacgccgcctacccgcgctacaaaaatcaaacctcgcgacgcgaccccgcgcctaccgccgcgacgacgaaaaaaacgaaataacccgcgtcgaccgatctatccgtcgatcccgccccgctaaaacgaaactcccgaaaactacgaacgaaacgaaaccgaacgaaacgaaacgaaacccgccgctcgaccgccgccccattaatcgcaactccgccaacccctcgcttcgaacccgcaaccgaacgccccgaaccgaaaacgcgaacgactaaaaactacgaaactccgaccgccaaacaaacgaacaaacccataaacctaaatactaccctaccgaccgcgcgcccccgcccaaacccaaatacaaaatcaccccgaaacgacaaacgctatccgaataaaaccaaaaacgcgccccgcgcctcccacctacgcgccctcctaaaccgaaaacgccgtaaccctacgaaaaaaaaataacctcccccgcgaccccgacgactaaaacaaccgcctttctaaaatcgcgacccaaacgacactttactaatttacctaaatttcctcaaaaaatcgcgaaacccaaacttattttaa

SEQ ID NO: 36537 - DNA, 916 bp, Artificial Sequence
  chemically treated genomic DNA (Homo sapiens) CpG-island No: 36537
gttttcgttaatttttttcggtttattgttaatatttatacgtttagtattataaggtttgagtatgggtaacgggcgttttcgtagttgtttaggcgcgtgtgtacgttcgtgcgtttttgtgtttttgtgtatttgtgcgtggttgtgaaattttttttttagttcggaggggtgggggagagaaggaatgtcgtcggcggggcgtttacgtgggtacgtgggcgttaagagggtcggttgtgtattcggcgtgggcggtatagaacgatttcgtttcgttcgttgggtttttaagttcgttttgtatagtcgggtttcggttatttcggtttttaattcggcgtttcggttttgaattttcgttttcgttttttgttttatatttttttttttttcgttttcgttttttttagtttttaagtcgcggcgttttcgcggtcgagaggttttagcgttcgttttttcggttttcgtttttattttcgttttcggttttgtttacgtttttcgttcgttagttcggtagttagcgtagtttcgggtttcgttttttgtgcgttttgcgggggcggaggcgcggagagggcgtaagcgtagtcggggagggtgggggggtagaggtatagatagaggcgcggaggttcggagagagaagacgtggagggagggatagagtttggatagcggtggattacggtatcgtgcgcggggaagagggtagtacgtagtaggcgtcgagcgtcgggtatcgagaagggtattcggggtgattttcggttcgtttatgtatagagcgtttttttttatagtcgagtagtcgtcgggcggaggggatagcgttcgtcggattttgtagtttatatttaagttagtgggtaaagggaggtagcggggagtggagatgggtggagtt

SEQ ID NO: 36538 - DNA, 916 bp, Artificial Sequence
  chemically treated genomic DNA (Homo sapiens) CpG-island No: 36538
aactccacccatctccactccccgctacctccctttacccactaacttaaatataaactacaaaatccgacgaacgctatcccctccgcccgacgactactcgactataaaaaaaaacgctctatacataaacgaaccgaaaatcaccccgaatacccttctcgatacccgacgctcgacgcctactacgtactaccctcttccccgcgcacgataccgtaatccaccgctatccaaactctatccctccctccacgtcttctctctccgaacctccgcgcctctatctatacctctacccccccaccctccccgactacgcttacgccctctccgcgcctccgcccccgcaaaacgcacaaaaaacgaaacccgaaactacgctaactaccgaactaacgaacgaaaaacgtaaacaaaaccgaaaacgaaaataaaaacgaaaaccgaaaaaacgaacgctaaaacctctcgaccgcgaaaacgccgcgacttaaaaactaaaaaaaacgaaaacgaaaaaaaaaaaaatataaaacaaaaaacgaaaacgaaaattcaaaaccgaaacgccgaattaaaaaccgaaataaccgaaacccgactatacaaaacgaacttaaaaacccaacgaacgaaacgaaatcgttctataccgcccacgccgaatacacaaccgaccctcttaacgcccacgtacccacgtaaacgccccgccgacgacattccttctctcccccacccctccgaactaaaaaaaaaatttcacaaccacgcacaaatacacaaaaacacaaaaacgcacgaacgtacacacgcgcctaaacaactacgaaaacgcccgttacccatactcaaaccttataatactaaacgtataaatattaacaataaaccgaaaaaaattaacgaaaac

SEQ ID NO: 36539 - DNA, 916 bp, Artificial Sequence
  chemically treated genomic DNA (Homo sapiens) CpG-island No: 36539
agttttatttatttttatttttcgttgtttttttttgtttattaatttgagtatgggttgtagggttcggcgggcgttgtttttttcgttcggcggttgttcgattgtgggggaaggcgttttgtgtatgaacgggtcgaagattatttcgggtgtttttttcggtgttcggcgttcggcgtttgttgcgtgttgttttttttttcgcgtacgatgtcgtggtttatcgttgtttaggttttgtttttttttttacgtttttttttttcgagttttcgcgtttttgtttgtgtttttgtttttttatttttttcgattgcgtttgcgtttttttcgcgttttcgttttcgtaggacgtatagggagcgaggttcggagttgcgttggttgtcgggttggcgggcggagggcgtgggtagagtcgggggcgggggtgggggcgggggtcggggaggcgggcgttggggtttttcggtcgcggagacgtcgcggtttagagattgggagaggcggagacggggggggagggggtgtggagtaggaggcgggggcggggatttagagtcggggcgtcgaattggggatcgaggtgatcgaggttcggttgtgtagggcgggtttggggatttagcgggcggggcgaggtcgttttgtgtcgtttacgtcggatgtatagtcggtttttttggcgtttacgtatttacgtgagcgtttcgtcggcgatatttttttttttttttattttttcgagttgagagaggagttttataattacgtataagtatataaagatatagaagcgtacggacgtgtatacgcgtttaaataattacggggacgttcgttgtttatatttaggttttgtggtgttggacgtgtgaatgttagtagtgagtcgggaaaagttagcgaaggt

SEQ ID NO: 36540 - DNA, 916 bp, Artificial Sequence
  chemically treated genomic DNA (Homo sapiens) CpG-island No: 36540
accttcgctaacttttcccgactcactactaacattcacacgtccaacaccacaaaacctaaatataaacaacgaacgtccccgtaattatttaaacgcgtatacacgtccgtacgcttctatatctttatatacttatacgtaattataaaactcctctctcaactcgaaaaaataaaaaaaaaaaaaaatatcgccgacgaaacgctcacgtaaatacgtaaacgccaaaaaaaccgactatacatccgacgtaaacgacacaaaacgacctcgccccgcccgctaaatccccaaacccgccctacacaaccgaacctcgatcacctcgatccccaattcgacgccccgactctaaatccccgcccccgcctcctactccacaccccctccccccccgtctccgcctctcccaatctctaaaccgcgacgtctccgcgaccgaaaaaccccaacgcccgcctccccgacccccgcccccacccccgcccccgactctacccacgccctccgcccgccaacccgacaaccaacgcaactccgaacctcgctccctatacgtcctacgaaaacgaaaacgcgaaaaaaacgcaaacgcaatcgaaaaaaataaaaaaacaaaaacacaaacaaaaacgcgaaaactcgaaaaaaaaaaacgtaaaaaaaaaaacaaaacctaaacaacgataaaccacgacatcgtacgcgaaaaaaaaaacaacacgcaacaaacgccgaacgccgaacaccgaaaaaaacacccgaaataatcttcgacccgttcatacacaaaacgccttcccccacaatcgaacaaccgccgaacgaaaaaaacaacgcccgccgaaccctacaacccatactcaaattaataaacaaaaaaaaacaacgaaaaataaaaataaataaaact

SEQ ID NO: 36541 - DNA, 514 bp, Artificial Sequence
  chemically treated genomic DNA (Homo sapiens) CpG-island No: 36541
cgaatttcgtttcgatatgtagagggagtagtcgagcggtaatgttagaggattagatgtagttcgaaaacggtagtatcgagatatcgtggacgtcgatcgcgtgggtcgacgtattcgagtcgtatcgtcgggtttatggtatttatcgagtcgaacggtttatatcgttggatgattcgatgtgtaaatagttcggtagacgtgcggtggttgtttattagtagttaattatcgatgtgcgtgcgtcggtttttattttcgttacgttatatgggttgtcgttagttattattttcgtgtatattattaaagttatttcgttattatttggtcgcgtcgttatttcgtcgtcgggcgttttgatatttgtagtcgtaatagacgttgtttcgtcgtacgttttattatggttaggtagcgtacgttttatttattatttgtttgttatatattagttcgtttaggttatgtgagagggtttgcggtttcgggatagaggtatagatataag

SEQ ID NO: 36542 - DNA, 514 bp, Artificial Sequence
  chemically treated genomic DNA (Homo sapiens) CpG-island No: 36542
cttatatctatacctctatcccgaaaccgcaaaccctctcacataacctaaacgaactaatatataacaaacaaataataaataaaacgtacgctacctaaccataataaaacgtacgacgaaacaacgtctattacgactacaaatatcaaaacgcccgacgacgaaataacgacgcgaccaaataataacgaaataactttaataatatacacgaaaataataactaacgacaacccatataacgtaacgaaaataaaaaccgacgcacgcacatcgataattaactactaataaacaaccaccgcacgtctaccgaactatttacacatcgaatcatccaacgatataaaccgttcgactcgataaataccataaacccgacgatacgactcgaatacgtcgacccacgcgatcgacgtccacgatatctcgatactaccgttttcgaactacatctaatcctctaacattaccgctcgactactccctctacatatcgaaacgaaattcg

SEQ ID NO: 36543 - DNA, 514 bp, Artificial Sequence
  chemically treated genomic DNA (Homo sapiens) CpG-island No: 36543
tttgtgtttatgtttttgtttcgaagtcgtagatttttttatatagtttgaacgagttagtgtgtggtaggtagataatgagtgaggcgtgcgttatttagttatgatgaggcgtacggcgaaataacgtttgttacgattatagatattaggacgttcgacgacgggatgacgacgcggttagatggtgacgaggtaattttgatgatgtgtacgaaggtggtggttgacgataatttatgtggcgtaacgaggatgaagatcgacgtacgtatatcgatgattgattgttgatggataattatcgtacgtttgtcggattgtttatatatcggattatttaacggtatagatcgttcgattcgatggatgttatggattcgacggtacggttcgggtacgtcgatttacgcgatcggcgtttacgatatttcgatgttatcgttttcggattatatttagttttttgatattgtcgttcggttattttttttatatgtcgaagcggagttcg

SEQ ID NO: 36544 - DNA, 514 bp, Artificial Sequence
  chemically treated genomic DNA (Homo sapiens) CpG-island No: 36544
cgaactccgcttcgacatataaaaaaaataaccgaacgacaatatcaaaaaactaaatataatccgaaaacgataacatcgaaatatcgtaaacgccgatcgcgtaaatcgacgtacccgaaccgtaccgtcgaatccataacatccatcgaatcgaacgatctataccgttaaataatccgatatataaacaatccgacaaacgtacgataattatccatcaacaatcaatcatcgatatacgtacgtcgatcttcatcctcgttacgccacataaattatcgtcaaccaccaccttcgtacacatcatcaaaattacctcgtcaccatctaaccgcgtcgtcatcccgtcgtcgaacgtcctaatatctataatcgtaacaaacgttatttcgccgtacgcctcatcataactaaataacgcacgcctcactcattatctacctaccacacactaactcgttcaaactatataaaaaaatctacgacttcgaaacaaaaacataaacacaaa

SEQ ID NO: 36545 - DNA, 637 bp, Artificial Sequence
  chemically treated genomic DNA (Homo sapiens) CpG-island No: 36545
cggtttcgggacgttttttgggagtcgtcgtcgagggtttgttgggattttcgggggatttcgtcgtcggggtagtttttacgttcggcgtcgtcgtcgataacgcgcgtcgttgttgcgtatttgtaggggagtcggcgattgagggcgaggtagggagggagtaagcggggttgggagggttgttggcgcgggttcggtttgtgtatggtttatcgtaggtagttgatttttgaggaggaaatcgttgtttttcgtttttttttgtagtaatagtcgtcgttgtcgtcgtcgttaggaatttcggtcgggagcgagatcgcggggcgtagagcggttcggttgtcgattgtgcggttttattaggtgggtgattcggtggcgcgttttcggcggcgttagaagtgggatattttattgtcgtttcgcgattttcggtattcggagttcgacggtcgggcgtacgcgggaattagttacggtattgcgagggagttgtttagcgtagacgagggacggggggacgtggggataggggtcggggatgaaagtagaggttagggagggcgcgtttttggtacgtttcggagagggagtattgtcgggttggattcggggagtattagtgtatagatgg

SEQ ID NO: 36546 - DNA, 637 bp, Artificial Sequence
  chemically treated genomic DNA (Homo sapiens) CpG-island No: 36546
ccatctatacactaatactccccgaatccaacccgacaatactccctctccgaaacgtaccaaaaacgcgccctccctaacctctactttcatccccgacccctatccccacgtccccccgtccctcgtctacgctaaacaactccctcgcaataccgtaactaattcccgcgtacgcccgaccgtcgaactccgaataccgaaaatcgcgaaacgacaataaaatatcccacttctaacgccgccgaaaacgcgccaccgaatcacccacctaataaaaccgcacaatcgacaaccgaaccgctctacgccccgcgatctcgctcccgaccgaaattcctaacgacgacgacaacgacgactattactacaaaaaaaaacgaaaaacaacgatttcctcctcaaaaatcaactacctacgataaaccatacacaaaccgaacccgcgccaacaaccctcccaaccccgcttactccctccctacctcgccctcaatcgccgactcccctacaaatacgcaacaacgacgcgcgttatcgacgacgacgccgaacgtaaaaactaccccgacgacgaaatcccccgaaaatcccaacaaaccctcgacgacgactcccaaaaaacgtcccgaaaccg

SEQ ID NO: 36547 - DNA, 637 bp, Artificial Sequence
  chemically treated genomic DNA (Homo sapiens) CpG-island No: 36547
ttatttgtgtattagtgtttttcgggtttagttcgatagtgtttttttttcgaggcgtgttaggaacgcgttttttttggtttttgtttttattttcgatttttgtttttacgttttttcgtttttcgtttgcgttgggtaattttttcgtagtgtcgtgattgattttcgcgtgcgttcggtcgtcgagtttcgggtgtcggaggtcgcggggcggtagtagagtgttttatttttggcgtcgtcgaggacgcgttatcgggttatttatttggtggggtcgtatagtcggtagtcgggtcgttttgcgtttcgcggtttcgttttcggtcggggtttttggcggcggcggtagcggcggttgttattataggaaggagcggagagtagcgattttttttttaaaggttagttgtttgcgatagattatatataggtcgagttcgcgttagtagtttttttagtttcgtttgttttttttttgtttcgtttttagtcgtcggtttttttgtaagtgcgtaatagcggcgcgcgttatcggcggcggcgtcgggcgtgggggttgtttcgacggcggggtttttcgggagttttagtaggttttcggcggcggtttttagggagcgtttcggaatcg

SEQ ID NO: 36548 - DNA, 637 bp, Artificial Sequence
  chemically treated genomic DNA (Homo sapiens) CpG-island No: 36548
cgattccgaaacgctccctaaaaaccgccgccgaaaacctactaaaactcccgaaaaaccccgccgtcgaaacaacccccacgcccgacgccgccgccgataacgcgcgccgctattacgcacttacaaaaaaaccgacgactaaaaacgaaacaaaaaaaaaacaaacgaaactaaaaaaactactaacgcgaactcgacctatatataatctatcgcaaacaactaacctttaaaaaaaaaatcgctactctccgctccttcctataataacaaccgccgctaccgccgccgccaaaaaccccgaccgaaaacgaaaccgcgaaacgcaaaacgacccgactaccgactatacgaccccaccaaataaataacccgataacgcgtcctcgacgacgccaaaaataaaacactctactaccgccccgcgacctccgacacccgaaactcgacgaccgaacgcacgcgaaaatcaatcacgacactacgaaaaaattacccaacgcaaacgaaaaacgaaaaaacgtaaaaacaaaaatcgaaaataaaaacaaaaaccaaaaaaaacgcgttcctaacacgcctcgaaaaaaaaacactatcgaactaaacccgaaaaacactaatacacaaataa

SEQ ID NO: 36549 - DNA, 509 bp, Artificial Sequence
  chemically treated genomic DNA (Homo sapiens) CpG-island No: 36549
gcgagcgttgaggtttcgggtttttaggttatcgtttgtttcgttttcgtatcgtttcggtttcgttttttttttttttcgtttcgtttcgttttattttttgttgtttttttcgattttttttcgcgtcgttaagttttttcgttcgtcgtttcgtttagagtcggggtcgggttagagcggcgtttcgttgttttgttttcgcgtgtagatttcgggttcggttcggtttttcgttaagttatgttgtgcggtcgttggagggttgtcgtcgttcgttcgaggagtttttagtggtcgtttaggtcgtagtttaagtcgcggcgtcggtcgttttttcgttttcgtcgatttttttcgatggcggtattaagaggttcgggttgcgggcgttgaagaagatgggttagtgacgggtaaggggcggtggggtgggcgcggatcgtttttagaggtttagtttggggcgttttagggagtagttcgtggattttttaggttgtacgggg

SEQ ID NO: 36550 - DNA, 509 bp, Artificial Sequence
  chemically treated genomic DNA (Homo sapiens) CpG-island No: 36550
ccccgtacaacctaaaaaatccacgaactactccctaaaacgccccaaactaaacctctaaaaacgatccgcgcccaccccaccgccccttacccgtcactaacccatcttcttcaacgcccgcaacccgaacctcttaataccgccatcgaaaaaaatcgacgaaaacgaaaaaacgaccgacgccgcgacttaaactacgacctaaacgaccactaaaaactcctcgaacgaacgacgacaaccctccaacgaccgcacaacataacttaacgaaaaaccgaaccgaacccgaaatctacacgcgaaaacaaaacaacgaaacgccgctctaacccgaccccgactctaaacgaaacgacgaacgaaaaaacttaacgacgcgaaaaaaaatcgaaaaaaacaacaaaaaataaaacgaaacgaaacgaaaaaaaaaaaaaacgaaaccgaaacgatacgaaaacgaaacaaacgataacctaaaaacccgaaacctcaacgctcgc

SEQ ID NO: 36551 - DNA, 509 bp, Artificial Sequence
  chemically treated genomic DNA (Homo sapiens) CpG-island No: 36551
tttcgtgtagtttggggaatttacgaattgttttttggagcgttttagattgggtttttgggaacggttcgcgtttattttatcgttttttgttcgttattgatttattttttttagcgttcgtagttcgggttttttggtgtcgttatcggagggagtcggcggggacgggagagcgatcggcgtcgcgatttgggttgcgatttgggcggttattgggggtttttcgggcgggcggcggtaattttttagcggtcgtatagtatggtttggcggggggtcgggtcgggttcggggtttgtacgcggggatagggtagcggggcgtcgttttggttcggtttcggttttgagcgaggcggcgagcgaagaaatttagcggcgcgggagggagtcggaggaggtagtaggaggtggggcggggcggggcgggaagggaagggggcggggtcggggcggtgcgagggcggggtaggcggtggtttggaagttcggagttttagcgttcgt

SEQ ID NO: 36552 - DNA, 509 bp, Artificial Sequence
  chemically treated genomic DNA (Homo sapiens) CpG-island No: 36552
acgaacgctaaaactccgaacttccaaaccaccgcctaccccgccctcgcaccgccccgaccccgcccccttcccttcccgccccgccccgccccacctcctactacctcctccgactccctcccgcgccgctaaatttcttcgctcgccgcctcgctcaaaaccgaaaccgaaccaaaacgacgccccgctaccctatccccgcgtacaaaccccgaacccgacccgaccccccgccaaaccatactatacgaccgctaaaaaattaccgccgcccgcccgaaaaacccccaataaccgcccaaatcgcaacccaaatcgcgacgccgatcgctctcccgtccccgccgactccctccgataacgacaccaaaaaacccgaactacgaacgctaaaaaaaataaatcaataacgaacaaaaaacgataaaataaacgcgaaccgttcccaaaaacccaatctaaaacgctccaaaaaacaattcgtaaattccccaaactacacgaaa

SEQ ID NO: 36553 - DNA, 505 bp, Artificial Sequence
  chemically treated genomic DNA (Homo sapiens) CpG-island No: 36553
  unsure (299..300, 302, 401)
acgaggacgtgcgcgttatgttgcggggttttcggtttcgtaagattcgttcgcgtacgtggtataaggagcggttgtatcggttgtaggaggacggtttgagcgtgtggttttagcggcgtatttcgcgtgcgttatcgtagtatatttgtgagaggtcggggagcgtcgggcggatagggaggtgggataggttcggtttttcgttttgattcgattttttttttagttttcgtgtagtatatcgaggcggttcgcgagggttattagttcgagggtttgcgcgtttcgggggtgtnntntgtttagtcgttgttttattatcgtttttaaggtcgtcgtaagaatttggatttgcggttttacggttgaggaagcgtagttgggtggcggtttgattnaagtcgcgcgcgtttggacgttatgagttagcgcgagcggttagattaatattttgtcggggttgggagggagggttttatttttggagagttttaattttgga

SEQ ID NO: 36554 - DNA, 505 bp, Artificial Sequence
  chemically treated genomic DNA (Homo sapiens) CpG-island No: 36554
  unsure (105, 204, 206..)
tccaaaattaaaactctccaaaaataaaaccctccctcccaaccccgacaaaatattaatctaaccgctcgcgctaactcataacgtccaaacgcgcgcgacttnaatcaaaccgccacccaactacgcttcctcaaccgtaaaaccgcaaatccaaattcttacgacgaccttaaaaacgataataaaacaacgactaaacanannacacccccgaaacgcgcaaaccctcgaactaataaccctcgcgaaccgcctcgatatactacacgaaaactaaaaaaaaaatcgaatcaaaacgaaaaaccgaacctatcccacctccctatccgcccgacgctccccgacctctcacaaatatactacgataacgcacgcgaaatacgccgctaaaaccacacgctcaaaccgtcctcctacaaccgatacaaccgctccttataccacgtacgcgaacgaatcttacgaaaccgaaaaccccgcaacataacgcgcacgtcctcgt

SEQ ID NO: 36555 - DNA, 505 bp, Artificial Sequence
  chemically treated genomic DNA (Homo sapiens) CpG-island No: 36555
  unsure (105, 204, 206..)
tttaaggttagggttttttaaggatggggtttttttttttagtttcggtaggatattggtttagtcgttcgcgttggtttatggcgtttaggcgcgcgcgatttnggttagatcgttatttagttgcgtttttttagtcgtgggatcgtaggtttaggtttttgcggcggttttgaaggcgatggtgaggtagcggttgagtangnngtattttcgaagcgcgtaggttttcggattggtggttttcgcggatcgtttcgatgtgttgtacgaagattgagaggagggtcgggttagggcggaggatcgggtttgttttatttttttgttcgttcggcgtttttcggttttttatagatgtgttgcgatggcgtacgcgggatgcgtcgttggaattatacgtttaggtcgtttttttgtagtcggtatagtcgttttttgtgttacgtgcgcgagcggattttgcggagtcgggagtttcgtagtatggcgcgtacgttttcgt

SEQ ID NO: 36556 - DNA, 505 bp, Artificial Sequence
  chemically treated genomic DNA (Homo sapiens) CpG-island No: 36556
  unsure (299..300, 302, 401)
acgaaaacgtacgcgccatactacgaaactcccgactccgcaaaatccgctcgcgcacgtaacacaaaaaacgactataccgactacaaaaaaacgacctaaacgtataattccaacgacgcatcccgcgtacgccatcgcaacacatctataaaaaaccgaaaaacgccgaacgaacaaaaaaataaaacaaacccgatcctccgccctaacccgaccctcctctcaatcttcgtacaacacatcgaaacgatccgcgaaaaccaccaatccgaaaacctacgcgcttcgaaaatacnncntactcaaccgctacctcaccatcgccttcaaaaccgccgcaaaaacctaaacctacgatcccacgactaaaaaaacgcaactaaataacgatctaaccnaaatcgcgcgcgcctaaacgccataaaccaacgcgaacgactaaaccaatatcctaccgaaactaaaaaaaaaaaccccatccttaaaaaaccctaaccttaaa

SEQ ID NO: 36557 - DNA, 902 bp, Artificial Sequence
  chemically treated genomic DNA (Homo sapiens) CpG-island No: 36557
  unsure (492..493, 496)
aggaggttcggtcggttttgggttttagttagcggttcgcggagattttggttttcgaaggtttttgacgtcgggtatttcgcgagttgcgcgttttttttagtcgcgttatttgcgttcggagttttgtcgcgttattcgcgttcggagtttagtcgtatcgcgttgtgtcgagtttaggcgtttagggtttttcgttttcgattcgagttttcgcgttttttttagcgggtcgtcgtagcgtcgtttcgttttaggttcgtcggcggcgtagtttacgtgatcgcgttttgggtttgcggtcgttgtcggtttttttagttatcgagcgagagggaagaaataagatggcggttgaaggcgattcggagtggggttttagtaattcggattgagttttttttttttattcgttttcgtcggtcgggtttttttcgttcggttcgcgtgttttttattcggtttcggcgttttttatcgatttttttgcgnncgntttttttttttcgtttttttttttttttcgtttcggtttcgatatgaggggtcggcggggtaggcgttttaagtagttcgcggtttcgttgcgacgttgcgtttcggtttcgcgttatcgtcgtcgtcgtttacgttcggatttatcgggggtttcgttcgcggtatcgcgtagtagtcggggtaggtgggacgtcgtttaggttgaggtggcgtttaagacgcggttgagttcgtttagggggggtagtagtagtcggaggaaagtcgtttcgtcgcgtcggttttttttagtattagcgtttcgggtcggggggggcgaggaggcgggggcggtaggacggggggggggggcggcggcgttatttggttcggattattcgcggagggtcgttaataaagtggtg

SEQ ID NO: 36558 - DNA, 902 bp, Artificial Sequence
  chemically treated genomic DNA (Homo sapiens) CpG-island No: 36558
  unsure (407, 410..)
caccactttattaacgaccctccgcgaataatccgaaccaaataacgccgccgccccccccccccgtcctaccgcccccgcctcctcgccccccccgacccgaaacgctaatactaaaaaaaaccgacgcgacgaaacgactttcctccgactactactaccccccctaaacgaactcaaccgcgtcttaaacgccacctcaacctaaacgacgtcccacctaccccgactactacgcgataccgcgaacgaaacccccgataaatccgaacgtaaacgacgacgacgataacgcgaaaccgaaacgcaacgtcgcaacgaaaccgcgaactacttaaaacgcctaccccgccgacccctcatatcgaaaccgaaacgaaaaaaaaaaaaaaacgaaaaaaaaaaancgnncgcaaaaaaatcgataaaaaacgccgaaaccgaataaaaaacacgcgaaccgaacgaaaaaaacccgaccgacgaaaacgaataaaaaaaaaaaactcaatccgaattactaaaaccccactccgaatcgccttcaaccgccatcttatttcttccctctcgctcgataactaaaaaaaccgacaacgaccgcaaacccaaaacgcgatcacgtaaactacgccgccgacgaacctaaaacgaaacgacgctacgacgacccgctaaaaaaaacgcgaaaactcgaatcgaaaacgaaaaaccctaaacgcctaaactcgacacaacgcgatacgactaaactccgaacgcgaataacgcgacaaaactccgaacgcaaataacgcgactaaaaaaaacgcgcaactcgcgaaatacccgacgtcaaaaaccttcgaaaaccaaaatctccgcgaaccgctaactaaaacccaaaaccgaccgaacctcct

SEQ ID NO: 36559 - DNA, 902 bp, Artificial Sequence
  chemically treated genomic DNA (Homo sapiens) CpG-island No: 36559
  unsure (407, 410..)
tattattttgttgacggtttttcgcgggtggttcgggttaggtggcgtcgtcgtttttttttttcgttttgtcgttttcgttttttcgtttttttcggttcggggcgttggtgttggggggggtcggcgcggcggggcggttttttttcggttattgttgttttttttgggcgagtttagtcgcgttttgggcgttattttagtttgggcggcgttttatttgtttcggttgttgcgcggtgtcgcgagcggagttttcgatgggttcggacgtgggcggcggcggcggtggcgcggggtcggggcgtagcgtcgtagcgggatcgcgggttgtttgaggcgtttgtttcgtcggttttttatgtcggagtcgaggcggggggagaaggaaagcgaagggggagggncgnncgtagggggatcggtgggaagcgtcgggatcgggtgggaagtacgcgggtcgggcgggaggggttcggtcgacggaagcgggtggagggagaaggtttaattcgaattgttggggttttatttcggatcgtttttagtcgttattttgttttttttttttcgttcggtgattgggggaatcgatagcggtcgtaggtttagagcgcggttacgtgagttgcgtcgtcgacgagtttgggacggagcgacgttgcgacggttcgttagggggagcgcgggagttcgagtcgggggcggggagttttgggcgtttgggttcggtatagcgcggtgcggttggatttcgggcgcgggtggcgcggtaaaatttcgggcgtaggtggcgcggttgagaggggcgcgtagttcgcgaaatgttcggcgttaaaggttttcggagattaaagttttcgcggatcgttggttggagtttaaagtcggtcggatttttt

SEQ ID NO: 36560 - DNA, 902 bp, Artificial Sequence
  chemically treated genomic DNA (Homo sapiens) CpG-island No: 36560
  unsure (492..493, 496)
aaaaaatccgaccgactttaaactccaaccaacgatccgcgaaaactttaatctccgaaaacctttaacgccgaacatttcgcgaactacgcgcccctctcaaccgcgccacctacgcccgaaattttaccgcgccacccgcgcccgaaatccaaccgcaccgcgctataccgaacccaaacgcccaaaactccccgcccccgactcgaactcccgcgctccccctaacgaaccgtcgcaacgtcgctccgtcccaaactcgtcgacgacgcaactcacgtaaccgcgctctaaacctacgaccgctatcgattcccccaatcaccgaacgaaaaaaaaaaaacaaaataacgactaaaaacgatccgaaataaaaccccaacaattcgaattaaaccttctccctccacccgcttccgtcgaccgaacccctcccgcccgacccgcgtacttcccacccgatcccgacgcttcccaccgatccccctacgnncgnccctcccccttcgctttccttctccccccgcctcgactccgacataaaaaaccgacgaaacaaacgcctcaaacaacccgcgatcccgctacgacgctacgccccgaccccgcgccaccgccgccgccgcccacgtccgaacccatcgaaaactccgctcgcgacaccgcgcaacaaccgaaacaaataaaacgccgcccaaactaaaataacgcccaaaacgcgactaaactcgcccaaaaaaaacaacaataaccgaaaaaaaaccgccccgccgcgccgaccccccccaacaccaacgccccgaaccgaaaaaaacgaaaaaacgaaaacgacaaaacgaaaaaaaaaaacgacgacgccacctaacccgaaccacccgcgaaaaaccgtcaacaaaataata

SEQ ID NO: 36561 - DNA, 683 bp, Artificial Sequence
  chemically treated genomic DNA (Homo sapiens) CpG-island No: 36561
gtaattttcgtattaggtatttaagaacgtgttttggatatattcggcggtgggagcgggtgtttggtttgtattagggatgaggggtggagtagcgaaagtttcggagcgtaatttatttatattttttaagttagggcgcggtcgttttgggcgcgaggttttaagttaagtttcgcgttcggttaggagtcggggagtattttaggttttcggtttggggtcgtcgttattttattttgcggcgcgtatttttgatttggtttcgttttcggcggcgcgagtagcgggcggagcgtaagtagagaggcgttttgggttgtgcggtatcgttttttttcggtgtttggggagggacggagggatcgggcgggagagagagaaagtttgatcgatcggttggcgaagagttgtatgtaatcggtgggaggtcgggtcggttgggtttggggttcgggtttaggttcgtatcgtttttcggtaggtttttggcggtgagcgcggacggttcggaggcggcggttttgagttggtaggcggagggttgttttttgcgttcgtttgttcggcgcggttcgaggatgcgggggggcgatgttcggggttagggacgcgttttgttattaggcgttgtagttgttggtcgagttttgtgttcgtggggttttggagtacgatagttg

SEQ ID NO: 36562 - DNA, 683 bp, Artificial Sequence
  chemically treated genomic DNA (Homo sapiens) CpG-island No: 36562
caactatcgtactccaaaaccccacgaacacaaaactcgaccaacaactacaacgcctaataacaaaacgcgtccctaaccccgaacatcgcccccccgcatcctcgaaccgcgccgaacaaacgaacgcaaaaaacaaccctccgcctaccaactcaaaaccgccgcctccgaaccgtccgcgctcaccgccaaaaacctaccgaaaaacgatacgaacctaaacccgaaccccaaacccaaccgacccgacctcccaccgattacatacaactcttcgccaaccgatcgatcaaactttctctctctcccgcccgatccctccgtccctccccaaacaccgaaaaaaaacgataccgcacaacccaaaacgcctctctacttacgctccgcccgctactcgcgccgccgaaaacgaaaccaaatcaaaaatacgcgccgcaaaataaaataacgacgaccccaaaccgaaaacctaaaatactccccgactcctaaccgaacgcgaaacttaacttaaaacctcgcgcccaaaacgaccgcgccctaacttaaaaaatataaataaattacgctccgaaactttcgctactccacccctcatccctaatacaaaccaaacacccgctcccaccgccgaatatatccaaaacacgttcttaaatacctaatacgaaaattac

SEQ ID NO: 36563 - DNA, 683 bp, Artificial Sequence
  chemically treated genomic DNA (Homo sapiens) CpG-island No: 36563
tagttgtcgtgttttagggttttacgggtatagagttcggttagtagttgtagcgtttggtgatagagcgcgtttttggtttcgggtatcgttttttcgtattttcggatcgcgtcgggtaggcgggcgtaggagatagtttttcgtttgttagtttagagtcgtcgttttcgggtcgttcgcgtttatcgttagggatttgtcgagaaacggtgcgagtttgagttcgagttttagatttagtcggttcggttttttatcggttgtatgtagtttttcgttagtcggtcggttaggttttttttttttttcgttcggttttttcgtttttttttagatatcgaggagaggcggtgtcgtatagtttagagcgtttttttgtttgcgtttcgttcgttattcgcgtcgtcgggggcggggttaggttaggagtgcgcgtcgtagggtaggatagcggcggttttagatcggggatttggggtatttttcggtttttggtcgagcgcgagatttggtttgggatttcgcgtttagagcggtcgcgttttggtttggggagtgtgagtgagttgcgtttcggagttttcgttattttattttttatttttgatgtaaattaagtattcgtttttatcgtcgagtgtgtttaaagtacgtttttggatgtttagtgcgaaggttat

SEQ ID NO: 36564 - DNA, 683 bp, Artificial Sequence
  chemically treated genomic DNA (Homo sapiens) CpG-island No: 36564
ataaccttcgcactaaacatccaaaaacgtactttaaacacactcgacgataaaaacgaatacttaatttacatcaaaaataaaaaataaaataacgaaaactccgaaacgcaactcactcacactccccaaaccaaaacgcgaccgctctaaacgcgaaatcccaaaccaaatctcgcgctcgaccaaaaaccgaaaaataccccaaatccccgatctaaaaccgccgctatcctaccctacgacgcgcactcctaacctaaccccgcccccgacgacgcgaataacgaacgaaacgcaaacaaaaaaacgctctaaactatacgacaccgcctctcctcgatatctaaaaaaaaacgaaaaaaccgaacgaaaaaaaaaaaaaacctaaccgaccgactaacgaaaaactacatacaaccgataaaaaaccgaaccgactaaatctaaaactcgaactcaaactcgcaccgtttctcgacaaatccctaacgataaacgcgaacgacccgaaaacgacgactctaaactaacaaacgaaaaactatctcctacgcccgcctacccgacgcgatccgaaaatacgaaaaaacgatacccgaaaccaaaaacgcgctctatcaccaaacgctacaactactaaccgaactctatacccgtaaaaccctaaaacacgacaacta

SEQ ID NO: 36565 - DNA, 617 bp, Artificial Sequence
  chemically treated genomic DNA (Homo sapiens) CpG-island No: 36565
ttttcgagcgtttttttcgttttcgcgtcgtttggatttttcggggagttcggtcgcgattggcgggcgcggagttttttttttttcggagtttaggaaggcggtttttcgcggcgtcggtcgcgcgcgcgttcgtttttattttgattggacgcggttatttcggtgagtttgtttcgcgaggatatacgtagaggatttgcgcggtaggtcgcggagtggcgcgtagttgtcgttattatttggttttcggtacgtggggtagatgtttttatttttacggcggtagcggaagagggagggtcgggcgcgtcgcggttgtttgtagttttcgtaagcggttatattatagagtttagcgtgcggtgttataggtttcgcggtttcgtttaatagatgtatcgagatgcgcgtgcgtagaaagcgtttcgggggtgaggttttttttttcgttttttttttattttcgttttatttttttttatttttttttttttatttatcgcggtcgtcggggttcgttcgtttagtatttggaggcgagtttttgacgcgattgcgatttaattttcgtttggtgaagaatattttatttatgatttattgaaaataaagat

SEQ ID NO: 36566 - DNA, 617 bp, Artificial Sequence
  chemically treated genomic DNA (Homo sapiens) CpG-island No: 36566
atctttattttcaataaatcataaataaaatattcttcaccaaacgaaaattaaatcgcaatcgcgtcaaaaactcgcctccaaatactaaacgaacgaaccccgacgaccgcgataaataaaaaaaaaaaaataaaaaaaaataaaacgaaaataaaaaaaaaacgaaaaaaaaaacctcacccccgaaacgctttctacgcacgcgcatctcgatacatctattaaacgaaaccgcgaaacctataacaccgcacgctaaactctataatataaccgcttacgaaaactacaaacaaccgcgacgcgcccgaccctccctcttccgctaccgccgtaaaaataaaaacatctaccccacgtaccgaaaaccaaataataacgacaactacgcgccactccgcgacctaccgcgcaaatcctctacgtatatcctcgcgaaacaaactcaccgaaataaccgcgtccaatcaaaataaaaacgaacgcgcgcgcgaccgacgccgcgaaaaaccgccttcctaaactccgaaaaaaaaaaaactccgcgcccgccaatcgcgaccgaactccccgaaaaatccaaacgacgcgaaaacgaaaaaaacgctcgaaaa

SEQ ID NO: 36567 - DNA, 617 bp, Artificial Sequence
  chemically treated genomic DNA (Homo sapiens) CpG-island No: 36567
gtttttatttttagtgagttataggtaaaatattttttattaggcgaggattgagtcgtagtcgcgttaggaattcgtttttaggtattgagcgagcgagtttcgacggtcgcggtgggtggaggggggaaagtgggggagagtggggcgggagtagagggagagcgagggagggagttttattttcgggacgttttttgcgtacgcgtatttcggtgtatttgttgggcgggatcgcggggtttgtgatatcgtacgttgagttttgtgatgtagtcgtttgcggagattgtaagtagtcgcggcgcgttcggttttttttttttcgttgtcgtcgtgggaatggaaatatttgttttacgtgtcggaagttaagtggtggcgataattgcgcgttatttcgcggtttatcgcgtagattttttacgtgtgttttcgcgagataagtttatcgaaatggtcgcgtttagttaaggtaagggcgggcgcgcgcgcggtcggcgtcgcggggagtcgtttttttgggtttcggaaggggaagggtttcgcgttcgttagtcgcgatcgagtttttcggggagtttaagcggcgcggggacggggagggcgttcgggga

SEQ ID NO: 36568 - DNA, 617 bp, Artificial Sequence
  chemically treated genomic DNA (Homo sapiens) CpG-island No: 36568
tccccgaacgccctccccgtccccgcgccgcttaaactccccgaaaaactcgatcgcgactaacgaacgcgaaacccttccccttccgaaacccaaaaaaacgactccccgcgacgccgaccgcgcgcgcgcccgcccttaccttaactaaacgcgaccatttcgataaacttatctcgcgaaaacacacgtaaaaaatctacgcgataaaccgcgaaataacgcgcaattatcgccaccacttaacttccgacacgtaaaacaaatatttccattcccacgacgacaacgaaaaaaaaaaaaccgaacgcgccgcgactacttacaatctccgcaaacgactacatcacaaaactcaacgtacgatatcacaaaccccgcgatcccgcccaacaaatacaccgaaatacgcgtacgcaaaaaacgtcccgaaaataaaactccctccctcgctctccctctactcccgccccactctcccccactttcccccctccacccaccgcgaccgtcgaaactcgctcgctcaatacctaaaaacgaattcctaacgcgactacgactcaatcctcgcctaataaaaaatattttacctataactcactaaaaataaaaac

SEQ ID NO: 36569 - DNA, 633 bp, Artificial Sequence
  chemically treated genomic DNA (Homo sapiens) CpG-island No: 36569
agatgaatcgtttgtatcgtttgtattatttgtatcgttattttggttcgattttttttacgttcgtttcgggtttatttggttttgattaatcgggtgttgcggcgtagtttttttagcgtttagcgttgtgcgtttcgtttaggtttggttttcggcgcgcgggtttttagggggcggggtttagggagcgggcggggttgtgggggcggggttgtgggggcgaggagggggtagcgggcgcgcggttggcgcgcgggggcgggttttggggtacgggggcggggttcgtttagtagtatttgggaaacgttcgcgcggtttggggtaggcgtggtcgtcggggcggagggcggtggtcggtcgcggttcgggcgttaggtcgggcggcgggggcggtagggaggcggcgttttggggtcgtaggcggacgtattttgtgagcggcgttcgggcgtttgggtaggcgtttttcgagtatcggcgtttattttgttcgttcgttaaggagattcgtgcgcggtttatacgtttgggggatagttttttaagacgatattttcgcgaacgtcggttttttgagttagggggacgtttttttgaaagttagttttaaaatagttaaggttttat

SEQ ID NO: 36570 - DNA, 633 bp, Artificial Sequence
  chemically treated genomic DNA (Homo sapiens) CpG-island No: 36570
ataaaaccttaactattttaaaactaactttcaaaaaaacgtccccctaactcaaaaaaccgacgttcgcgaaaatatcgtcttaaaaaactatcccccaaacgtataaaccgcgcacgaatctccttaacgaacgaacaaaataaacgccgatactcgaaaaacgcctacccaaacgcccgaacgccgctcacaaaatacgtccgcctacgaccccaaaacgccgcctccctaccgcccccgccgcccgacctaacgcccgaaccgcgaccgaccaccgccctccgccccgacgaccacgcctaccccaaaccgcgcgaacgtttcccaaatactactaaacgaaccccgcccccgtaccccaaaacccgcccccgcgcgccaaccgcgcgcccgctaccccctcctcgcccccacaaccccgcccccacaaccccgcccgctccctaaaccccgccccctaaaaacccgcgcgccgaaaaccaaacctaaacgaaacgcacaacgctaaacgctaaaaaaactacgccgcaacacccgattaatcaaaaccaaataaacccgaaacgaacgtaaaaaaaatcgaaccaaaataacgatacaaataatacaaacgatacaaacgattcatct

SEQ ID NO: 36571 - DNA, 633 bp, Artificial Sequence
  chemically treated genomic DNA (Homo sapiens) CpG-island No: 36571
ataaaattttaattgttttgggattgatttttaaaagagcgtttttttggtttaagaggtcggcgttcgcggagatgtcgttttaaagggttgttttttaagcgtgtaggtcgcgtacgggtttttttagcgggcgggtaaaatgggcgtcggtattcgggaggcgtttgtttaggcgttcgggcgtcgtttatagagtacgttcgtttgcggttttagagcgtcgtttttttgtcgttttcgtcgttcggtttgacgttcggatcgcggtcggttatcgtttttcgtttcgacggttacgtttgttttaaatcgcgcgggcgttttttaggtgttgttgggcgggtttcgttttcgtgttttaaggttcgttttcgcgcgttagtcgcgcgttcgttgtttttttttcgtttttatagtttcgtttttatagtttcgttcgttttttaagtttcgttttttaggaattcgcgcgtcgaaggttaggtttgggcggagcgtatagcgttgggcgttggggaggttgcgtcgtagtattcggttggttaggattaagtgggttcgaggcggacgtgagaagggtcgggttaagatggcggtgtaggtggtgtaggcggtgtaggcggtttattt

SEQ ID NO: 36572 - DNA, 633 bp, Artificial Sequence
  chemically treated genomic DNA (Homo sapiens) CpG-island No: 36572
aaataaaccgcctacaccgcctacaccacctacaccgccatcttaacccgacccttctcacgtccgcctcgaacccacttaatcctaaccaaccgaatactacgacgcaacctccccaacgcccaacgctatacgctccgcccaaacctaaccttcgacgcgcgaattcctaaaaaacgaaacttaaaaaacgaacgaaactataaaaacgaaactataaaaacgaaaaaaaaacaacgaacgcgcgactaacgcgcgaaaacgaaccttaaaacacgaaaacgaaacccgcccaacaacacctaaaaaacgcccgcgcgatttaaaacaaacgtaaccgtcgaaacgaaaaacgataaccgaccgcgatccgaacgtcaaaccgaacgacgaaaacgacaaaaaaacgacgctctaaaaccgcaaacgaacgtactctataaacgacgcccgaacgcctaaacaaacgcctcccgaataccgacgcccattttacccgcccgctaaaaaaacccgtacgcgacctacacgcttaaaaaacaaccctttaaaacgacatctccgcgaacgccgacctcttaaaccaaaaaaacgctcttttaaaaatcaatcccaaaacaattaaaattttat

SEQ ID NO: 36573 - DNA, 774 bp, Artificial Sequence
  chemically treated genomic DNA (Homo sapiens) CpG-island No: 36573
gttcgcgggattcggcgtcgtaggttagggtcgtttcgtgaagggtagtttgtgtttacgttttgttttattggtattattcggatattttattttcgttcgattttttgtacgggttcgtatttgttttttcgattgttcgttattttagtttttagagtttttttttgcgtcggtttcggcgtgtcgtaggttttttcgcgttattatcggcgtcgtatattttttgtttaaattaatttacggcggttcggacgcgtttattcgtcggacgttttttttttttttcgcggttttttttcgcggttttgttcgtcggcgcgcgttatatcgtcgttttcggtcgttttttcgttatttttcgtttttcgttcgtttcgttgttttttttcgtttttcgcgttttgttcggcgtttcgtttttttcgttagtttttttttttttttttcgtttcgacgtatttttcgcgttagcgttcgtatgtgtttagtataatttttttttcggtacgtttttgtttcgttttgtttcgtagtcgtgtcgtttcgtttttttttttcggcgtttacgtcgttttgttttttttattgcgtttttttatgtttatttttgttttttcgttttttttttagttcgtttttttttcgtattttatcgtttcgatttatttttttttttacgtatatttaattattattataatatttatattttttttatttatgtttttttattatttttttttttattttattttattttaatttattttt

SEQ ID NO: 36574 - DNA, 774 bp, Artificial Sequence
  chemically treated genomic DNA (Homo sapiens) CpG-island No: 36574
aaaaataaattaaaataaaataaaataaaaaaaaaaataataaaaaaacataaataaaaaaaatataaatattataataataattaaatatacgtaaaaaaaaaaataaatcgaaacgataaaatacgaaaaaaaaacgaactaaaaaaaaaacgaaaaaacaaaaataaacataaaaaaacgcaataaaaaaaacaaaacgacgtaaacgccgaaaaaaaaaaacgaaacgacacgactacgaaacaaaacgaaacaaaaacgtaccgaaaaaaaaattatactaaacacatacgaacgctaacgcgaaaaatacgtcgaaacgaaaaaaaaaaaaaaaaactaacgaaaaaaacgaaacgccgaacaaaacgcgaaaaacgaaaaaaaacaacgaaacgaacgaaaaacgaaaaataacgaaaaaacgaccgaaaacgacgatataacgcgcgccgacgaacaaaaccgcgaaaaaaaaccgcgaaaaaaaaaaaaaacgtccgacgaataaacgcgtccgaaccgccgtaaattaatttaaacaaaaaatatacgacgccgataataacgcgaaaaaacctacgacacgccgaaaccgacgcaaaaaaaaactctaaaaactaaaataacgaacaatcgaaaaaacaaatacgaacccgtacaaaaaatcgaacgaaaataaaatatccgaataataccaataaaacaaaacgtaaacacaaactacccttcacgaaacgaccctaacctacgacgccgaatcccgcgaac

SEQ ID NO: 36575 - DNA, 774 bp, Artificial Sequence
  chemically treated genomic DNA (Homo sapiens) CpG-island No: 36575
aggggtgggttggaatagagtgaggtgaggggggaggtaatggaggggtatgagtggggagggtgtgggtgttgtggtggtggttgggtgtgcgtgagggggagggtggatcggggcggtgggatgcgggagaggagcgagttgggggggggacgggagagtagaggtggatatgagagggcgtagtgagagagataggacggcgtgaacgtcgaggaagaaggacggggcggtacgattacgagataagacgaggtagagacgtgtcggggagggagttgtgttggatatatacggacgttggcgcgaagagtgcgtcggggcgagggaggggggaggggattggcggggggagcggggcgtcgggtaaggcgcgaggagcgggaggggatagcgagacgagcgaggggcggggagtggcgggagggcggtcgggggcggcgatgtgacgcgcgtcggcgggtagggtcgcggaggggagtcgcgaggagaggagaggacgttcgacgggtggacgcgttcgggtcgtcgtgagttggtttgggtaggaggtgtgcggcgtcgatgatgacgcgaggagatttgcggtacgtcggggtcggcgtagagagagattttgggagttagggtagcgggtagtcggggagataagtgcgagttcgtgtaaagggtcggacggggatagagtgttcgagtggtattagtagggtaggacgtaggtatagattattttttacggagcggttttggtttgcggcgtcgagtttcgcgggt

SEQ ID NO: 36576 - DNA, 774 bp, Artificial Sequence
  chemically treated genomic DNA (Homo sapiens) CpG-island No: 36576
acccgcgaaactcgacgccgcaaaccaaaaccgctccgtaaaaaataatctatacctacgtcctaccctactaataccactcgaacactctatccccgtccgaccctttacacgaactcgcacttatctccccgactacccgctaccctaactcccaaaatctctctctacgccgaccccgacgtaccgcaaatctcctcgcgtcatcatcgacgccgcacacctcctacccaaaccaactcacgacgacccgaacgcgtccacccgtcgaacgtcctctcctctcctcgcgactcccctccgcgaccctacccgccgacgcgcgtcacatcgccgcccccgaccgccctcccgccactccccgcccctcgctcgtctcgctatcccctcccgctcctcgcgccttacccgacgccccgctccccccgccaatcccctcccccctccctcgccccgacgcactcttcgcgccaacgtccgtatatatccaacacaactccctccccgacacgtctctacctcgtcttatctcgtaatcgtaccgccccgtccttcttcctcgacgttcacgccgtcctatctctctcactacgccctctcatatccacctctactctcccgtcccccccccaactcgctcctctcccgcatcccaccgccccgatccaccctccccctcacgcacacccaaccaccaccacaacacccacaccctccccactcatacccctccattacctcccccctcacctcactctattccaacccacccct

SEQ ID NO: 36577 - DNA, 521 bp, Artificial Sequence
  chemically treated genomic DNA (Homo sapiens) CpG-island No: 36577
gcggagtcgggttcggggttgttttttcgcgggcgaggtttatttgtttcggttcggttttttttcgcgttttaggtggtttagggtagggaggagtcgcgtttcgtttcgcgcggtagtagttaacgtcggttttaggcgggtgcgttgggagtttgggtcgggagtcgggtgagggcgtcgagaggttcggtgggcgcgggcggcgaggtgagttgggttagcgtagtaggcgggggcggtggtgggttcgggacggtttatttcgcgtcggagcgagtgcggggtcgcgcgattgcggcgggagatgcgttgcgttttttttgggcgcgttggggtagttaggagttcgcggggtcgcggggtcgcggggtcgcggggtcgcggcgtagtggcggggtcggggtttggtcgttgtttcgaggcgagtagttgttaatatttggacgggacgggagtagggggtcggggtaaggttggagcggtgtgggtttttaatcgtttagagttttgcggggtta

SEQ ID NO: 36578 - DNA, 521 bp, Artificial Sequence
  chemically treated genomic DNA (Homo sapiens) CpG-island No: 36578
taaccccgcaaaactctaaacgattaaaaacccacaccgctccaaccttaccccgaccccctactcccgtcccgtccaaatattaacaactactcgcctcgaaacaacgaccaaaccccgaccccgccactacgccgcgaccccgcgaccccgcgaccccgcgaccccgcgaactcctaactaccccaacgcgcccaaaaaaaacgcaacgcatctcccgccgcaatcgcgcgaccccgcactcgctccgacgcgaaataaaccgtcccgaacccaccaccgcccccgcctactacgctaacccaactcacctcgccgcccgcgcccaccgaacctctcgacgccctcacccgactcccgacccaaactcccaacgcacccgcctaaaaccgacgttaactactaccgcgcgaaacgaaacgcgactcctccctaccctaaaccacctaaaacgcgaaaaaaaaccgaaccgaaacaaataaacctcgcccgcgaaaaaacaaccccgaacccgactccgc

SEQ ID NO: 36579 - DNA, 521 bp, Artificial Sequence
  chemically treated genomic DNA (Homo sapiens) CpG-island No: 36579
tggtttcgtagggttttggacgattagagatttatatcgttttagttttgtttcggttttttgttttcgtttcgtttagatgttggtagttgttcgtttcgaggtagcgattagatttcgatttcgttattgcgtcgcggtttcgcggtttcgcggtttcgcggtttcgcgagtttttggttgttttagcgcgtttagaaggggcgtagcgtatttttcgtcgtagtcgcgcggtttcgtattcgtttcggcgcggggtgagtcgtttcgaatttattatcgttttcgtttgttgcgttggtttagtttatttcgtcgttcgcgtttatcgagtttttcggcgtttttattcggttttcggtttaggtttttagcgtattcgtttggggtcggcgttggttgttatcgcgcggggcggggcgcggtttttttttgttttgaattatttggggcgcgggagggggtcgggtcgggataggtgagtttcgttcgcgagggagtagtttcgggttcggtttcgt

SEQ ID NO: 36580 - DNA, 521 bp, Artificial Sequence
  chemically treated genomic DNA (Homo sapiens) CpG-island No: 36580
acgaaaccgaacccgaaactactccctcgcgaacgaaactcacctatcccgacccgaccccctcccgcgccccaaataattcaaaacaaaaaaaaaccgcgccccgccccgcgcgataacaaccaacgccgaccccaaacgaatacgctaaaaacctaaaccgaaaaccgaataaaaacgccgaaaaactcgataaacgcgaacgacgaaataaactaaaccaacgcaacaaacgaaaacgataataaattcgaaacgactcaccccgcgccgaaacgaatacgaaaccgcgcgactacgacgaaaaatacgctacgccccttctaaacgcgctaaaacaaccaaaaactcgcgaaaccgcgaaaccgcgaaaccgcgaaaccgcgacgcaataacgaaatcgaaatctaatcgctacctcgaaacgaacaactaccaacatctaaacgaaacgaaaacaaaaaaccgaaacaaaactaaaacgatataaatctctaatcgtccaaaaccctacgaaacca

SEQ ID NO: 36581 - DNA, 774 bp, Artificial Sequence
  chemically treated genomic DNA (Homo sapiens) CpG-island No: 36581
gggaagtagttttttcgttttggagttcggttggggcgtgagggtcgcgcgggttttacgttttaaggttaagtagtcgaaagtatagcgcgttcggggttaaatcgggttgtatcgtaggcgtagatggcgcgtcgggcggaagttggaggtcgtcggtttaatacgtttcgtattcgggattggggttcggtttgtagttttagcgagtaggcgataagggcggcgttatagaggtcgacgcgtttttcgttcgtttgagcgcgtcgtaatagttatttcgttttattcgtttcggggcggggtcgggggcgcggcgtcggggttttttggtttttttcggtttcgtcggtttcgttttttttttgttttcgttttcgaggggttgagggggagggaggggcgacgtatttcggtcgcgttgtacgttcgtcgttttttttagtttcgcgtgcgcgcgcgcgttcgttttaagtttcgcggagtttaatataatgtcgacgtttacgtcgtgcgtaacgtttcggtcggcgtaatagtttcggcgtcgggggcgggggtggtttagatagggagagagggagagggatgagcgcgcgcgagagtcggagatagcgcgagattcgaggaggtcggaagcgcgcgtgcgcgttttcgttcgcgagcgggaggcggagtcgtagtagtagcggtagtagttgtaggagtcgttgtagttgggagaagcgttagagaggtcgggtttgtttcggtcggatcggatttatttttttt

SEQ ID NO: 36582 - DNA, 774 bp, Artificial Sequence
  chemically treated genomic DNA (Homo sapiens) CpG-island No: 36582
aaaaaaaataaatccgatccgaccgaaacaaacccgacctctctaacgcttctcccaactacaacgactcctacaactactaccgctactactacgactccgcctcccgctcgcgaacgaaaacgcgcacgcgcgcttccgacctcctcgaatctcgcgctatctccgactctcgcgcgcgctcatccctctccctctctccctatctaaaccacccccgcccccgacgccgaaactattacgccgaccgaaacgttacgcacgacgtaaacgtcgacattatattaaactccgcgaaacttaaaacgaacgcgcgcgcgcacgcgaaactaaaaaaaacgacgaacgtacaacgcgaccgaaatacgtcgcccctccctccccctcaacccctcgaaaacgaaaacaaaaaaaaaacgaaaccgacgaaaccgaaaaaaaccaaaaaaccccgacgccgcgcccccgaccccgccccgaaacgaataaaacgaaataactattacgacgcgctcaaacgaacgaaaaacgcgtcgacctctataacgccgcccttatcgcctactcgctaaaactacaaaccgaaccccaatcccgaatacgaaacgtattaaaccgacgacctccaacttccgcccgacgcgccatctacgcctacgatacaacccgatttaaccccgaacgcgctatactttcgactacttaaccttaaaacgtaaaacccgcgcgaccctcacgccccaaccgaactccaaaacgaaaaaactacttccc

SEQ ID NO: 36583 - DNA, 774 bp, Artificial Sequence
  chemically treated genomic DNA (Homo sapiens) CpG-island No: 36583
ggaggggatggattcggttcgatcggagtaggttcggtttttttggcgttttttttagttgtagcggtttttatagttgttgtcgttattgttgcggtttcgtttttcgttcgcgggcgggggcgcgtacgcgcgttttcggttttttcgggtttcgcgttgttttcggttttcgcgcgcgtttatttttttttttttttttttgtttgggttattttcgttttcggcgtcggggttgttgcgtcggtcggggcgttgcgtacggcgtaggcgtcggtattgtgttaaatttcgcgggatttggggcgagcgcgcgcgcgtacgcgggattgagggaagcggcgagcgtgtaacgcggtcggagtgcgtcgttttttttttttttttagtttttcggggacggggatagggagggggcggggtcggcgagatcggagggggttagagggtttcggcgtcgcgttttcggtttcgtttcggggcgggtgggacgaggtggttgttgcggcgcgtttaggcgggcgggggacgcgtcggtttttgtggcgtcgtttttgtcgtttgttcgttgaggttgtaggtcgggttttagtttcgggtacggagcgtgttgagtcggcggtttttagttttcgttcgacgcgttatttgcgtttgcgatatagttcggtttggtttcgagcgcgttgtgttttcggttgtttagttttggggcgtgggattcgcgcggtttttacgttttaatcggattttaaggcggggaggttgtttttt

SEQ ID NO: 36584 - DNA, 774 bp, Artificial Sequence
  chemically treated genomic DNA (Homo sapiens) CpG-island No: 36584
aaaaaacaacctccccgccttaaaatccgattaaaacgtaaaaaccgcgcgaatcccacgccccaaaactaaacaaccgaaaacacaacgcgctcgaaaccaaaccgaactatatcgcaaacgcaaataacgcgtcgaacgaaaactaaaaaccgccgactcaacacgctccgtacccgaaactaaaacccgacctacaacctcaacgaacaaacgacaaaaacgacgccacaaaaaccgacgcgtcccccgcccgcctaaacgcgccgcaacaaccacctcgtcccacccgccccgaaacgaaaccgaaaacgcgacgccgaaaccctctaaccccctccgatctcgccgaccccgccccctccctatccccgtccccgaaaaactaaaaaaaaaaaaaaaacgacgcactccgaccgcgttacacgctcgccgcttccctcaatcccgcgtacgcgcgcgcgctcgccccaaatcccgcgaaatttaacacaataccgacgcctacgccgtacgcaacgccccgaccgacgcaacaaccccgacgccgaaaacgaaaataacccaaacaaaaaaaaaaaaaaaaaaataaacgcgcgcgaaaaccgaaaacaacgcgaaacccgaaaaaaccgaaaacgcgcgtacgcgcccccgcccgcgaacgaaaaacgaaaccgcaacaataacgacaacaactataaaaaccgctacaactaaaaaaaacgccaaaaaaaccgaacctactccgatcgaaccgaatccatcccctcc

SEQ ID NO: 36585 - DNA, 871 bp, Artificial Sequence
  chemically treated genomic DNA (Homo sapiens) CpG-island No: 36585
tagttcgcggttttgtcgtcgaagtagtagcggcggtagtagtaggaggcggcggcgaggcgtcggaaggattacgtatttgacgggttcgtttttgagggttttagcgcgggacgtttatcggtcgtcgtcgtttagggcgtatttcgcggtggcggcgggaagggagggatcggttacggggaatcgaacgcgaatcgtttttttttttttttttttttttatttttttttcgattcgtcgttcgttttttcggttttcgtttttttttttttttataaaatttcggatggaggcgtcgtcgattcgtcgtcgtttggtttcgggggatggttttgttaagcggttagagtttcggcgttaggcgtagtcgtcgtcgttttcgcgaggcgtttttgttttcgttttttagaatcgggttttcgagtggttcgggtttttcgtttgtttgtattcgtagttttggtacgagggttattcgtcgtttttgttgttatcgtttttgtcggaatcgtttgcgagtttcggtggttttcgtttttttatcgttttttcggattttgggttgggggtggtacgtgggtatcggtttcgggaggcggaggcggtgcgcgtttatttgtcgtcggtgttgttgcggcggggggtgtggaggaggcgtttttgggtagtttcggtcgtgttgtttttttcgtcgtcgtcgtttttgtttttcgttgttgttgttgttgttgtcgtcgcggtcggtgttttcggcgcggcggcggcggcggcggcggggttttttttgttcggttacgttaaggttatatgatcgagagagcggagagattagtgtaaagaggttgcgagcggttttcgtcggggggga

SEQ ID NO: 36586 - DNA, 871 bp, Artificial Sequence
  chemically treated genomic DNA (Homo sapiens) CpG-island No: 36586
tcccccccgacgaaaaccgctcgcaacctctttacactaatctctccgctctctcgatcatataaccttaacgtaaccgaacaaaaaaaaccccgccgccgccgccgccgccgcgccgaaaacaccgaccgcgacgacaacaacaacaacaacaacgaaaaacaaaaacgacgacgacgaaaaaaacaacacgaccgaaactacccaaaaacgcctcctccacaccccccgccgcaacaacaccgacgacaaataaacgcgcaccgcctccgcctcccgaaaccgatacccacgtaccacccccaacccaaaatccgaaaaaacgataaaaaaacgaaaaccaccgaaactcgcaaacgattccgacaaaaacgataacaacaaaaacgacgaataaccctcgtaccaaaactacgaatacaaacaaacgaaaaacccgaaccactcgaaaacccgattctaaaaaacgaaaacaaaaacgcctcgcgaaaacgacgacgactacgcctaacgccgaaactctaaccgcttaacaaaaccatcccccgaaaccaaacgacgacgaatcgacgacgcctccatccgaaattttataaaaaaaaaaaaaaacgaaaaccgaaaaaacgaacgacgaatcgaaaaaaaaataaaaaaaaaaaaaaaaaaaaaaacgattcgcgttcgattccccgtaaccgatccctcccttcccgccgccaccgcgaaatacgccctaaacgacgacgaccgataaacgtcccgcgctaaaaccctcaaaaacgaacccgtcaaatacgtaatccttccgacgcctcgccgccgcctcctactactaccgccgctactacttcgacgacaaaaccgcgaacta

SEQ ID NO: 36587 - DNA, 871 bp, Artificial Sequence
  chemically treated genomic DNA (Homo sapiens) CpG-island No: 36587
tttttttcggcgggagtcgttcgtagtttttttgtattagttttttcgttttttcggttatgtgattttaacgtaatcggataggaaaagtttcgtcgtcgtcgtcgtcgtcgcgtcggagatatcgatcgcggcggtagtagtagtagtagtagcgagaggtagaggcggcggcggcggggaggatagtacggtcgaggttgtttagaggcgttttttttatatttttcgtcgtagtagtatcggcgataggtaagcgcgtatcgttttcgtttttcggggtcggtgtttacgtgttatttttagtttagggttcgggaaggcggtgggggggcgggggttatcggagttcgtaaacggtttcggtagaggcggtggtaataaagacgacgaatgattttcgtattagggttacgggtgtaggtaggcggaaggttcgggttattcggggattcggttttgggaagcgagggtaggggcgtttcgcgggggcggcggcggttgcgtttggcgtcggggttttggtcgtttgataaaattatttttcggagttaggcggcggcgagtcggcggcgtttttattcggggttttgtgggagggggaggggacggaagtcgagagggcgggcggcggatcggagggagggtgggagggaggaaggggaggggggcgattcgcgttcggtttttcgtggtcggttttttttttttcgtcgttatcgcgaagtgcgttttgggcggcggcggtcggtgagcgtttcgcgttggagtttttagaggcgggttcgttaggtgcgtaattttttcgacgtttcgtcgtcgttttttgttgttgtcgtcgttgttgtttcggcggtaaggtcgcgagttg

SEQ ID NO: 36588 - DNA, 871 bp, Artificial Sequence
  chemically treated genomic DNA (Homo sapiens) CpG-island No: 36588
caactcgcgaccttaccgccgaaacaacaacgacgacaacaacaaaaaacgacgacgaaacgtcgaaaaaattacgcacctaacgaacccgcctctaaaaactccaacgcgaaacgctcaccgaccgccgccgcccaaaacgcacttcgcgataacgacgaaaaaaaaaaaaccgaccacgaaaaaccgaacgcgaatcgcccccctccccttcctccctcccaccctccctccgatccgccgcccgccctctcgacttccgtcccctccccctcccacaaaaccccgaataaaaacgccgccgactcgccgccgcctaactccgaaaaataattttatcaaacgaccaaaaccccgacgccaaacgcaaccgccgccgcccccgcgaaacgcccctaccctcgcttcccaaaaccgaatccccgaataacccgaaccttccgcctacctacacccgtaaccctaatacgaaaatcattcgtcgtctttattaccaccgcctctaccgaaaccgtttacgaactccgataacccccgcccccccaccgccttcccgaaccctaaactaaaaataacacgtaaacaccgaccccgaaaaacgaaaacgatacgcgcttacctatcgccgatactactacgacgaaaaatataaaaaaaacgcctctaaacaacctcgaccgtactatcctccccgccgccgccgcctctacctctcgctactactactactactaccgccgcgatcgatatctccgacgcgacgacgacgacgacgacgaaacttttcctatccgattacgttaaaatcacataaccgaaaaaacgaaaaaactaatacaaaaaaactacgaacgactcccgccgaaaaaaa

SEQ ID NO: 36589 - DNA, 509 bp, Artificial Sequence
  chemically treated genomic DNA (Homo sapiens) CpG-island No: 36589
aatcgaaggcgtttgcggaaagttggggacgggttggcgaagaagacgggcgaggagggcggcgaacgttgggcggcggggcgcgcgcggggttaggggttcgggtaggaacgtttcgtttttagtcgttatcgttatcgggaaggttattagttgtagtttcgggatgcggttttaggttcgcggtcgttatcgcggggcggtttttcggcgggcgttggggagtgcgtcgtttatttcgttaggtttacgtaggtcgtttgtttagttcgcgttcgcgggttttatttcgttttgtcgtttcggttttttcgcgttcgcgttgagaaagtttttagggcggggcgggtttggggcgtcgtacggttttggtggggattttttcgtagattttaaagtcgttcgcgttggttttaatgtttttataatcgtcggacgcgtttttataaatattagggatatttttaaatttgtggggatatttttgtaaatttttcgtggtgttgata

SEQ ID NO: 36590 - DNA, 509 bp, Artificial Sequence
  chemically treated genomic DNA (Homo sapiens) CpG-island No: 36590
tatcaacaccacgaaaaatttacaaaaatatccccacaaatttaaaaatatccctaatatttataaaaacgcgtccgacgattataaaaacattaaaaccaacgcgaacgactttaaaatctacgaaaaaatccccaccaaaaccgtacgacgccccaaacccgccccgccctaaaaactttctcaacgcgaacgcgaaaaaaccgaaacgacaaaacgaaataaaacccgcgaacgcgaactaaacaaacgacctacgtaaacctaacgaaataaacgacgcactccccaacgcccgccgaaaaaccgccccgcgataacgaccgcgaacctaaaaccgcatcccgaaactacaactaataaccttcccgataacgataacgactaaaaacgaaacgttcctacccgaacccctaaccccgcgcgcgccccgccgcccaacgttcgccgccctcctcgcccgtcttcttcgccaacccgtccccaactttccgcaaacgccttcgatt

SEQ ID NO: 36591 - DNA, 509 bp, Artificial Sequence
  chemically treated genomic DNA (Homo sapiens) CpG-island No: 36591
tgttaatattacggggagtttgtaggagtgtttttatagatttgggggtgtttttggtgtttgtggggacgcgttcggcgattgtgaggatattagagttaacgcgggcggttttggggtttgcgggagagtttttattagagtcgtgcggcgttttagattcgtttcgttttgggggtttttttagcgcgaacgcggaagggtcgaggcgatagggcggggtggggttcgcgggcgcgggttgggtaggcggtttgcgtgggtttggcggggtgggcggcgtattttttagcgttcgtcgaggggtcgtttcgcgatggcggtcgcgggtttaaggtcgtatttcggagttgtaattggtggttttttcggtggcggtggcggttgaggacgaggcgtttttgttcgagtttttggtttcgcgcgcgtttcgtcgtttagcgttcgtcgtttttttcgttcgtttttttcgttagttcgtttttaatttttcgtagacgttttcggtt

SEQ ID NO: 36592 - DNA, 509 bp, Artificial Sequence
  chemically treated genomic DNA (Homo sapiens) CpG-island No: 36592
aaccgaaaacgtctacgaaaaattaaaaacgaactaacgaaaaaaacgaacgaaaaaaacgacgaacgctaaacgacgaaacgcgcgcgaaaccaaaaactcgaacaaaaacgcctcgtcctcaaccgccaccgccaccgaaaaaaccaccaattacaactccgaaatacgaccttaaacccgcgaccgccatcgcgaaacgacccctcgacgaacgctaaaaaatacgccgcccaccccgccaaacccacgcaaaccgcctacccaacccgcgcccgcgaaccccaccccgccctatcgcctcgacccttccgcgttcgcgctaaaaaaacccccaaaacgaaacgaatctaaaacgccgcacgactctaataaaaactctcccgcaaaccccaaaaccgcccgcgttaactctaatatcctcacaatcgccgaacgcgtccccacaaacaccaaaaacacccccaaatctataaaaacactcctacaaactccccgtaatattaaca

SEQ ID NO: 36593 - DNA, 1541 bp, Artificial Sequence
  chemically treated genomic DNA (Homo sapiens) CpG-island No: 36593
tgttgttggtataagtagtggcgtattatgtgcgcgtttaagatgatggcgatttgttttaacgtggtgcgcggcggggcgacgttttatttcgtaaatacgtgatggattattcggagttggcgatttagtttttattttacggtagtttcgttattatgttcggttcgttttgttttttacgtttgttgggtcgtttcgatcgcgttatcgtttttaagtggattatcgtcgtttattcgttgattagtttgttgattttcgttatttcggcggagtatatcgcgtttatttttgtttttaatattttgtttttgttcgtttttaatattattacgtcgttgtagtggttgatggtttttgacgtggtggattacgaggagagtcgtagcggtcgtcgtttcgacgggttggtgttttttatttatttgtttagtttgaagattggtttggcgattggcggggcggtggtgggttggattttggcgtacgttaattatttcgttagtagtagcgtgtagtcggttgaggtgtttattattattaaaattttgttttgcgtggtgtcggtggtgttttacgcgggtatgtttattatgttgtcgttttataagtttatcgatgttcgcgtggaggttattagtcggtagttgattaagtatcgcgcggcgtagggcgaggtcgttttcgacgtcgcgatagtcgtattttattaatcggaggtaatatggaaattattaattcgatatttatcggttttaattcggattcgtttttgtgtcgttagggcgaggattattatatcgttatttcgattttcgagtggttttcgggcgtgcgtatttattattttcgtgatttgaaaaattggtcgttggttagtatttcgttggatcgcgtgtcgatgttggatatgaagggtaattcggatttcggcggtatttgggcgtcgtgtttgagttacgtcgacggtaaattttggttgttttatatcgacgtgaagattgtcgattcgtcgtggaaaaacggtcgtaattttttcgttatcgcgttttttatcgaggggttatggagcgagttaatttcgatgggtaacggcgggtttgattcgtttttgttttacgacgacgatggtcgtaaatattatatttatcgttcgtgggggtcgcgttattatagtaattcgtataatattatcgtgttataggcgtttgattcgtagatcggtacgttttcgttcgagcgtaaaacgttgtttatcggtacgtcgttttgttatatcgaaggcgcgtatttgtatcgttacgcgggatggtattatttgatggtcgtcgagggcggtattagttacgagtacgtcgtcgtggtgttgcgttttaaaaatatcgacgggttcgtacgagttgattcggacgtaacgatgatgattaagttggatttgtcggagaattcgttgtagaagagcgggtacggttcgttgttgtagacgtatacgggtgaatggtatatgggttatttaataagtcggtcgttgcgttttg

SEQ ID NO: 36594 - DNA, 1541 bp, Artificial Sequence
  chemically treated genomic DNA (Homo sapiens) CpG-island No: 36594
caaaacgcaacgaccgacttattaaataacccatataccattcacccgtatacgtctacaacaacgaaccgtacccgctcttctacaacgaattctccgacaaatccaacttaatcatcatcgttacgtccgaatcaactcgtacgaacccgtcgatatttttaaaacgcaacaccacgacgacgtactcgtaactaataccgccctcgacgaccatcaaataataccatcccgcgtaacgatacaaatacgcgccttcgatataacaaaacgacgtaccgataaacaacgttttacgctcgaacgaaaacgtaccgatctacgaatcaaacgcctataacacgataatattatacgaattactataataacgcgacccccacgaacgataaatataatatttacgaccatcgtcgtcgtaaaacaaaaacgaatcaaacccgccgttacccatcgaaattaactcgctccataacccctcgataaaaaacgcgataacgaaaaaattacgaccgtttttccacgacgaatcgacaatcttcacgtcgatataaaacaaccaaaatttaccgtcgacgtaactcaaacacgacgcccaaataccgccgaaatccgaattacccttcatatccaacatcgacacgcgatccaacgaaatactaaccaacgaccaatttttcaaatcacgaaaataataaatacgcacgcccgaaaaccactcgaaaatcgaaataacgatataataatcctcgccctaacgacacaaaaacgaatccgaattaaaaccgataaatatcgaattaataatttccatattacctccgattaataaaatacgactatcgcgacgtcgaaaacgacctcgccctacgccgcgcgatacttaatcaactaccgactaataacctccacgcgaacatcgataaacttataaaacgacaacataataaacatacccgcgtaaaacaccaccgacaccacgcaaaacaaaattttaataataataaacacctcaaccgactacacgctactactaacgaaataattaacgtacgccaaaatccaacccaccaccgccccgccaatcgccaaaccaatcttcaaactaaacaaataaataaaaaacaccaacccgtcgaaacgacgaccgctacgactctcctcgtaatccaccacgtcaaaaaccatcaaccactacaacgacgtaataatattaaaaacgaacaaaaacaaaatattaaaaacaaaaataaacgcgatatactccgccgaaataacgaaaatcaacaaactaatcaacgaataaacgacgataatccacttaaaaacgataacgcgatcgaaacgacccaacaaacgtaaaaaacaaaacgaaccgaacataataacgaaactaccgtaaaataaaaactaaatcgccaactccgaataatccatcacgtatttacgaaataaaacgtcgccccgccgcgcaccacgttaaaacaaatcgccatcatcttaaacgcgcacataatacgccactacttataccaacaaca

SEQ ID NO: 36595 - DNA, 1541 bp, Artificial Sequence
  chemically treated genomic DNA (Homo sapiens) CpG-island No: 36595
taaggcgtaacggtcggtttgttaagtagtttatgtattatttattcgtatgcgtttgtagtagcgagtcgtgttcgtttttttgtagcgggtttttcggtaggtttaatttggttattatcgttacgttcgggttagttcgtacgggttcgtcgatatttttggaacgtagtattacgacggcgtgttcgtagttggtgtcgttttcggcggttattaggtagtattatttcgcgtggcgatataggtgcgcgttttcggtgtagtagagcggcgtgtcggtaaatagcgttttgcgttcgggcgagagcgtgtcggtttgcgggttaaacgtttgtaatacgatggtgttgtgcgggttgttgtggtggcgcggtttttacgggcggtagatatagtatttgcggttatcgtcgtcgtggaatagggacgggttaaattcgtcgttgtttatcgggattggttcgttttatggtttttcgatggagggcgcggtgacgaggaagttgcggtcgtttttttacggcgagtcgataatttttacgtcggtgtagagtagttagaatttatcgtcggcgtagtttaggtacggcgtttagatgtcgtcggagttcgggttgttttttatgtttagtatcgatacgcggtttaacggggtgttgattagcgattagttttttaggttacgggagtggtagatgcgtacgttcgggaattattcgaaggtcgaggtggcgatgtagtagttttcgttttggcggtatagggacgggttcgggttgaagtcggtgagtatcgggttagtgatttttatattgttttcggttaatgggatgcggttgtcgcggcgtcgggaacggtttcgttttgcgtcgcgcggtgtttaattagttgtcggttgatggtttttacgcgggtatcggtgagtttgtagagcgatagtatgatgaatatgttcgcgtagagtattatcggtattacgtagaatagaattttgatggtggtgagtattttaatcggttgtacgttgttgttggcggaatagttgacgtacgttaggatttagtttattatcgtttcgttaatcgttaggttaatttttaggttgaataggtaggtggagaatattagttcgtcgaggcggcgatcgttgcggtttttttcgtagtttattacgttagaagttattagttattgtagcggcgtggtggtattaaagacgaataggaataggatgttgagggtaaaaatgagcgcgatgtgtttcgtcggggtgacgaaaattagtaggttgattagcgagtaggcgacgatgatttatttgaaggcggtgacgcggtcgaagcggtttagtaggcgtgaggagtaaagcgagtcgaatatggtggcgaggttgtcgtaaagtaaaaattgggtcgttaatttcgggtgatttattacgtatttacgaagtagagcgtcgtttcgtcgcgtattacgttggagtaggtcgttattattttgaacgcgtatatgatgcgttattgtttgtgttaatagta

SEQ ID NO: 36596 - DNA, 1541 bp, Artificial Sequence
  chemically treated genomic DNA (Homo sapiens) CpG-island No: 36596
tactattaacacaaacaataacgcatcatatacgcgttcaaaataataacgacctactccaacgtaatacgcgacgaaacgacgctctacttcgtaaatacgtaataaatcacccgaaattaacgacccaatttttactttacgacaacctcgccaccatattcgactcgctttactcctcacgcctactaaaccgcttcgaccgcgtcaccgccttcaaataaatcatcgtcgcctactcgctaatcaacctactaattttcgtcaccccgacgaaacacatcgcgctcatttttaccctcaacatcctattcctattcgtctttaataccaccacgccgctacaataactaataacttctaacgtaataaactacgaaaaaaaccgcaacgatcgccgcctcgacgaactaatattctccacctacctattcaacctaaaaattaacctaacgattaacgaaacgataataaactaaatcctaacgtacgtcaactattccgccaacaacaacgtacaaccgattaaaatactcaccaccatcaaaattctattctacgtaataccgataatactctacgcgaacatattcatcatactatcgctctacaaactcaccgatacccgcgtaaaaaccatcaaccgacaactaattaaacaccgcgcgacgcaaaacgaaaccgttcccgacgccgcgacaaccgcatcccattaaccgaaaacaatataaaaatcactaacccgatactcaccgacttcaacccgaacccgtccctataccgccaaaacgaaaactactacatcgccacctcgaccttcgaataattcccgaacgtacgcatctaccactcccgtaacctaaaaaactaatcgctaatcaacaccccgttaaaccgcgtatcgatactaaacataaaaaacaacccgaactccgacgacatctaaacgccgtacctaaactacgccgacgataaattctaactactctacaccgacgtaaaaattatcgactcgccgtaaaaaaacgaccgcaacttcctcgtcaccgcgccctccatcgaaaaaccataaaacgaaccaatcccgataaacaacgacgaatttaacccgtccctattccacgacgacgataaccgcaaatactatatctaccgcccgtaaaaaccgcgccaccacaacaacccgcacaacaccatcgtattacaaacgtttaacccgcaaaccgacacgctctcgcccgaacgcaaaacgctatttaccgacacgccgctctactacaccgaaaacgcgcacctatatcgccacgcgaaataatactacctaataaccgccgaaaacgacaccaactacgaacacgccgtcgtaatactacgttccaaaaatatcgacgaacccgtacgaactaacccgaacgtaacgataataaccaaattaaacctaccgaaaaacccgctacaaaaaaacgaacacgactcgctactacaaacgcatacgaataaataatacataaactacttaacaaaccgaccgttacgcctta

SEQ ID NO: 36597 - DNA, 908 bp, Artificial Sequence
  chemically treated genomic DNA (Homo sapiens) CpG-island No: 36597
ttcggcggtaggattacgttattcgggtttttacgtcgttttgttcgcgtaggtattgcggaagcgcgttcggcgttcggacgtttgttattatttaaggttttcgtttatcgtttggtcggttacggttatggcgtttagatgtagtaggtcgaggtcgcgtaggtggagtattattttcggtacgtcgttcgcgaggaaggcgcgtacggtcgggtgatagttcgggtcgttgggtagtacgtttattagacgcggtattttacggttgatgcgcgtttagtgtttaacgttcgggatcgtgtagttcgtcgcgtgggcgatggtcggaatgtgtagtagtaaattggtggagtcgtcgaacgtcgcgtggattattatcgcgttttcgatggttttatcggagaggatatttcgcgtggtgatgtcgcggttatttagttcgttgatcgcgcgcgtcgattggcgggcgatttttagttatatcgtttgttcggacggcgttagcgcggagtgcggtagcgttagatttagcgttttcgcgattatttgcgaggtgttcgtcgtgtcgaggaattgatattcgtcgttcggcgaggcgtaggcgcgatagtttagttcggcggttttttgtagggagagttcgtggttggcgaaacgcgcgtcgatggtttgtattttgttcgcgtttttttcgacggtcggcggtagcgtcgtttcgttcggtattagaatagtcggtaggtcgtgtatcgcggttagcgtaattatggtggcggtagttttttatcgtaggtcgttacgtcgattatcgtcgtcgcgtcggtagggagcggataagcggcgaaatacgatcgtcgcgtcgttgcggtacggtagggaatcgaatatatcgtgcgtgtttttgt

SEQ ID NO: 36598 - DNA, 908 bp, Artificial Sequence
  chemically treated genomic DNA (Homo sapiens) CpG-island No: 36598
acaaaaacacgcacgatatattcgattccctaccgtaccgcaacgacgcgacgatcgtatttcgccgcttatccgctccctaccgacgcgacgacgataatcgacgtaacgacctacgataaaaaactaccgccaccataattacgctaaccgcgatacacgacctaccgactattctaataccgaacgaaacgacgctaccgccgaccgtcgaaaaaaacgcgaacaaaatacaaaccatcgacgcgcgtttcgccaaccacgaactctccctacaaaaaaccgccgaactaaactatcgcgcctacgcctcgccgaacgacgaatatcaattcctcgacacgacgaacacctcgcaaataatcgcgaaaacgctaaatctaacgctaccgcactccgcgctaacgccgtccgaacaaacgatataactaaaaatcgcccgccaatcgacgcgcgcgatcaacgaactaaataaccgcgacatcaccacgcgaaatatcctctccgataaaaccatcgaaaacgcgataataatccacgcgacgttcgacgactccaccaatttactactacacattccgaccatcgcccacgcgacgaactacacgatcccgaacgttaaacactaaacgcgcatcaaccgtaaaataccgcgtctaataaacgtactacccaacgacccgaactatcacccgaccgtacgcgccttcctcgcgaacgacgtaccgaaaataatactccacctacgcgacctcgacctactacatctaaacgccataaccgtaaccgaccaaacgataaacgaaaaccttaaataataacaaacgtccgaacgccgaacgcgcttccgcaatacctacgcgaacaaaacgacgtaaaaacccgaataacgtaatcctaccgccgaa

SEQ ID NO: 36599 - DNA, 908 bp, Artificial Sequence
  chemically treated genomic DNA (Homo sapiens) CpG-island No: 36599
gtaagggtacgtacggtatgttcgattttttgtcgtatcgtaacgacgcggcgatcgtgtttcgtcgtttattcgttttttgtcgacgcggcggcggtgatcggcgtagcgatttgcgataaagggttgtcgttattatgattgcgttggtcgcgatgtacgatttgtcgattattttggtgtcgggcggggcgacgttgtcgtcgatcgtcggggaagacgcgggtaaggtgtagattatcggcgcgcgtttcgttaattacgaattttttttgtaggaggtcgtcgaattgggttgtcgcgtttgcgtttcgtcgggcggcgggtgttagtttttcggtacggcgggtatttcgtaggtggtcgcggaggcgttgggtttggcgttgtcgtatttcgcgttggcgtcgttcgggtaggcggtgtggttggagatcgttcgttagtcggcgcgcgcggttagcgagttggatagtcgcggtattattacgcgggatatttttttcgataaagttatcgaaaacgcgatggtgatttacgcggcgttcggcggttttattaatttattgttgtatatttcggttatcgtttacgcggcgggttgtacgatttcggacgttgagtattggacgcgtattaatcgtaaagtgtcgcgtttggtgagcgtgttgtttaacggttcggattattattcgatcgtgcgcgtttttttcgcgggcggcgtgtcggaggtgatgttttatttgcgcgatttcggtttgttgtatttggacgttatgatcgtgatcggttagacggtgggcgagaattttgaatggtggtaggcgttcgagcgtcgggcgcgttttcgtagtgtttgcgcgagtaggacggcgtaaaagttcggatgacgtgattttgtcgtcgga

SEQ ID NO: 36600 - DNA, 908 bp, Artificial Sequence
  chemically treated genomic DNA (Homo sapiens) CpG-island No: 36600
tccgacgacaaaatcacgtcatccgaacttttacgccgtcctactcgcgcaaacactacgaaaacgcgcccgacgctcgaacgcctaccaccattcaaaattctcgcccaccgtctaaccgatcacgatcataacgtccaaatacaacaaaccgaaatcgcgcaaataaaacatcacctccgacacgccgcccgcgaaaaaaacgcgcacgatcgaataataatccgaaccgttaaacaacacgctcaccaaacgcgacactttacgattaatacgcgtccaatactcaacgtccgaaatcgtacaacccgccgcgtaaacgataaccgaaatatacaacaataaattaataaaaccgccgaacgccgcgtaaatcaccatcgcgttttcgataactttatcgaaaaaaatatcccgcgtaataataccgcgactatccaactcgctaaccgcgcgcgccgactaacgaacgatctccaaccacaccgcctacccgaacgacgccaacgcgaaatacgacaacgccaaacccaacgcctccgcgaccacctacgaaatacccgccgtaccgaaaaactaacacccgccgcccgacgaaacgcaaacgcgacaacccaattcgacgacctcctacaaaaaaaattcgtaattaacgaaacgcgcgccgataatctacaccttacccgcgtcttccccgacgatcgacgacaacgtcgccccgcccgacaccaaaataatcgacaaatcgtacatcgcgaccaacgcaatcataataacgacaaccctttatcgcaaatcgctacgccgatcaccgccgccgcgtcgacaaaaaacgaataaacgacgaaacacgatcgccgcgtcgttacgatacgacaaaaaatcgaacataccgtacgtacccttac

SEQ ID NO: 36601 - DNA, 953 bp, Artificial Sequence
  chemically treated genomic DNA (Homo sapiens) CpG-island No: 36601
cggagaacggtaagtatcgtttcggtatgaagttggtcgagcgcggttattttgtcgtgggttttatcgatattcggtagaaggtaaaaggttggttgacggagttgtttcggcggatcgggtagattatttatttggggattttggacgggcgtaaggggtttatatcgagaagattgaaggtaagttggtcgttatcgtttatttacgtatcggtcgtcgtttgtcggtgtacgttatcgttatcggtaaggtgttgattgtttggttgggcgaggtcgagttgaacgttttgttggagggttattagtatattatttttacgttcgttattttcgcgtttcgcgaagttttaatgagcgttttggcgtagattcgcgagtaaggttacgttttggatagcgaagagaacgagtagggcgtgcgttgcgtggcggtgtcggtgtggaattacgagtttcgcgttatcgtcgttttgagtttgtcgacgttgatttttcgcgtggacgacgcggagttggttaattttcgcgagtagttttagtaggtcgggttcgcgttttcgcgcgcgttgggttattcggtttgagtcgttagatcggttcgtaggtgaagtagtcgaagttcgcgtagtagtcgtcgtcgttgatgttttcgtagtgtaggtttataaacgcgtcggtgaagaagtcgcgttcgtcgatgtagtcgttcgatagtttttacgttttatacgttatcggtacggtgtgttacgtttcgttattaaacgagtagttgtagcggtagattagcgtatttacgtttattcgtagttagacgtttttcgtatgtttcggtatcggaatgggttgttcgtgtagcggttacgacggtacgttgtggtcgagttggataattttgatgggtttattttgttttttttcgtagtttataaagtagtagttttagtt

SEQ ID NO: 36602 - DNA, 953 bp, Artificial Sequence
  chemically treated genomic DNA (Homo sapiens) CpG-island No: 36602
aactaaaactactactttataaactacgaaaaaaaacaaaataaacccatcaaaattatccaactcgaccacaacgtaccgtcgtaaccgctacacgaacaacccattccgataccgaaacatacgaaaaacgtctaactacgaataaacgtaaatacgctaatctaccgctacaactactcgtttaataacgaaacgtaacacaccgtaccgataacgtataaaacgtaaaaactatcgaacgactacatcgacgaacgcgacttcttcaccgacgcgtttataaacctacactacgaaaacatcaacgacgacgactactacgcgaacttcgactacttcacctacgaaccgatctaacgactcaaaccgaataacccaacgcgcgcgaaaacgcgaacccgacctactaaaactactcgcgaaaattaaccaactccgcgtcgtccacgcgaaaaatcaacgtcgacaaactcaaaacgacgataacgcgaaactcgtaattccacaccgacaccgccacgcaacgcacgccctactcgttctcttcgctatccaaaacgtaaccttactcgcgaatctacgccaaaacgctcattaaaacttcgcgaaacgcgaaaataacgaacgtaaaaataatatactaataaccctccaacaaaacgttcaactcgacctcgcccaaccaaacaatcaacaccttaccgataacgataacgtacaccgacaaacgacgaccgatacgtaaataaacgataacgaccaacttaccttcaatcttctcgatataaaccccttacgcccgtccaaaatccccaaataaataatctacccgatccgccgaaacaactccgtcaaccaaccttttaccttctaccgaatatcgataaaacccacgacaaaataaccgcgctcgaccaacttcataccgaaacgatacttaccgttctccg

SEQ ID NO: 36603 - DNA, 953 bp, Artificial Sequence
  chemically treated genomic DNA (Homo sapiens) CpG-island No: 36603
aattggagttattgttttgtggattacgaggagggatagggtagatttattaaagttatttagttcgattataacgtgtcgtcgtggtcgttgtacgagtagtttatttcggtgtcggaatatgcggagagcgtttggttgcgggtggacgtggatacgttggtttatcgttatagttattcgtttgatggcgagacgtggtatatcgtgtcggtgacgtatgaggcgtggaagttgtcggacgattatatcggcgggcgcggtttttttatcggcgcgtttgtgggtttgtattgcgaggatattagcggcgacggttgttacgcggatttcgattattttatttacgagtcggtttaacggtttaggtcgggtagtttagcgcgcgcgagagcgcgagttcggtttgttgaagttgttcgcggaaattagttagtttcgcgtcgtttacgcgggaggttagcgtcgataggtttagggcggcgatgacgcgggattcgtggttttatatcggtatcgttacgtagcgtacgttttgttcgtttttttcgttgtttagggcgtagttttgttcgcgggtttgcgttagggcgtttattaaggtttcgcgagacgcgagggtggcgggcgtaaaggtagtgtattgatagttttttagtagggcgtttagttcggtttcgtttagttaggtaattaatattttgtcgatggcggtggcgtgtatcggtaggcggcggtcgatgcgtgaataggcgatggcggttagtttgtttttaattttttcgatatagattttttacgttcgtttaggatttttagatgggtggtttgttcggttcgtcgggatagtttcgttagttagttttttgttttttgtcgaatatcgatggagtttacgataaaatggtcgcgttcgattagttttatgtcgaggcgatatttgtcgtttttcg

SEQ ID NO: 36604 - DNA, 953 bp, Artificial Sequence
  chemically treated genomic DNA (Homo sapiens) CpG-island No: 36604
cgaaaaacgacaaatatcgcctcgacataaaactaatcgaacgcgaccattttatcgtaaactccatcgatattcgacaaaaaacaaaaaactaactaacgaaactatcccgacgaaccgaacaaaccacccatctaaaaatcctaaacgaacgtaaaaaatctatatcgaaaaaattaaaaacaaactaaccgccatcgcctattcacgcatcgaccgccgcctaccgatacacgccaccgccatcgacaaaatattaattacctaactaaacgaaaccgaactaaacgccctactaaaaaactatcaatacactacctttacgcccgccaccctcgcgtctcgcgaaaccttaataaacgccctaacgcaaacccgcgaacaaaactacgccctaaacaacgaaaaaaacgaacaaaacgtacgctacgtaacgataccgatataaaaccacgaatcccgcgtcatcgccgccctaaacctatcgacgctaacctcccgcgtaaacgacgcgaaactaactaatttccgcgaacaacttcaacaaaccgaactcgcgctctcgcgcgcgctaaactacccgacctaaaccgttaaaccgactcgtaaataaaataatcgaaatccgcgtaacaaccgtcgccgctaatatcctcgcaatacaaacccacaaacgcgccgataaaaaaaccgcgcccgccgatataatcgtccgacaacttccacgcctcatacgtcaccgacacgatataccacgtctcgccatcaaacgaataactataacgataaaccaacgtatccacgtccacccgcaaccaaacgctctccgcatattccgacaccgaaataaactactcgtacaacgaccacgacgacacgttataatcgaactaaataactttaataaatctaccctatccctcctcgtaatccacaaaacaataactccaatt

SEQ ID NO: 36605 - DNA, 524 bp, Artificial Sequence
  chemically treated genomic DNA (Homo sapiens) CpG-island No: 36605
tgaagtcggaggcgtgcgttgtttcggtcgtagtaggaggcgttgattagtttttgggaacggggcgggatttagttgggggggtttcgttttaggaggcgagtttagttcggatttttatttcgcgcgttgtttaagatggcgttggtggtttttgtgcgagttcggcgcgcgttttgtttcggcggtgtaaattcgggtgggtagggatcgggtcgggcggggtaggatcggaattaacgggttttttacgttgttttcgtagggttcggttttcggcggtttttcggcggatcggagcgggcggtcgcgcggagatcgcgcgtttacgtggagtagcgggtgttgtggagtcggacgcggttaggtgagcggcgtcgagggagggcggcgtggggttatgatcgcggggttcgttcgggggtgttgtcggagaattacgttgtcgacgttcggtttgtgtttagaatttaagtttcgaaatagaattttgtcgttttatttgggttcgttcgttatgagat

SEQ ID NO: 36606 - DNA, 524 bp, Artificial Sequence
  chemically treated genomic DNA (Homo sapiens) CpG-island No: 36606
atctcataacgaacgaacccaaataaaacgacaaaattctatttcgaaacttaaattctaaacacaaaccgaacgtcgacaacgtaattctccgacaacacccccgaacgaaccccgcgatcataaccccacgccgccctccctcgacgccgctcacctaaccgcgtccgactccacaacacccgctactccacgtaaacgcgcgatctccgcgcgaccgcccgctccgatccgccgaaaaaccgccgaaaaccgaaccctacgaaaacaacgtaaaaaacccgttaattccgatcctaccccgcccgacccgatccctacccacccgaatttacaccgccgaaacaaaacgcgcgccgaactcgcacaaaaaccaccaacgccatcttaaacaacgcgcgaaataaaaatccgaactaaactcgcctcctaaaacgaaacccccccaactaaatcccgccccgttcccaaaaactaatcaacgcctcctactacgaccgaaacaacgcacgcctccgacttca

SEQ ID NO: 36607 - DNA, 524 bp, Artificial Sequence
  chemically treated genomic DNA (Homo sapiens) CpG-island No: 36607
attttatgacgaacgaatttaggtagagcggtaaggttttgtttcgaaatttgggttttaaatataaatcgagcgtcgatagcgtggtttttcgatagtattttcgagcgagtttcgcggttatgattttacgtcgttttttttcggcgtcgtttatttggtcgcgttcggttttatagtattcgttgttttacgtaagcgcgcggttttcgcgcggtcgttcgtttcgattcgtcgagggatcgtcgggagtcgggttttgcgaaggtagcgtggggagttcgttagtttcggttttgtttcgttcggttcgatttttgtttattcgggtttgtatcgtcggagtagaacgcgcgtcggattcgtatagaagttattagcgttattttgagtaacgcgcgggataaaggttcgggttgagttcgttttttggggcggagtttttttaattaggtttcgtttcgtttttagaggttggttaacgttttttattacggtcgaaatagcgtacgttttcggtttta

SEQ ID NO: 36608 - DNA, 524 bp, Artificial Sequence
  chemically treated genomic DNA (Homo sapiens) CpG-island No: 36608
taaaaccgaaaacgtacgctatttcgaccgtaataaaaaacgttaaccaacctctaaaaacgaaacgaaacctaattaaaaaaactccgccccaaaaaacgaactcaacccgaacctttatcccgcgcgttactcaaaataacgctaataacttctatacgaatccgacgcgcgttctactccgacgatacaaacccgaataaacaaaaatcgaaccgaacgaaacaaaaccgaaactaacgaactccccacgctaccttcgcaaaacccgactcccgacgatccctcgacgaatcgaaacgaacgaccgcgcgaaaaccgcgcgcttacgtaaaacaacgaatactataaaaccgaacgcgaccaaataaacgacgccgaaaaaaaacgacgtaaaatcataaccgcgaaactcgctcgaaaatactatcgaaaaaccacgctatcgacgctcgatttatatttaaaacccaaatttcgaaacaaaaccttaccgctctacctaaattcgttcgtcataaaat

SEQ ID NO: 36609 - DNA, 696 bp, Artificial Sequence
  chemically treated genomic DNA (Homo sapiens) CpG-island No: 36609
atgtttcgggcgtcgcggagtcgtgtttgagtcgtcgtaggagtcgtcgaggtttcgttatttatgaattagattttcggggcgcgtttgtagggatttcgggatcgaggggtgggtttacgtcggtgttttatttgtcgattacgtttaggtatacgtcgtagagcgcgtcgattttcgttacggtttgatgcggcgcgcgtgtagcggattagtattaggttttgtgttgttgcgggaaggggtgggggcgttagagttcggcgggaggggaggcggggtcgtttatcggttcgggggtcgagaatttgattacgaagggttcgcggttgaagacgttttcggggtttggtataggtaggtgttacgacgatatcgcgttttttttaggagatggggaggatcgttgagtttcgatttgcgtttcggcgtttttttttgcggttcgtttttatttgtatacgaataggtatatttttttgtattggtttcggtttagggcgtggttgtttataaagttgtattcgtgttcggatacgttgtggagataggggttcgtttaggtcggggcgcgcgcgggtagatttcggggagtcgcgagaggggtttgtattatatttgttgatttgttttatgagcgcggatacggttgtaggtgtttggtgtttcgtattttttgtattagcgcgaggttat

SEQ ID NO: 36610 - DNA, 696 bp, Artificial Sequence
  chemically treated genomic DNA (Homo sapiens) CpG-island No: 36610
ataacctcgcgctaatacaaaaaatacgaaacaccaaacacctacaaccgtatccgcgctcataaaacaaatcaacaaatataatacaaacccctctcgcgactccccgaaatctacccgcgcgcgccccgacctaaacgaacccctatctccacaacgtatccgaacacgaatacaactttataaacaaccacgccctaaaccgaaaccaatacaaaaaaatatacctattcgtatacaaataaaaacgaaccgcaaaaaaaaacgccgaaacgcaaatcgaaactcaacgatcctccccatctcctaaaaaaaacgcgatatcgtcgtaacacctacctataccaaaccccgaaaacgtcttcaaccgcgaacccttcgtaatcaaattctcgacccccgaaccgataaacgaccccgcctcccctcccgccgaactctaacgcccccaccccttcccgcaacaacacaaaacctaatactaatccgctacacgcgcgccgcatcaaaccgtaacgaaaatcgacgcgctctacgacgtatacctaaacgtaatcgacaaataaaacaccgacgtaaacccacccctcgatcccgaaatccctacaaacgcgccccgaaaatctaattcataaataacgaaacctcgacgactcctacgacgactcaaacacgactccgcgacgcccgaaacat

SEQ ID NO: 36611 - DNA, 696 bp, Artificial Sequence
  chemically treated genomic DNA (Homo sapiens) CpG-island No: 36611
atgatttcgcgttggtgtaggaggtgcgagatattagatatttgtagtcgtgttcgcgtttatggagtagattaataggtgtggtgtaggtttttttcgcgatttttcgggatttgttcgcgcgcgtttcgatttgagcgggtttttgtttttatagcgtgttcgagtacgagtatagttttgtgagtagttacgttttgggtcgggattagtataaggagatgtatttgttcgtgtataggtgagggcgggtcgtagggaggggcgtcggggcgtaggtcggggtttagcggttttttttattttttaggaaagacgcggtgtcgtcgtggtatttatttgtattagatttcgaggacgtttttagtcgcgagtttttcgtggttaagttttcggttttcggatcggtgagcggtttcgttttttttttcgtcgagttttgacgtttttattttttttcgtagtagtatagaatttggtgttgattcgttgtacgcgcgtcgtattaagtcgtggcggagatcgacgcgttttacgacgtgtatttggacgtgatcgataagtggggtatcgacgtaagtttatttttcggtttcggggtttttgtaggcgcgtttcgggggtttggtttatgagtggcgggatttcgacggtttttgcggcggtttagatacggtttcgcggcgttcgagatat

SEQ ID NO: 36612 - DNA, 696 bp, Artificial Sequence
  chemically treated genomic DNA (Homo sapiens) CpG-island No: 36612
atatctcgaacgccgcgaaaccgtatctaaaccgccgcaaaaaccgtcgaaatcccgccactcataaaccaaacccccgaaacgcgcctacaaaaaccccgaaaccgaaaaataaacttacgtcgataccccacttatcgatcacgtccaaatacacgtcgtaaaacgcgtcgatctccgccacgacttaatacgacgcgcgtacaacgaatcaacaccaaattctatactactacgaaaaaaaataaaaacgtcaaaactcgacgaaaaaaaaaacgaaaccgctcaccgatccgaaaaccgaaaacttaaccacgaaaaactcgcgactaaaaacgtcctcgaaatctaatacaaataaataccacgacgacaccgcgtctttcctaaaaaataaaaaaaaccgctaaaccccgacctacgccccgacgcccctccctacgacccgccctcacctatacacgaacaaatacatctccttatactaatcccgacccaaaacgtaactactcacaaaactatactcgtactcgaacacgctataaaaacaaaaacccgctcaaatcgaaacgcgcgcgaacaaatcccgaaaaatcgcgaaaaaaacctacaccacacctattaatctactccataaacgcgaacacgactacaaatatctaatatctcgcacctcctacaccaacgcgaaatcat

SEQ ID NO: 36613 - DNA, 577 bp, Artificial Sequence
  chemically treated genomic DNA (Homo sapiens) CpG-island No: 36613
tcggcgttggggtggagtcggcggggtcgtcgtgtcgttcgtggtcgttggggacgttggtgttttttcgtttcgtttattttttcgtcggttcgtttttggttagagaagtcgtagttcgtagtgttcgatttagtcgtttcgcgtcggagtcggtttcgtagcgtgttatggtttgttatatttattagttgtttttttgggtgttggacgatttgtgtcgtaatatggacgcgtttagcgagtgggattggatggagttcggtgagtgcggttcgggaggggaggggattagggcgatcggagtttttagcgatttcgtttggagcggtcgttaagttttttcgggtattcgggtttagcgggtttcgattcgagggcgtgcgagttgagttttttggatcgggttcgtcgcggatttcggtttgttatttgaaggtgtcgcgtggtttttgaggacgtttgtcgacgagtaggggtcgtcgttattgcgttttgagtttagagaacggtgggtacgggggtttttttgttagcgttgttggttcggtgacgtttttaggtggttttttattta

SEQ ID NO: 36614 - DNA, 577 bp, Artificial Sequence
  chemically treated genomic DNA (Homo sapiens) CpG-island No: 36614
taaataaaaaaccacctaaaaacgtcaccgaaccaacaacgctaacaaaaaaacccccgtacccaccgttctctaaactcaaaacgcaataacgacgacccctactcgtcgacaaacgtcctcaaaaaccacgcgacaccttcaaataacaaaccgaaatccgcgacgaacccgatccaaaaaactcaactcgcacgccctcgaatcgaaacccgctaaacccgaatacccgaaaaaacttaacgaccgctccaaacgaaatcgctaaaaactccgatcgccctaatcccctcccctcccgaaccgcactcaccgaactccatccaatcccactcgctaaacgcgtccatattacgacacaaatcgtccaacacccaaaaaaacaactaataaatataacaaaccataacacgctacgaaaccgactccgacgcgaaacgactaaatcgaacactacgaactacgacttctctaaccaaaaacgaaccgacgaaaaaataaacgaaacgaaaaaacaccaacgtccccaacgaccacgaacgacacgacgaccccgccgactccaccccaacgccga

SEQ ID NO: 36615 - DNA, 577 bp, Artificial Sequence
  chemically treated genomic DNA (Homo sapiens) CpG-island No: 36615
tggatgagaggttatttggggacgttatcgagttagtagcgttgataggagggttttcgtatttatcgttttttggatttagagcgtagtggcggcggtttttgttcgtcgatagacgtttttagagattacgcggtatttttaggtgataggtcgaggttcgcggcggattcggtttaggaggtttagttcgtacgttttcggatcgggattcgttgaattcgggtgttcgagggagtttggcggtcgttttaggcgggatcgttgggggtttcggtcgttttggtttttttttttttcgggtcgtatttatcgaattttatttagttttattcgttgagcgcgtttatgttgcggtataggtcgtttagtatttaggagggtagttggtagatgtagtaggttatggtacgttacggggtcggtttcggcgcgggacgattgggtcggatattgcgggttgcggtttttttagttaggggcggatcggcggggaagtgggcggggcgggagggtattagcgtttttagcggttacgggcggtacgacggtttcgtcggttttattttagcgtcgg

SEQ ID NO: 36616 - DNA, 577 bp, Artificial Sequence
  chemically treated genomic DNA (Homo sapiens) CpG-island No: 36616
ccgacgctaaaataaaaccgacgaaaccgtcgtaccgcccgtaaccgctaaaaacgctaataccctcccgccccgcccacttccccgccgatccgcccctaactaaaaaaaccgcaacccgcaatatccgacccaatcgtcccgcgccgaaaccgaccccgtaacgtaccataacctactacatctaccaactaccctcctaaatactaaacgacctataccgcaacataaacgcgctcaacgaataaaactaaataaaattcgataaatacgacccgaaaaaaaaaaaaaccaaaacgaccgaaacccccaacgatcccgcctaaaacgaccgccaaactccctcgaacacccgaattcaacgaatcccgatccgaaaacgtacgaactaaacctcctaaaccgaatccgccgcgaacctcgacctatcacctaaaaataccgcgtaatctctaaaaacgtctatcgacgaacaaaaaccgccgccactacgctctaaatccaaaaaacgataaatacgaaaaccctcctatcaacgctactaactcgataacgtccccaaataacctctcatcca

SEQ ID NO: 36617 - DNA, 621 bp, Artificial Sequence
  chemically treated genomic DNA (Homo sapiens) CpG-island No: 36617
  unsure (292)
tgattcgttcgttttggtgcgtacgattataggaattgtaaggagagttagtatagttcgtcggaaagtagtatcgtagtcggaagggtaaatatttaggttattagaatgttggttacggttttacgttgtaagtcgttattatttattattatcgttttcgcgatagaagaggagagtacgtgagtagtggaaatcggtatttcggtataattcgttaggtcgatagatattgtcgtcgttatttgggtagatattttttgagcgtaggttatgttttttttatcgattnttttatcgatagtcgttgttatacggcgttagttaattatcgtatcgatatttaacgttagcgcgatcgttatgatgatttatatcggtgtatattcgatggtgttaagtatgtcggattttagttttttttataggcgttgatcgttagtatttacgttaggtatttttattattttgtcgatagtgttagaaacgtatagtataatgcggcgtatttggttacgttgattaagcgatagttggtcgtaattttttatatggggggtaatatatttttaagcggttgacgcggtattgttttttacggatggaggggattttcgagtt

SEQ ID NO: 36618 - DNA, 621 bp, Artificial Sequence
  chemically treated genomic DNA (Homo sapiens) CpG-island No: 36618
  unsure (330)
aactcgaaaatcccctccatccgtaaaaaacaataccgcgtcaaccgcttaaaaatatattaccccccatataaaaaattacgaccaactatcgcttaatcaacgtaaccaaatacgccgcattatactatacgtttctaacactatcgacaaaataataaaaatacctaacgtaaatactaacgatcaacgcctataaaaaaaactaaaatccgacatacttaacaccatcgaatatacaccgatataaatcatcataacgatcgcgctaacgttaaatatcgatacgataattaactaacgccgtataacaacgactatcgataaaanaatcgataaaaaaaacataacctacgctcaaaaaatatctacccaaataacgacgacaatatctatcgacctaacgaattataccgaaataccgatttccactactcacgtactctcctcttctatcgcgaaaacgataataataaataataacgacttacaacgtaaaaccgtaaccaacattctaataacctaaatatttacccttccgactacgatactactttccgacgaactatactaactctccttacaattcctataatcgtacgcaccaaaacgaacgaatca

SEQ ID NO: 36619 - DNA, 621 bp, Artificial Sequence
  chemically treated genomic DNA (Homo sapiens) CpG-island No: 36619
  unsure (330)
aattcggaagttttttttattcgtgaaaaataatatcgcgttaatcgtttgaaagtatgttgttttttatgtgaaaagttacggttagttgtcgtttgattaacgtagttagatgcgtcgtattatgttgtgcgtttttgatattatcgataaagtggtgaagatgtttggcgtgagtgttgacgattagcgtttgtgaaagaaattgaagttcgatatgtttagtattatcgagtatgtatcggtgtggattattatggcggtcgcgttggcgttaggtatcggtacgatgattggttggcgtcgtgtggtaacgattatcggtgaganaatcggtaagaaaggtatgatttacgtttaggggatgtttgtttagatgacggcggtagtgtttatcggtttggcgagttatatcgggatgtcggtttttattatttacgtattttttttttttgtcgcggggacgatggtggtagatggtggcggtttatagcgtaaaatcgtgattagtattttgatggtttgggtgtttattttttcggttgcggtattgtttttcggcgggttgtattggttttttttgtagtttttgtaatcgtacgtattaaaacgagcgggtta

SEQ ID NO: 36620 - DNA, 621 bp, Artificial Sequence
  chemically treated genomic DNA (Homo sapiens) CpG-island No: 36620
  unsure (292)
taacccgctcgttttaatacgtacgattacaaaaactacaaaaaaaaccaatacaacccgccgaaaaacaataccgcaaccgaaaaaataaacacccaaaccatcaaaatactaatcacgattttacgctataaaccgccaccatctaccaccatcgtccccgcgacaaaaaaaaaaaatacgtaaataataaaaaccgacatcccgatataactcgccaaaccgataaacactaccgccgtcatctaaacaaacatcccctaaacgtaaatcatacctttcttaccgattntctcaccgataatcgttaccacacgacgccaaccaatcatcgtaccgatacctaacgccaacgcgaccgccataataatccacaccgatacatactcgataatactaaacatatcgaacttcaatttctttcacaaacgctaatcgtcaacactcacgccaaacatcttcaccactttatcgataatatcaaaaacgcacaacataatacgacgcatctaactacgttaatcaaacgacaactaaccgtaacttttcacataaaaaacaacatactttcaaacgattaacgcgatattatttttcacgaataaaaaaaacttccgaatt

SEQ ID NO: 36621 - DNA, 759 bp, Artificial Sequence
  chemically treated genomic DNA (Homo sapiens) CpG-island No: 36621
ttcgtacggcgatagcgtttgttatgaagcgatggttttgatggcgtaatcgtttttttatcgttattcgttggttgatggttaggggaattggggcgcgtcggacgattcgaaatcgttcgcggtaatgcgttatatcgaatttcggttgtcgaaatatttcgagttgttattgagcgagttggggtaggggacggttgattgggtgttaaatttcgacggtattttgtaggagtcgaaaatgttatttgttcgtttgttaaatattttgtttaacggtattatcggtattgtcgtcggtatggcgatcgatattttatcgtataatttgcgtgaagtggtttaggcggtaatcgtattaatcgattagtcgaaattacgttcgattagttgttggatatcgtgtaggggtcggattattcgattgaagcggaaattattatttcgcgcgtcgagattcgtaaaatttacgagaacggacgtggtttagtgcgtatgcgcgcggtgtggaagaaagaagatggcgcggtggttattagcgtattgtcgtattaggttttaggtgcgcgcgtattggagtaaattgttgcgtaaatgcgtaataaaaagttgtttatggttgacgatttgcgcgatgaatttgattacgagaattcgattcgtttggtgattgtgtcgcgttttaatcgcgtggatatggattaggtgatgaattattttttcgttattatcgatttggaaaagagttatcgtattaat

SEQ ID NO: 36622 - DNA, 759 bp, Artificial Sequence
  chemically treated genomic DNA (Homo sapiens) CpG-island No: 36622
attaatacgataactcttttccaaatcgataataacgaaaaaataattcatcacctaatccatatccacgcgattaaaacgcgacacaatcaccaaacgaatcgaattctcgtaatcaaattcatcgcgcaaatcgtcaaccataaacaactttttattacgcatttacgcaacaatttactccaatacgcgcgcacctaaaacctaatacgacaatacgctaataaccaccgcgccatcttctttcttccacaccgcgcgcatacgcactaaaccacgtccgttctcgtaaattttacgaatctcgacgcgcgaaataataatttccgcttcaatcgaataatccgacccctacacgatatccaacaactaatcgaacgtaatttcgactaatcgattaatacgattaccgcctaaaccacttcacgcaaattatacgataaaatatcgatcgccataccgacgacaataccgataataccgttaaacaaaatatttaacaaacgaacaaataacattttcgactcctacaaaataccgtcgaaatttaacacccaatcaaccgtcccctaccccaactcgctcaataacaactcgaaatatttcgacaaccgaaattcgatataacgcattaccgcgaacgatttcgaatcgtccgacgcgccccaattcccctaaccatcaaccaacgaataacgataaaaaaacgattacgccatcaaaaccatcgcttcataacaaacgctatcgccgtacgaa

SEQ ID NO: 36623 - DNA, 759 bp, Artificial Sequence
  chemically treated genomic DNA (Homo sapiens) CpG-island No: 36623
gttaatacgatagtttttttttagatcggtggtagcgaagaggtggtttattatttgatttatatttacgcggttggaacgcggtataattattaggcgggtcgggttttcgtggttagatttatcgcgtagatcgttaattataggtagttttttgttgcgtatttgcgtagtaatttgttttagtacgcgcgtatttgaaatttgatgcggtaatgcgttgataattatcgcgttatttttttttttttatatcgcgcgtatacgtattgaattacgttcgttttcgtagattttacggatttcggcgcgcgaagtgataattttcgttttagtcggataattcggtttttgtacgatatttagtagttgatcgagcgtggtttcggttggtcgattaatgcgattgtcgtttgagttattttacgtaggttatgcggtggaatatcggtcgttatgtcgacggtaatatcggtggtgtcgttaagtaaaatgtttggtagacgggtaggtagtattttcggtttttgtaaagtgtcgtcgaagtttggtatttagttagtcgttttttgttttagttcgtttaatagtagttcggaatatttcgataatcgggattcggtgtaacgtattgtcgcgaacgatttcggatcgttcggcgcgttttagtttttttgattattaattagcggataacggtaagagaacggttgcgttattaggattatcgttttataataggcgttatcgtcgtgcgga

SEQ ID NO: 36624 - DNA, 759 bp, Artificial Sequence
  chemically treated genomic DNA (Homo sapiens) CpG-island No: 36624
tccgcacgacgataacgcctattataaaacgataatcctaataacgcaaccgttctcttaccgttatccgctaattaataatcaaaaaaactaaaacgcgccgaacgatccgaaatcgttcgcgacaatacgttacaccgaatcccgattatcgaaatattccgaactactattaaacgaactaaaacaaaaaacgactaactaaataccaaacttcgacgacactttacaaaaaccgaaaatactacctacccgtctaccaaacattttacttaacgacaccaccgatattaccgtcgacataacgaccgatattccaccgcataacctacgtaaaataactcaaacgacaatcgcattaatcgaccaaccgaaaccacgctcgatcaactactaaatatcgtacaaaaaccgaattatccgactaaaacgaaaattatcacttcgcgcgccgaaatccgtaaaatctacgaaaacgaacgtaattcaatacgtatacgcgcgatataaaaaaaaaaaaataacgcgataattatcaacgcattaccgcatcaaatttcaaatacgcgcgtactaaaacaaattactacgcaaatacgcaacaaaaaactacctataattaacgatctacgcgataaatctaaccacgaaaacccgacccgcctaataattataccgcgttccaaccgcgtaaatataaatcaaataataaaccacctcttcgctaccaccgatctaaaaaaaaactatcgtattaac

SEQ ID NO: 36625 - DNA, 985 bp, Artificial Sequence
  chemically treated genomic DNA (Homo sapiens) CpG-island No: 36625
  unsure (269, 885, 955)
gtaacgcgtggtggttatggggttgggtaatttgttgtgggtcgatgaaggtttcggcgtgcgggtggcggaacggttgtatgtttattattattggttcgagtatgtggagattgtcgatggcggtatttagggattgaatttgttggggtatgtcgaaagcgttagttatttgttgattttcgatgttattgattacgggttggaaatttggaacgttgcgaatttatgtcggaaaacgtatttcggtttattttagcgcgaagaanatgagtttgtattagaatagtttttttaagtggtggggttggcggatattcgggatatttgttagtatatattgttttcgtcggtttgtaattcgtaatgttcgacgattacggcggtagtttgagcgaattggtacgggagtaattgttcgttgcggaataggcggcgttggcgtagtttgttgcgtggggaattgtgtcgtaatcggttaatgaatcgcgttgttttaattatgattgtttgtcgatggaaaattacgaaggcgttcgtttgcgttagtatcggatgatataggaggagtagggatgagtaacgatacgttatttgatgcgttgtggtaacgaatgttggcgcgcggttggacgttagttagtgaatttcgttttgacgattggtttacgtaagcgttagacggcgtggtgttattaagtagtgattcgaaacgtacgttagaggttagcgataattcggtaatgattggcgaattattgcgcgagtttttcgattatatatggtaggtggcgattgttgattttgagtagagcgaagttatcggcgatcgttttggcgtttttcgtttttttgttattttagtgtttatcggcggaaattatncgcgcgtgttgaatggtatttattcgtgggcggaattgataaatttgatgcgcgggttttgtcgaatcgnatagggagcgtttttatgaataaaattttt

SEQ ID NO: 36626 - DNA, 985 bp, Artificial Sequence
  chemically treated genomic DNA (Homo sapiens) CpG-island No: 36626
  unsure (31, 101, 717)
aaaaattttattcataaaaacgctccctatncgattcgacaaaacccgcgcatcaaatttatcaattccgcccacgaataaataccattcaacacgcgcgnataatttccgccgataaacactaaaataacaaaaaaacgaaaaacgccaaaacgatcgccgataacttcgctctactcaaaatcaacaatcgccacctaccatatataatcgaaaaactcgcgcaataattcgccaatcattaccgaattatcgctaacctctaacgtacgtttcgaatcactacttaataacaccacgccgtctaacgcttacgtaaaccaatcgtcaaaacgaaattcactaactaacgtccaaccgcgcgccaacattcgttaccacaacgcatcaaataacgtatcgttactcatccctactcctcctatatcatccgatactaacgcaaacgaacgccttcgtaattttccatcgacaaacaatcataattaaaacaacgcgattcattaaccgattacgacacaattccccacgcaacaaactacgccaacgccgcctattccgcaacgaacaattactcccgtaccaattcgctcaaactaccgccgtaatcgtcgaacattacgaattacaaaccgacgaaaacaatatatactaacaaatatcccgaatatccgccaaccccaccacttaaaaaaactattctaatacaaactcatnttcttcgcgctaaaataaaccgaaatacgttttccgacataaattcgcaacgttccaaatttccaacccgtaatcaataacatcgaaaatcaacaaataactaacgctttcgacataccccaacaaattcaatccctaaataccgccatcgacaatctccacatactcgaaccaataataataaacatacaaccgttccgccacccgcacgccgaaaccttcatcgacccacaacaaattacccaaccccataaccaccacgcgttac

SEQ ID NO: 36627 - DNA, 985 bp, Artificial Sequence
  chemically treated genomic DNA (Homo sapiens) CpG-island No: 36627
  unsure (31, 101, 717)
aaaagttttgtttataaggacgttttttgtncggttcgataaggttcgcgtattaggtttattagtttcgtttacgggtgaatattatttagtacgcgcgnatagttttcgtcggtaaatattaaagtggtagaaaagcgaaagacgttaaagcgatcgtcgatggtttcgttttgtttaaggttagtaatcgttatttgttatgtatagtcgggaaattcgcgtagtaattcgttaattattatcggattatcgttgatttttggcgtgcgtttcgggttattgtttaataatattacgtcgtttggcgtttgcgtaagttagtcgttaagacgggatttattgattggcgtttagtcgcgcgttagtattcgttgttataacgtattaaatggcgtgtcgttgtttatttttgttttttttgtgttattcggtattggcgtaagcgaacgttttcgtaattttttatcgatagatagttataattgagatagcgcgatttattagtcggttgcggtataattttttacgtagtaagttgcgttagcgtcgtttgtttcgtagcgggtagttgttttcgtgttagttcgtttaggttatcgtcgtagtcgtcgagtattgcgggttgtagatcgacgagggtaatatgtgttggtagatgtttcgaatattcgttagttttattatttggagaaattgttttgatgtaggtttatntttttcgcgttgagataagtcggaatgcgtttttcggtataggttcgtagcgttttaggtttttagttcgtagttaatggtatcgagaattaatagatggttggcgttttcgatatattttagtaagtttagtttttgagtatcgttatcgataatttttatatattcgggttagtggtaatgggtatatagtcgtttcgttattcgtacgtcgaagtttttatcggtttatagtaggttgtttagttttatgattattacgcgttgt

SEQ ID NO: 36628 - DNA, 985 bp, Artificial Sequence
  chemically treated genomic DNA (Homo sapiens) CpG-island No: 36628
  unsure (269, 885, 955)
acaacgcgtaataatcataaaactaaacaacctactataaaccgataaaaacttcgacgtacgaataacgaaacgactatatacccattaccactaacccgaatatataaaaattatcgataacgatactcaaaaactaaacttactaaaatatatcgaaaacgccaaccatctattaattctcgataccattaactacgaactaaaaacctaaaacgctacgaacctataccgaaaaacgcattccgacttatctcaacgcgaaaaanataaacctacatcaaaacaatttctccaaataataaaactaacgaatattcgaaacatctaccaacacatattaccctcgtcgatctacaacccgcaatactcgacgactacgacgataacctaaacgaactaacacgaaaacaactacccgctacgaaacaaacgacgctaacgcaacttactacgtaaaaaattataccgcaaccgactaataaatcgcgctatctcaattataactatctatcgataaaaaattacgaaaacgttcgcttacgccaataccgaataacacaaaaaaaacaaaaataaacaacgacacgccatttaatacgttataacaacgaatactaacgcgcgactaaacgccaatcaataaatcccgtcttaacgactaacttacgcaaacgccaaacgacgtaatattattaaacaataacccgaaacgcacgccaaaaatcaacgataatccgataataattaacgaattactacgcgaatttcccgactatacataacaaataacgattactaaccttaaacaaaacgaaaccatcgacgatcgctttaacgtctttcgcttttctaccactttaatatttaccgacgaaaactatncgcgcgtactaaataatattcacccgtaaacgaaactaataaacctaatacgcgaaccttatcgaaccgnacaaaaaacgtccttataaacaaaactttt

SEQ ID NO: 36629 - DNA, 627 bp, Artificial Sequence
  chemically treated genomic DNA (Homo sapiens) CpG-island No: 36629
cgatgtttagttattaaataacggtagaaacgtacgcggttcgttcggagtaaattgttgttaggtgttgtcgtcgggatcgttttcgtattggacgttaattaatatgtacgattgcgtatattgttatgtatgaacgttaattttcgttatttgtcgtatttgcgaatttgcgtcgtcggtattaattattagtttcgcgcgaattattttatcgttttttagttttagtttttgaagattattatggcgatgtagcgtaattagcgagtttggtatacgtaacgttattttcggatgcgtttttagcgtttgttataacgtttgttgtaggatagtgttttttattatatagttaagtagcggtagtttaagtttagcggcgttaaatattatatgcgtcgttttttatttttacgtttttagtttgcggtaaggatggtaacgtatagtttgtattgtattttagatttttaattttttaagtaatgatatcgaagtcgcgttgatcgtcgagattcgtatcgttcggttggttattagcggataacgggcgttgttttgcgtgttcgattatcgttacggaaaatcggtgttgggttatttttaggttagggggtcggcgat

SEQ ID NO: 36630 - DNA, 627 bp, Artificial Sequence
  chemically treated genomic DNA (Homo sapiens) CpG-island No: 36630
atcgccgaccccctaacctaaaaataacccaacaccgattttccgtaacgataatcgaacacgcaaaacaacgcccgttatccgctaataaccaaccgaacgatacgaatctcgacgatcaacgcgacttcgatatcattacttaaaaaattaaaaatctaaaatacaatacaaactatacgttaccatccttaccgcaaactaaaaacgtaaaaataaaaaacgacgcatataatatttaacgccgctaaacttaaactaccgctacttaactatataataaaaaacactatcctacaacaaacgttataacaaacgctaaaaacgcatccgaaaataacgttacgtataccaaactcgctaattacgctacatcgccataataatcttcaaaaactaaaactaaaaaacgataaaataattcgcgcgaaactaataattaataccgacgacgcaaattcgcaaatacgacaaataacgaaaattaacgttcatacataacaatatacgcaatcgtacatattaattaacgtccaatacgaaaacgatcccgacgacaacacctaacaacaatttactccgaacgaaccgcgtacgtttctaccgttatttaataactaaacatcg

SEQ ID NO: 36631 - DNA, 627 bp, Artificial Sequence
  chemically treated genomic DNA (Homo sapiens) CpG-island No: 36631
gtcgtcggttttttggtttgggggtggtttagtatcgatttttcgtaacggtgatcgagtacgtagaatagcgttcgttgttcgttgatagttaatcggacggtgcggatttcggcgattagcgcggtttcggtattattgtttaaagggttaggggtttgggatgtagtataggttatgcgttgttatttttatcgtagattggaaacgtgggagtgggaaacggcgtatgtggtgtttgacgtcgttgaatttaagttatcgttgtttggttatatggtggaaaatattgttttgtaataggcgttgtggtaggcgttggaagcgtattcgaaagtaacgttacgtgtgttaggttcgttgattgcgttgtatcgttatgatgatttttaggagttggagttgaaaggcggtgaagtgattcgcgcgaagttggtgattggtgtcgacggcgtaaattcgtaggtgcggtagatggcgggaattggcgtttatgtatggtagtatgcgtagtcgtgtatgttgattagcgtttagtgcgagaacgatttcggcgatagtatttggtagtaatttatttcggacggatcgcgtgcgtttttgtcgttgtttgataattgggtatcg

SEQ ID NO: 36632 - DNA, 627 bp, Artificial Sequence
  chemically treated genomic DNA (Homo sapiens) CpG-island No: 36632
cgatacccaattatcaaacaacgacaaaaacgcacgcgatccgtccgaaataaattactaccaaatactatcgccgaaatcgttctcgcactaaacgctaatcaacatacacgactacgcatactaccatacataaacgccaattcccgccatctaccgcacctacgaatttacgccgtcgacaccaatcaccaacttcgcgcgaatcacttcaccgcctttcaactccaactcctaaaaatcatcataacgatacaacgcaatcaacgaacctaacacacgtaacgttactttcgaatacgcttccaacgcctaccacaacgcctattacaaaacaatattttccaccatataaccaaacaacgataacttaaattcaacgacgtcaaacaccacatacgccgtttcccactcccacgtttccaatctacgataaaaataacaacgcataacctatactacatcccaaacccctaaccctttaaacaataataccgaaaccgcgctaatcgccgaaatccgcaccgtccgattaactatcaacgaacaacgaacgctattctacgtactcgatcaccgttacgaaaaatcgatactaaaccacccccaaaccaaaaaaccgacgac

SEQ ID NO: 36633 - DNA, 590 bp, Artificial Sequence
  chemically treated genomic DNA (Homo sapiens) CpG-island No: 36633
ttattattagtaggtcgatattcggaaatttgaataagcgttgcgcggtttcgatattcggatttgttatagtaattagtaagtttttcggtttatttgcggtaatattcgtttggttgagtagcgtaatcgttcgttgggagatttttttcgtcgtcggatgcggggtaaaaatgacgttgttgttcgcggtaattaggttgatggcgttgttaattacggttgtcgtcgggttagtggaaggcgttatcgaagttattacgttttagggtgcgtttttaattagggttaggtcgttgtcgttagttagtatttgcggagagaggtatttaacgtttggtgtgtcgcgcgtttgagcgacgttttttgtaatttatttttaacgcgttttatgtcggttttattgacgggtagtttcgtttaatttttggcgtgtttttcgtttgttttacgaatggtagtatggttaattggcgtattgttacgttttttaattttttgttggcgattttggttgtcgtaacggcgttatttagggacgcgaaaacgtttattttatgaaaacgcgcggacggcgtgttattggtttt

SEQ ID NO: 36634 - DNA, 590 bp, Artificial Sequence
  chemically treated genomic DNA (Homo sapiens) CpG-island No: 36634
aaaaccaataacacgccgtccgcgcgttttcataaaataaacgttttcgcgtccctaaataacgccgttacgacaaccaaaatcgccaacaaaaaattaaaaaacgtaacaatacgccaattaaccatactaccattcgtaaaacaaacgaaaaacacgccaaaaattaaacgaaactacccgtcaataaaaccgacataaaacgcgttaaaaataaattacaaaaaacgtcgctcaaacgcgcgacacaccaaacgttaaatacctctctccgcaaatactaactaacgacaacgacctaaccctaattaaaaacgcaccctaaaacgtaataacttcgataacgccttccactaacccgacgacaaccgtaattaacaacgccatcaacctaattaccgcgaacaacaacgtcatttttaccccgcatccgacgacgaaaaaaatctcccaacgaacgattacgctactcaaccaaacgaatattaccgcaaataaaccgaaaaacttactaattactataacaaatccgaatatcgaaaccgcgcaacgcttattcaaatttccgaatatcgacctactaataataa

SEQ ID NO: 36635 - DNA, 590 bp, Artificial Sequence
  chemically treated genomic DNA (Homo sapiens) CpG-island No: 36635
aaagttagtgatacgtcgttcgcgcgtttttatgagatgggcgttttcgcgtttttggataacgtcgttgcggtagttaaagtcgttagtaaagggttaaaaagcgtggtaatgcgttagttagttatgttgttattcgtgaagtaggcgaaaaatacgttagagattaagcggaattgttcgttagtgaaatcggtatggggcgcgttgaagataaattgtaaaaaacgtcgtttaggcgcgcggtatattaggcgttgagtgttttttttcgtaagtgttgattggcgataacggtttgattttaattgaaaacgtattttggggcgtggtggtttcggtgacgttttttattaattcggcggtaatcgtaattaataacgttattagtttgattgtcgcgggtaatagcgttatttttgtttcgtattcggcggcgaaaaaagttttttagcgggcgattacgttgtttaattaggcgaatgttgtcgtaggtgggtcggaaaatttattggttattgtggtaaattcggatatcgaaatcgcgtaacgtttgtttaagttttcgggtatcggtttgttggtggtaa

SEQ ID NO: 36636 - DNA, 590 bp, Artificial Sequence
  chemically treated genomic DNA (Homo sapiens) CpG-island No: 36636
ttaccaccaacaaaccgatacccgaaaacttaaacaaacgttacgcgatttcgatatccgaatttaccacaataaccaataaattttccgacccacctacgacaacattcgcctaattaaacaacgtaatcgcccgctaaaaaacttttttcgccgccgaatacgaaacaaaaataacgctattacccgcgacaatcaaactaataacgttattaattacgattaccgccgaattaataaaaaacgtcaccgaaaccaccacgccccaaaatacgttttcaattaaaatcaaaccgttatcgccaatcaacacttacgaaaaaaaacactcaacgcctaatataccgcgcgcctaaacgacgttttttacaatttatcttcaacgcgccccataccgatttcactaacgaacaattccgcttaatctctaacgtatttttcgcctacttcacgaataacaacataactaactaacgcattaccacgctttttaaccctttactaacgactttaactaccgcaacgacgttatccaaaaacgcgaaaacgcccatctcataaaaacgcgcgaacgacgtatcactaacttt

SEQ ID NO: 36637 - DNA, 578 bp, Artificial Sequence
  chemically treated genomic DNA (Homo sapiens) CpG-island No: 36637
  unsure (313, 456)
gcgtcgtttagatttaatttatatattatcgtttataatatcggtaattgtatcggtagttagataaagtcgtagaattttattagttgtaatattagcgttagtattaatagtttgcgtcgattttgatggcgagttatagtaggtattagtaaagtttttgcggtttgtttaagcgttattaatgttagtaaggaatcgttgtattgcgcgttggtattaattttaatatagaaagcgggtaattaggtaattaggttggcgtaatcgtcgttaattagatcgaagtaaatatttagcgtttacgcgcggngagtgaatattacgcgaatcggagtggttgttgttttgtgggaagaggcgatttcgcgggcgttttgttattattaggtaaagagcgtaataacggtaggtagcgtttattaggcgagtgtttgatattaggtttcgttatgntgaattaatttagggcgtatggcggtattagttttatcgcgtttattagagtcgcggattatagtttattatagtggcgtgcgttgttgaattcgcgtttattatcgaggtattatcgttga

SEQ ID NO: 36638 - DNA, 578 bp, Artificial Sequence
  chemically treated genomic DNA (Homo sapiens) CpG-island No: 36638
  unsure (123, 266)
tcaacgataatacctcgataataaacgcgaattcaacaacgcacgccactataataaactataatccgcgactctaataaacgcgataaaactaataccgccatacgccctaaattaattcancataacgaaacctaatatcaaacactcgcctaataaacgctacctaccgttattacgctctttacctaataataacaaaacgcccgcgaaatcgcctcttcccacaaaacaacaaccactccgattcgcgtaatattcactcnccgcgcgtaaacgctaaatatttacttcgatctaattaacgacgattacgccaacctaattacctaattacccgctttctatattaaaattaataccaacgcgcaatacaacgattccttactaacattaataacgcttaaacaaaccgcaaaaactttactaatacctactataactcgccatcaaaatcgacgcaaactattaatactaacgctaatattacaactaataaaattctacgactttatctaactaccgatacaattaccgatattataaacgataatatataaattaaatctaaacgacgc

SEQ ID NO: 36639 - DNA, 578 bp, Artificial Sequence
  chemically treated genomic DNA (Homo sapiens) CpG-island No: 36639
  unsure (123, 266)
ttagcggtgatgtttcggtgataaacgcgggtttagtagcgtacgttattgtgatgggttgtggttcgcggttttgatgggcgcggtggggttggtgtcgttatacgttttgggttagtttantatagcgaaatttggtattaaatattcgtttggtgggcgttgtttgtcgttgttgcgttttttgtttggtggtggtaaagcgttcgcgaggtcgtttttttttataagataataattatttcggttcgcgtggtatttatttntcgcgcgtggacgttgggtgtttatttcggtttgattaacggcggttacgttagtttgattgtttggttattcgttttttatattgagattggtgttagcgcgtagtatagcggttttttattggtattgatgacgtttgggtaagtcgtaggagttttgttgatgtttgttatggttcgttattaggatcggcgtaaattgttaatgttggcgttggtgttataattggtggggttttgcggttttatttggttgtcgatgtaattgtcggtattgtgggcgatggtgtgtgggttaggtttgggcggcgt

SEQ ID NO: 36640 - DNA, 578 bp, Artificial Sequence
  chemically treated genomic DNA (Homo sapiens) CpG-island No: 36640
  unsure (313, 456)
acgccgcccaaacctaacccacacaccatcgcccacaataccgacaattacatcgacaaccaaataaaaccgcaaaaccccaccaattataacaccaacgccaacattaacaatttacgccgatcctaataacgaaccataacaaacatcaacaaaactcctacgacttacccaaacgtcatcaataccaataaaaaaccgctatactacgcgctaacaccaatctcaatataaaaaacgaataaccaaacaatcaaactaacgtaaccgccgttaatcaaaccgaaataaacacccaacgtccacgcgcganaaataaataccacgcgaaccgaaataattattatcttataaaaaaaaacgacctcgcgaacgctttaccaccaccaaacaaaaaacgcaacaacgacaaacaacgcccaccaaacgaatatttaataccaaatttcgctatantaaactaacccaaaacgtataacgacaccaaccccaccgcgcccatcaaaaccgcgaaccacaacccatcacaataacgtacgctactaaacccgcgtttatcaccgaaacatcaccgctaa

SEQ ID NO: 36641 - DNA, 940 bp, Artificial Sequence
  chemically treated genomic DNA (Homo sapiens) CpG-island No: 36641
aggagcgagttgcggtagttgttgtgtattatggtttcggaggtttttgtttcgcggttcgttaggttttggtcgggtttttagcgaagtaggtcgtttttttgcgttttttagcgggcgtgttgtgtcgtttaataggttttgtttttaagtgttaaaaatttttagtaaagtttgcgtttcgttcgtcgtttatattttagcggttttgacgttgtttttttcgcgattttcgtttttggaaaaagtgataggtaaggttacgttttcgcgagggtcggtttggagttcgtagtttttagggtttgggacggtgaggggcgtgaatgcggcggggggcggggtcgttgtcgggggagggggtcggggcgtatgcgcgttgcgtagcggggttgaatgttttttaagtgtttgaaattggtatttgggttttttacgttggataagtgcggttcggcggttagcggagcgcgttttttttcgttgttcgtttcgttttttttttttatttagtttagtgggcgagtgggtagcggcggtcgcggcgttgggttttttttcgtcggtgtgtgcgcgttcgtacgcgcggttttcggcgttagtttcgtcgtttgagagggggtttgcgtcgtcggtcggggcgtgcgttcgggagttatcgttatcgcggttcgcgtttttaggcgttggggttttcgcggattcggaggcggcggacgggttcggtagatgtagtcgtcgggtcgaagtaggagtcggcgggggggcgtcgggagagcgagggttttgtattttgtagtgttattttttgaggggggcggggggtggaggaagcggaaagtcgcgtcgagtcgtcggggattttcggggtgaattatgttgagttttgttaacggggagttagttttatttggtgaattatgtggaggattatttggat

SEQ ID NO: 36642 - DNA, 940 bp, Artificial Sequence
  chemically treated genomic DNA (Homo sapiens) CpG-island No: 36642
atccaaataatcctccacataattcaccaaataaaactaactccccgttaacaaaactcaacataattcaccccgaaaatccccgacgactcgacgcgactttccgcttcctccaccccccgcccccctcaaaaaataacactacaaaatacaaaaccctcgctctcccgacgcccccccgccgactcctacttcgacccgacgactacatctaccgaacccgtccgccgcctccgaatccgcgaaaaccccaacgcctaaaaacgcgaaccgcgataacgataactcccgaacgcacgccccgaccgacgacgcaaaccccctctcaaacgacgaaactaacgccgaaaaccgcgcgtacgaacgcgcacacaccgacgaaaaaaaacccaacgccgcgaccgccgctacccactcgcccactaaactaaataaaaaaaaaaaacgaaacgaacaacgaaaaaaaacgcgctccgctaaccgccgaaccgcacttatccaacgtaaaaaacccaaataccaatttcaaacacttaaaaaacattcaaccccgctacgcaacgcgcatacgccccgaccccctcccccgacaacgaccccgccccccgccgcattcacgcccctcaccgtcccaaaccctaaaaactacgaactccaaaccgaccctcgcgaaaacgtaaccttacctatcactttttccaaaaacgaaaatcgcgaaaaaaacaacgtcaaaaccgctaaaatataaacgacgaacgaaacgcaaactttactaaaaatttttaacacttaaaaacaaaacctattaaacgacacaacacgcccgctaaaaaacgcaaaaaaacgacctacttcgctaaaaacccgaccaaaacctaacgaaccgcgaaacaaaaacctccgaaaccataatacacaacaactaccgcaactcgctcct

SEQ ID NO: 36643 - DNA, 940 bp, Artificial Sequence
  chemically treated genomic DNA (Homo sapiens) CpG-island No: 36643
gtttaggtagttttttatatagtttattaggtggagttggtttttcgttggtaggatttaatatggtttatttcggaggttttcggcgattcggcgcggtttttcgttttttttatttttcgttttttttaaaaaatagtattgtaaaatgtaaagttttcgttttttcggcgttttttcgtcggtttttgtttcggttcggcggttatatttgtcgagttcgttcgtcgttttcgggttcgcggggattttagcgtttgagggcgcgggtcgcggtggcggtggttttcgggcgtacgtttcggtcggcggcgtaggtttttttttaggcggcggggttggcgtcgggggtcgcgcgtacgagcgcgtatatatcggcgggagagggtttagcgtcgcggtcgtcgttgtttattcgtttattgggttgggtagaagagaggagcggagcgggtagcgggaaggggcgcgtttcgttggtcgtcgagtcgtatttgtttaacgtggaaaatttaaatattagttttaaatatttgggaaatatttagtttcgttgcgtagcgcgtatgcgtttcggttttttttttcggtaacggtttcgtttttcgtcgtatttacgttttttatcgttttaggttttgggggttgcgggttttaggtcggttttcgcgggggcgtggttttgtttgttattttttttagaggcgagggtcgcggaggggatagcgttagggtcgttggggtgtggacggcgggcgaggcgtaaattttattaggagtttttggtatttggaggtagagtttgttgggcggtatagtacgttcgttgggaaacgtaggggagcggtttgtttcgttgaaaattcgattaggatttaacgggtcgcgggatagaaattttcgagattatggtatatagtaattatcgtaattcgttttt

SEQ ID NO: 36644 - DNA, 940 bp, Artificial Sequence
  chemically treated genomic DNA (Homo sapiens) CpG-island No: 36644
aaaaacgaattacgataattactatataccataatctcgaaaatttctatcccgcgacccgttaaatcctaatcgaattttcaacgaaacaaaccgctcccctacgtttcccaacgaacgtactataccgcccaacaaactctacctccaaataccaaaaactcctaataaaatttacgcctcgcccgccgtccacaccccaacgaccctaacgctatcccctccgcgaccctcgcctctaaaaaaaataacaaacaaaaccacgcccccgcgaaaaccgacctaaaacccgcaacccccaaaacctaaaacgataaaaaacgtaaatacgacgaaaaacgaaaccgttaccgaaaaaaaaaaccgaaacgcatacgcgctacgcaacgaaactaaatatttcccaaatatttaaaactaatatttaaattttccacgttaaacaaatacgactcgacgaccaacgaaacgcgccccttcccgctacccgctccgctcctctcttctacccaacccaataaacgaataaacaacgacgaccgcgacgctaaaccctctcccgccgatatatacgcgctcgtacgcgcgacccccgacgccaaccccgccgcctaaaaaaaaacctacgccgccgaccgaaacgtacgcccgaaaaccaccgccaccgcgacccgcgccctcaaacgctaaaatccccgcgaacccgaaaacgacgaacgaactcgacaaatataaccgccgaaccgaaacaaaaaccgacgaaaaaacgccgaaaaaacgaaaactttacattttacaatactattttttaaaaaaaacgaaaaataaaaaaaacgaaaaaccgcgccgaatcgccgaaaacctccgaaataaaccatattaaatcctaccaacgaaaaaccaactccacctaataaactatataaaaaactacctaaac

SEQ ID NO: 36645 - DNA, 967 bp, Artificial Sequence
  chemically treated genomic DNA (Homo sapiens) CpG-island No: 36645
agatcgacgcgaaatattaaggtacggtcgggtgatggatgggcgggggcggtcgtttttttttcggcgggttcgggcgcgtcgcggagtcgggtcggttttgtcgtggatcggaggaagcggtcggtttcgtagcggcggttttcggtaggggtaggaataaaaggtttggagcgtttttgattcgttaaggtttttgtgtgtaaagttcgggatacggaggaggaaggaggcgcgagaggtttcgttgtaaggttgcgcgattaaagcgttttttgtagtgaagtgatgaggcgggtgttgcgggggagggggcggcgggtttaagtcgcgttttttaggagggggtgtagattacggcgcgagatggagggatgtgtcggcgtttggggttatagggcgtcgagacggggttgtaggaggagggcggttgtgggtcggggttttcgcggattcggtgtttcggtttcgggtaacgtcgtttttttggttttttttcgtcgttttttatttagtttcgaatttgagtgttatataaagtatcgggtagtatttcgttcggggtaggtcggtcgttttcgtttagtttttttcggtttttatttggagttggatatcgagtaggggtcgattgcgaggggcgacgtcgtcggttgtagtttgcggaggacgagggtttttttttgtgtgtcgtagggaagggaagggaaggggaggagcggaggcggggaaggcgtttatttgcgttgcgttcgggggggcgcgggtagatcgttggtttggagaggattgtggtaggtgagaggatttgtgcgtcgttttttgtagatttggtcgtttcgggtgttagagagaggtggcgagttcgtgttcgtcgggaattgttggttgttggggaaatttttttgcgaggttagttaaggttttgggggttttgttttgaatgtggattattattcggagttta

SEQ ID NO: 36646 - DNA, 967 bp, Artificial Sequence
  chemically treated genomic DNA (Homo sapiens) CpG-island No: 36646
taaactccgaataataatccacattcaaaacaaaacccccaaaaccttaactaacctcgcaaaaaaatttccccaacaaccaacaattcccgacgaacacgaactcgccacctctctctaacacccgaaacgaccaaatctacaaaaaacgacgcacaaatcctctcacctaccacaatcctctccaaaccaacgatctacccgcgcccccccgaacgcaacgcaaataaacgccttccccgcctccgctcctccccttcccttcccttccctacgacacacaaaaaaaaaccctcgtcctccgcaaactacaaccgacgacgtcgcccctcgcaatcgacccctactcgatatccaactccaaataaaaaccgaaaaaaactaaacgaaaacgaccgacctaccccgaacgaaatactacccgatactttatataacactcaaattcgaaactaaataaaaaacgacgaaaaaaaaccaaaaaaacgacgttacccgaaaccgaaacaccgaatccgcgaaaaccccgacccacaaccgccctcctcctacaaccccgtctcgacgccctataaccccaaacgccgacacatccctccatctcgcgccgtaatctacaccccctcctaaaaaacgcgacttaaacccgccgccccctcccccgcaacacccgcctcatcacttcactacaaaaaacgctttaatcgcgcaaccttacaacgaaacctctcgcgcctccttcctcctccgtatcccgaactttacacacaaaaaccttaacgaatcaaaaacgctccaaaccttttattcctacccctaccgaaaaccgccgctacgaaaccgaccgcttcctccgatccacgacaaaaccgacccgactccgcgacgcgcccgaacccgccgaaaaaaaaacgaccgcccccgcccatccatcacccgaccgtaccttaatatttcgcgtcgatct

SEQ ID NO: 36647 - DNA, 967 bp, Artificial Sequence
  chemically treated genomic DNA (Homo sapiens) CpG-island No: 36647
taaatttcgagtggtgatttatatttaaaatagagtttttaaagttttgattgatttcgtaggaaagtttttttaatagttaataattttcggcggatacgaattcgttatttttttttgatattcggggcggttaggtttgtagagaacgacgtataggtttttttatttgttatagttttttttaagttagcgatttgttcgcgttttttcgagcgtagcgtagatgggcgtttttttcgttttcgtttttttttttttttttttttttttacggtatatagagaaaagttttcgtttttcgtaaattataatcggcggcgtcgtttttcgtagtcggtttttattcggtgtttagttttaagtgagggtcggagggggttgggcgggggcggtcgatttatttcgagcggagtattattcggtattttatgtaatatttagattcgggattgagtggggggcgacgaagaagggttagaggaacggcgttgttcgggatcgaggtatcgggttcgcgggaatttcggtttatagtcgttttttttttgtagtttcgtttcggcgttttatagttttaggcgtcggtatatttttttatttcgcgtcgtaatttgtatttttttttagaggacgcggtttggattcgtcgttttttttttcgtagtattcgttttattattttattataaagagcgttttggtcgcgtagttttgtagcgagatttttcgcgttttttttttttttcgtgtttcgggttttgtatataaggattttggcgaattaaaggcgttttagattttttgtttttgtttttgtcgagggtcgtcgttgcggagtcggtcgtttttttcggtttacggtaggatcggttcggtttcgcggcgcgttcggattcgtcgggaaggaggcggtcgttttcgtttatttattattcggtcgtattttggtatttcgcgtcgattt

SEQ ID NO: 36648 - DNA, 967 bp, Artificial Sequence
  chemically treated genomic DNA (Homo sapiens) CpG-island No: 36648
aaatcgacgcgaaataccaaaatacgaccgaataataaataaacgaaaacgaccgcctccttcccgacgaatccgaacgcgccgcgaaaccgaaccgatcctaccgtaaaccgaaaaaaacgaccgactccgcaacgacgaccctcgacaaaaacaaaaacaaaaaatctaaaacgcctttaattcgccaaaatccttatatacaaaacccgaaacacgaaaaaaaaaaaaaacgcgaaaaatctcgctacaaaactacgcgaccaaaacgctctttataataaaataataaaacgaatactacgaaaaaaaaaacgacgaatccaaaccgcgtcctctaaaaaaaaatacaaattacgacgcgaaataaaaaaatataccgacgcctaaaactataaaacgccgaaacgaaactacaaaaaaaaaacgactataaaccgaaattcccgcgaacccgatacctcgatcccgaacaacgccgttcctctaacccttcttcgtcgccccccactcaatcccgaatctaaatattacataaaataccgaataatactccgctcgaaataaatcgaccgcccccgcccaaccccctccgaccctcacttaaaactaaacaccgaataaaaaccgactacgaaaaacgacgccgccgattataatttacgaaaaacgaaaacttttctctatataccgtaaaaaaaaaaaaaaaaaaaaaaaaacgaaaacgaaaaaaacgcccatctacgctacgctcgaaaaaacgcgaacaaatcgctaacttaaaaaaaactataacaaataaaaaaacctatacgtcgttctctacaaacctaaccgccccgaatatcaaaaaaaaataacgaattcgtatccgccgaaaattattaactattaaaaaaactttcctacgaaatcaatcaaaactttaaaaactctattttaaatataaatcaccactcgaaattta

SEQ ID NO: 36649 - DNA, 693 bp, Artificial Sequence
  chemically treated genomic DNA (Homo sapiens) CpG-island No: 36649
tttgttcgcgagtgacgtttgttttttttgtttttagagattttgaaggagttagacgagtgttacgagcgttttagtcgcgagatagacggggcgtagaagcggcggatgttgtattgtgtgtagcgcgcgttgattcgtagttaggagttgggcgacgagaagatttagatcgtgagttagatggtggagttggtggagaatcgtacgcggtaggtggatagttacgtggagttgttcgaggcgtagtaggagttgggcgatatagcgggtaatagcggtaaggttggcgcggataggtttaaaggcgaggcggtagcgtaggttgataagtttaatagtaagcgtttacggcggtagcgtaataacgagaatcgtgagaacgcgtttagtaattacgattacgacgacggcgtttcgggtatatttaaggagaagaaggttaagatttttaagaagaagaagcgttttaaggttaaggcggagcgagaggcgttttttgtcgatttttttatcgattttaacgaatttacgtattgtttgtgtaattaggttttttatggggagatgatcggttgcgataacgacgagtgttttatcgagtggttttatttttcgtgcgtggggtttaattataaatttaagggtaagtggtattgttttaagtgtcggggggagaacgagaagattatg

SEQ ID NO: 36650 - DNA, 693 bp, Artificial Sequence
  chemically treated genomic DNA (Homo sapiens) CpG-island No: 36650
cataatcttctcgttctccccccgacacttaaaacaataccacttacccttaaatttataattaaaccccacgcacgaaaaataaaaccactcgataaaacactcgtcgttatcgcaaccgatcatctccccataaaaaacctaattacacaaacaatacgtaaattcgttaaaatcgataaaaaaatcgacaaaaaacgcctctcgctccgccttaaccttaaaacgcttcttcttcttaaaaatcttaaccttcttctccttaaatatacccgaaacgccgtcgtcgtaatcgtaattactaaacgcgttctcacgattctcgttattacgctaccgccgtaaacgcttactattaaacttatcaacctacgctaccgcctcgcctttaaacctatccgcgccaaccttaccgctattacccgctatatcgcccaactcctactacgcctcgaacaactccacgtaactatccacctaccgcgtacgattctccaccaactccaccatctaactcacgatctaaatcttctcgtcgcccaactcctaactacgaatcaacgcgcgctacacacaatacaacatccgccgcttctacgccccgtctatctcgcgactaaaacgctcgtaacactcgtctaactccttcaaaatctctaaaaacaaaaaaaacaaacgtcactcgcgaacaaa

SEQ ID NO: 36651 - DNA, 693 bp, Artificial Sequence
  chemically treated genomic DNA (Homo sapiens) CpG-island No: 36651
tatggttttttcgtttttttttcggtatttgggatagtattatttgtttttgggtttatgattgagttttacgtacgagaagtggaattattcgatggggtattcgtcgttgtcgtagtcgattatttttttataggagatttggttgtatagatagtacgtgggttcgttggggtcgatggggaggtcggtaggggacgtttttcgtttcgttttggttttggagcgttttttttttttggaggttttggtttttttttttttgggtgtgttcgaggcgtcgtcgtcgtggtcgtggttgttggacgcgtttttacggttttcgttgttgcgttgtcgtcgtgagcgtttgttgttgggtttgttagtttgcgttgtcgtttcgtttttgggtttgttcgcgttagttttgtcgttgttgttcgttgtgtcgtttagtttttgttgcgtttcgaatagttttacgtggttgtttatttgtcgcgtgcggttttttattagttttattatttggtttacgatttggattttttcgtcgtttagtttttggttgcggattagcgcgcgttgtatatagtgtagtattcgtcgtttttgcgtttcgtttgtttcgcgattgaagcgttcgtagtattcgtttagtttttttaggatttttgggggtaagaaggataggcgttattcgcgagtagg

SEQ ID NO: 36652 - DNA, 693 bp, Artificial Sequence
  chemically treated genomic DNA (Homo sapiens) CpG-island No: 36652
cctactcgcgaataacgcctatccttcttacccccaaaaatcctaaaaaaactaaacgaatactacgaacgcttcaatcgcgaaacaaacgaaacgcaaaaacgacgaatactacactatatacaacgcgcgctaatccgcaaccaaaaactaaacgacgaaaaaatccaaatcgtaaaccaaataataaaactaataaaaaaccgcacgcgacaaataaacaaccacgtaaaactattcgaaacgcaacaaaaactaaacgacacaacgaacaacaacgacaaaactaacgcgaacaaacccaaaaacgaaacgacaacgcaaactaacaaacccaacaacaaacgctcacgacgacaacgcaacaacgaaaaccgtaaaaacgcgtccaacaaccacgaccacgacgacgacgcctcgaacacacccaaaaaaaaaaaaaccaaaacctccaaaaaaaaaaaacgctccaaaaccaaaacgaaacgaaaaacgtcccctaccgacctccccatcgaccccaacgaacccacgtactatctatacaaccaaatctcctataaaaaaataatcgactacgacaacgacgaataccccatcgaataattccacttctcgtacgtaaaactcaatcataaacccaaaaacaaataatactatcccaaataccgaaaaaaaaacgaaaaaaccata

SEQ ID NO: 36653 - DNA, 784 bp, Artificial Sequence
  chemically treated genomic DNA (Homo sapiens) CpG-island No: 36653
  unsure (323, 348)
atcggaattacggacgatatcgtcgttagtaaagattttcgggttgttggtttggaaggcgttgtcgttgtttttcggggcgatgatgcggttttgtgaatttagttcgacgttgtgttttgttagttattttatgttgtgtggacggaaattaaacgttatgattatcgtatttgtcggaacgatatgttcggaatttgtaacgattttcgcgcggcgacggtttttggcgttcggttcgtttatttcggtacgtattatttttacgtcgttgattttgtcgttatcgtttattttaatatttagcggttggacgttgaatntgaattttacgtttttttttcgcgncgtttttattacgcggcgggaattcggtatgttttttttattacgacgataggtataggtaacgtgtttcgttttttgatatacggacgtacgtacgtagtttatcgtagtgtcgttatcgttaaggattattacgcgtttgttttttatgttgacgaacggttcgtcgcgggttttattaaagtttattaattgtttggtgttggcgatgaggaacggtagcgttgcgtatacgttatcggcgttttcgttttttagttcgtcgcgtattgattgataagtttcgacgttaaggaatacggtatcgtaattatttagtagatcgtttagttgtacgtcgcggtttatttcggtattgagtttgaatttaatatttatgtcggtgaagattttacggcgacgcgttattatttttttttttagtttgaaggtcgga

SEQ ID NO: 36654 - DNA, 784 bp, Artificial Sequence
  chemically treated genomic DNA (Homo sapiens) CpG-island No: 36654
  unsure (437, 462)
tccgaccttcaaactaaaaaaaaaaataataacgcgtcgccgtaaaatcttcaccgacataaatattaaattcaaactcaataccgaaataaaccgcgacgtacaactaaacgatctactaaataattacgataccgtattccttaacgtcgaaacttatcaatcaatacgcgacgaactaaaaaacgaaaacgccgataacgtatacgcaacgctaccgttcctcatcgccaacaccaaacaattaataaactttaataaaacccgcgacgaaccgttcgtcaacataaaaaacaaacgcgtaataatccttaacgataacgacactacgataaactacgtacgtacgtccgtatatcaaaaaacgaaacacgttacctatacctatcgtcgtaataaaaaaaacataccgaattcccgccgcgtaataaaaacgncgcgaaaaaaaaacgtaaaattcanattcaacgtccaaccgctaaatattaaaataaacgataacgacaaaatcaacgacgtaaaaataatacgtaccgaaataaacgaaccgaacgccaaaaaccgtcgccgcgcgaaaatcgttacaaattccgaacatatcgttccgacaaatacgataatcataacgtttaatttccgtccacacaacataaaataactaacaaaacacaacgtcgaactaaattcacaaaaccgcatcatcgccccgaaaaacaacgacaacgccttccaaaccaacaacccgaaaatctttactaacgacgatatcgtccgtaattccgat

SEQ ID NO: 36655 - DNA, 784 bp, Artificial Sequence
  chemically treated genomic DNA (Homo sapiens) CpG-island No: 36655
  unsure (437, 462)
ttcggtttttaagttggaaaaagaggtaatgacgcgtcgtcgtgaaatttttatcggtatgggtattgaatttaaatttaatatcgaagtgggtcgcgacgtatagttggacgatttgttgagtgattacgatgtcgtgttttttggcgtcgggatttattagttaatgcgcggcgggttggaaaacgaagacgtcgatggcgtgtacgtagcgttgtcgttttttatcgttaatattaaatagttaatgggttttggtgaaattcgcgacgaatcgttcgttagtatggaaggtaaacgcgtggtggtttttggcggtggcgatattgcgatggattgcgtgcgtacgttcgtatattagggagcgaagtacgttatttatgtttatcgtcgtgatgaagagaatatgtcgggttttcgtcgcgtagtgaaaacgncgcgggaagaaggcgtagagtttanatttaacgtttagtcgttgggtattgaagtgaacggtaacggtaaagttagcggcgtaaaaatggtgcgtatcgaaatgggcgaatcggacgttaaaggtcgtcgtcgcgcggagatcgttgtaggtttcgaatatatcgtttcggtagatgcggtgattatggcgtttggttttcgtttatataatatggaatggttggtaaaatatagcgtcgagttggatttataaggtcgtattatcgtttcggaaggtagcgataacgttttttagattagtaattcgaaaatttttgttggcggcgatatcgttcgtggtttcgat

SEQ ID NO: 36656 - DNA, 784 bp, Artificial Sequence
  chemically treated genomic DNA (Homo sapiens) CpG-island No: 36656
  unsure (323, 348)
atcgaaaccacgaacgatatcgccgccaacaaaaattttcgaattactaatctaaaaaacgttatcgctaccttccgaaacgataatacgaccttataaatccaactcgacgctatattttaccaaccattccatattatataaacgaaaaccaaacgccataatcaccgcatctaccgaaacgatatattcgaaacctacaacgatctccgcgcgacgacgacctttaacgtccgattcgcccatttcgatacgcaccatttttacgccgctaactttaccgttaccgttcacttcaatacccaacgactaaacgttaaatntaaactctacgccttcttcccgcgncgttttcactacgcgacgaaaacccgacatattctcttcatcacgacgataaacataaataacgtacttcgctccctaatatacgaacgtacgcacgcaatccatcgcaatatcgccaccgccaaaaaccaccacgcgtttaccttccatactaacgaacgattcgtcgcgaatttcaccaaaacccattaactatttaatattaacgataaaaaacgacaacgctacgtacacgccatcgacgtcttcgttttccaacccgccgcgcattaactaataaatcccgacgccaaaaaacacgacatcgtaatcactcaacaaatcgtccaactatacgtcgcgacccacttcgatattaaatttaaattcaatacccataccgataaaaatttcacgacgacgcgtcattacctctttttccaacttaaaaaccgaa

SEQ ID NO: 36657 - DNA, 581 bp, Artificial Sequence
  chemically treated genomic DNA (Homo sapiens) CpG-island No: 36657
ggttatcgggtaatagcgttagttggttagaagcgataagttttcgttcgtcgttaggttaattaatagcggattattagaacgtgtcgttagtagggtattcgggtgacgggagtttatgattattgtatcgtacgtattacgtagttgcgggatagcgttaggagcggtttttcgtagaggtttcgttttgttttaggtttttaggttcgttagatgggcggtcgtttcggtgtcggttttaggaacggagggtatcggttacgcgtttttaggttttttacgtagcggtttagtggttttcgatgagtgtcgttagtgcgtttttttaagtgtgtttagaagtagtgcggatgcgtatttatttttgaaggtttatcgtgggtcgtttagcgagtgtgagtaatattagtgtcgttatgtagaggatgtttttaagaaaaaagaagttagtatttggattttatcgaggcgagcgtaggcgggttatatgattttttgtattagtaacggttagatcggtagagttatattcgcggtattattagacgacgtaaatttttaagaaggatttttgttat

SEQ ID NO: 36658 - DNA, 581 bp, Artificial Sequence
  chemically treated genomic DNA (Homo sapiens) CpG-island No: 36658
ataacaaaaatccttcttaaaaatttacgtcgtctaataataccgcgaatataactctaccgatctaaccgttactaatacaaaaaatcatataacccgcctacgctcgcctcgataaaatccaaatactaacttcttttttcttaaaaacatcctctacataacgacactaatattactcacactcgctaaacgacccacgataaaccttcaaaaataaatacgcatccgcactacttctaaacacacttaaaaaaacgcactaacgacactcatcgaaaaccactaaaccgctacgtaaaaaacctaaaaacgcgtaaccgataccctccgttcctaaaaccgacaccgaaacgaccgcccatctaacgaacctaaaaacctaaaacaaaacgaaacctctacgaaaaaccgctcctaacgctatcccgcaactacgtaatacgtacgatacaataatcataaactcccgtcacccgaataccctactaacgacacgttctaataatccgctattaattaacctaacgacgaacgaaaacttatcgcttctaaccaactaacgctattacccgataacc

SEQ ID NO: 36659 - DNA, 581 bp, Artificial Sequence
  chemically treated genomic DNA (Homo sapiens) CpG-island No: 36659
gtagtagaaattttttttgaaggtttacgtcgtttggtaatatcgcggatatgattttgtcggtttggtcgttgttgatgtagaaggttatatgattcgtttgcgttcgtttcggtaaagtttagatgttggtttttttttttttaagaatattttttgtatggcggtattggtattgtttatattcgttgggcgatttacggtgaatttttagaagtgaatgcgtattcgtattgtttttgaatatatttgagggggcgtattaacggtatttatcgaaaattattgaatcgttgcgtgaagagtttaaaagcgcgtggtcgatatttttcgtttttgaaatcgatatcgaagcgatcgtttatttggcgaatttgggagtttgaaataaggcgggatttttgcgagaggtcgtttttggcgttatttcgtagttgcgtggtgcgtacggtatagtgattatggattttcgttattcggatattttgttggcggtacgttttggtagttcgttgttgattggtttggcgacgggcgaaaatttatcgtttttgattagttggcgttgttgttcggtgatt

SEQ ID NO: 36660 - DNA, 581 bp, Artificial Sequence
  chemically treated genomic DNA (Homo sapiens) CpG-island No: 36660
aatcaccgaacaacaacgccaactaatcaaaaacgataaattttcgcccgtcgccaaaccaatcaacaacgaactaccaaaacgtaccgccaacaaaatatccgaataacgaaaatccataatcactataccgtacgcaccacgcaactacgaaataacgccaaaaacgacctctcgcaaaaatcccgccttatttcaaactcccaaattcgccaaataaacgatcgcttcgatatcgatttcaaaaacgaaaaatatcgaccacgcgcttttaaactcttcacgcaacgattcaataattttcgataaataccgttaatacgccccctcaaatatattcaaaaacaatacgaatacgcattcacttctaaaaattcaccgtaaatcgcccaacgaatataaacaataccaataccgccatacaaaaaatattcttaaaaaaaaaaaaaccaacatctaaactttaccgaaacgaacgcaaacgaatcatataaccttctacatcaacaacgaccaaaccgacaaaatcatatccgcgatattaccaaacgacgtaaaccttcaaaaaaaatttctactac

SEQ ID NO: 36661 - DNA, 566 bp, Artificial Sequence
  chemically treated genomic DNA (Homo sapiens) CpG-island No: 36661
  unsure (53, 282)
aacggtgatgtagcggtaatagaacgcgagttgtagtatattagcgatgtttnggggttgaattacgataagtcgtaggtagtagatagtacgtcgaaatcgtagttgaaatcgtaattcgtttaaaaagaagtggcggatattgcgttgtaatgatacgttatattcggtatggtatgtcggatgtggcgtatgttgataagacgcgttagcgtcgtattaggtaatcggttcgggcgttagatgttggatgcggcgtaatcgttttatttaatttacggngtggagtattttatagcggtgtaggtttgataagacgcgttagcgtcgtattaggtaatcggtttgggcgttagatgttcgatgcggcgttatcgtttattcgaattacggggtgaagtattttatagcggggtaggttttgatagagcgttaagcgtcgaattaggtatcggtttggacgttggattgtcgatgtcgcgtatcgttttattaatttacggggggagtattttataggggggtgggtttgaaaaaatttttaaggttttttaagtaatcggttt

SEQ ID NO: 36662 - DNA, 566 bp, Artificial Sequence
  chemically treated genomic DNA (Homo sapiens) CpG-island No: 36662
  unsure (285, 514)
aaaccgattacttaaaaaaccttaaaaattttttcaaacccacccccctataaaatactccccccgtaaattaataaaacgatacgcgacatcgacaatccaacgtccaaaccgatacctaattcgacgcttaacgctctatcaaaacctaccccgctataaaatacttcaccccgtaattcgaataaacgataacgccgcatcgaacatctaacgcccaaaccgattacctaatacgacgctaacgcgtcttatcaaacctacaccgctataaaatactccacnccgtaaattaaataaaacgattacgccgcatccaacatctaacgcccgaaccgattacctaatacgacgctaacgcgtcttatcaacatacgccacatccgacataccataccgaatataacgtatcattacaacgcaatatccgccacttctttttaaacgaattacgatttcaactacgatttcgacgtactatctactacctacgacttatcgtaattcaaccccnaaacatcgctaatatactacaactcgcgttctattaccgctacatcaccgtt

SEQ ID NO: 36663 - DNA, 566 bp, Artificial Sequence
  chemically treated genomic DNA (Homo sapiens) CpG-island No: 36663
  unsure (285, 514)
aaatcggttgtttaaagaattttgggggtttttttaagtttatttttttgtaaagtgtttttttcgtaggttgataaggcggtacgcggtatcgataatttaacgtttaaatcggtgtttgattcgacgtttggcgttttattaaggtttatttcgttgtgaagtgttttatttcgtagttcgaataggcggtaacgtcgtatcggatatttaacgtttaagtcggttgtttgatgcgacgttggcgcgttttattaggtttatatcgttgtgaagtgttttatntcgtaggttggataaggcggttacgtcgtatttaatatttaacgttcgagtcggttgtttgatgcgacgttggcgcgttttattagtatacgttatattcggtatattatgtcggatgtggcgtattattataacgtaatattcgttatttttttttgaacgggttgcggttttaattgcggtttcggcgtattatttgttgtttgcggtttgtcgtagtttaattttngaatatcgttggtgtattgtaattcgcgttttgttgtcgttatattatcgtt

SEQ ID NO: 36664 - DNA, 566 bp, Artificial Sequence
  chemically treated genomic DNA (Homo sapiens) CpG-island No: 36664
  unsure (53, 282)
aacgataatataacgacaacaaaacgcgaattacaatacaccaacgatattcnaaaattaaactacgacaaaccgcaaacaacaaataatacgccgaaaccgcaattaaaaccgcaacccgttcaaaaaaaaataacgaatattacgttataataatacgccacatccgacataatataccgaatataacgtatactaataaaacgcgccaacgtcgcatcaaacaaccgactcgaacgttaaatattaaatacgacgtaaccgccttatccaacctacganataaaacacttcacaacgatataaacctaataaaacgcgccaacgtcgcatcaaacaaccgacttaaacgttaaatatccgatacgacgttaccgcctattcgaactacgaaataaaacacttcacaacgaaataaaccttaataaaacgccaaacgtcgaatcaaacaccgatttaaacgttaaattatcgataccgcgtaccgccttatcaacctacgaaaaaaacactttacaaaaaaataaacttaaaaaaacccccaaaattctttaaacaaccgattt

SEQ ID NO: 36665 - DNA, 599 bp, Artificial Sequence
  chemically treated genomic DNA (Homo sapiens) CpG-island No: 36665
  unsure (92)
tttattaggtttataatgaacgatgtagattcgataaatttttagtttcgcgtttttaacgcggcgatattcgtaggcgtggtgcgatagtntttgttaattaatcgtgcgttagcggtttgttattgcggtagataattcgttagttgcgcgtaatgtttatcgtgacgatgttaggttttgtttacggtatcgtaatgttcgttcgagttcggatatattattagcggtagtatcgttaaatcgtgtaaatgttgtaacgtagcggtggtgttttttagcgtaatatagttaatgtttagcgttattatttgcggataattcgttagtaacgtaattacgttacgtagcggcgtatcgtcgtttaggtgttcgttgtcgcgtagggtaaatgagaattacgttcgcgtacgcggatatgcggttaatagttcggttaacgttttaatttcggaaaaattcggtagggtttcgtaggttagtagatcgggttcggtatttagtaagggttttacgcgcgggcgatgaaacgtttgaaatgttttaacgttataatgataaatcgttaacggattttagagtttttcgttagatacgcg

SEQ ID NO: 36666 - DNA, 599 bp, Artificial Sequence
  chemically treated genomic DNA (Homo sapiens) CpG-island No: 36666
  unsure (508)
cgcgtatctaacgaaaaactctaaaatccgttaacgatttatcattataacgttaaaacatttcaaacgtttcatcgcccgcgcgtaaaacccttactaaataccgaacccgatctactaacctacgaaaccctaccgaatttttccgaaattaaaacgttaaccgaactattaaccgcatatccgcgtacgcgaacgtaattctcatttaccctacgcgacaacgaacacctaaacgacgatacgccgctacgtaacgtaattacgttactaacgaattatccgcaaataataacgctaaacattaactatattacgctaaaaaacaccaccgctacgttacaacatttacacgatttaacgatactaccgctaataatatatccgaactcgaacgaacattacgataccgtaaacaaaacctaacatcgtcacgataaacattacgcgcaactaacgaattatctaccgcaataacaaaccgctaacgcacgattaattaacaaanactatcgcaccacgcctacgaatatcgccgcgttaaaaacgcgaaactaaaaatttatcgaatctacatcgttcattataaacctaataaa

SEQ ID NO: 36667 - DNA, 599 bp, Artificial Sequence
  chemically treated genomic DNA (Homo sapiens) CpG-island No: 36667
  unsure (508)
cgcgtatttggcggagggttttgaaattcgttggcgatttattattgtagcgttagggtattttaggcgttttatcgttcgcgcgtggagtttttgttggatgtcgggttcgatttgttggtttgcgaaattttgtcgaattttttcgagattgaggcgttggtcgagttgttgatcgtatattcgcgtgcgcgggcgtggtttttatttattttgcgcgatagcgaatatttgagcgacggtacgtcgttgcgtgacgtggttgcgttgttggcgggttattcgtaggtggtggcgttaggtattaattgtattgcgttggaaaatattatcgttgcgttgtagtatttatacggtttaacggtgttgtcgttggtggtgtattcgaattcgggcgagtattacgatgtcgtgagtaaaatttggtatcgttacggtgaatattgcgcgtagttggcggattatttgtcgtagtggtaggtcgttggcgtacggttgattggtaggngttgtcgtattacgtttgcggatatcgtcgcgttaaaagcgcgaagttgagggtttatcgggtttatatcgtttattgtaggtttgataag

SEQ ID NO: 36668 - DNA, 599 bp, Artificial Sequence
  chemically treated genomic DNA (Homo sapiens) CpG-island No: 36668
  unsure (92)
cttatcaaacctacaataaacgatataaacccgataaaccctcaacttcgcgcttttaacgcgacgatatccgcaaacgtaatacgacaacncctaccaatcaaccgtacgccaacgacctaccactacgacaaataatccgccaactacgcgcaatattcaccgtaacgataccaaattttactcacgacatcgtaatactcgcccgaattcgaatacaccaccaacgacaacaccgttaaaccgtataaatactacaacgcaacgataatattttccaacgcaatacaattaatacctaacgccaccacctacgaataacccgccaacaacgcaaccacgtcacgcaacgacgtaccgtcgctcaaatattcgctatcgcgcaaaataaataaaaaccacgcccgcgcacgcgaatatacgatcaacaactcgaccaacgcctcaatctcgaaaaaattcgacaaaatttcgcaaaccaacaaatcgaacccgacatccaacaaaaactccacgcgcgaacgataaaacgcctaaaataccctaacgctacaataataaatcgccaacgaatttcaaaaccctccgccaaatacgcg

SEQ ID NO: 36669 - DNA, 958 bp, Artificial Sequence
  chemically treated genomic DNA (Homo sapiens) CpG-island No: 36669
ggtagcgggattcggcgaagacgcgatcgcggcgcgagttattatggtgagttggtcgcgtcgcgttttaggacgtcggattcggggacggggtaggaaatttcggcgtggtgtatttattttgggcgcgttgtcggggttaggggtggagaaggtggacgcgggagtcggtacgtcgcgagttttgattttttgtcgtttttcgtaaattcgggtcgggggagagcgagcgaggggttaaggaaaattttattttaagtcggtttttgcgtcgcgaaattttttgtggtcgggttgttatggttgttagttgtcggaagttagggtgtgggcgtatcggttgcgaggggtacggcgcgggagggggttttttttttttgttgggacgtggggggcgtagtcggtaggggaggtgttcggagattcgcgtcgtagtcgttggcggcgttttttgtttttttcgcggtcgtgttcgtttcgtttcgggtattttcgcgtcgattttttttttttttcgtcgtcgtttcgttgttcggtagcgttcgtagttgtttcgtttggtagcggtacgcgggcgggggcggtttttggttcgttttggcgaggggcggcgcgggtcgtataaaggtaggcgggggcgttaggtagggcgagtatttggcggtcggcgggttgttaagagttagggagattcgggcgcgggcggtaattacgtcgtttcggatttgtgtcgggcgtcggtttcgagggttttcgcgtttcggacgttaagtaaatattttttgaagaggattttatttttttttaagcgcgaggggatcggggtttttcggggatttaggggacgtttcgtacgggaagacgttttcgcgagtttcgagtttgttgttgttttttttttggtattttgggaatgtgtggaaggggtcgtttttttgatttgtgatttttttgttat

SEQ ID NO: 36670 - DNA, 958 bp, Artificial Sequence
  chemically treated genomic DNA (Homo sapiens) CpG-island No: 36670
ataacaaaaaaatcacaaatcaaaaaaacgaccccttccacacattcccaaaataccaaaaaaaaaacaacaacaaactcgaaactcgcgaaaacgtcttcccgtacgaaacgtcccctaaatccccgaaaaaccccgatcccctcgcgcttaaaaaaaaataaaatcctcttcaaaaaatatttacttaacgtccgaaacgcgaaaaccctcgaaaccgacgcccgacacaaatccgaaacgacgtaattaccgcccgcgcccgaatctccctaactcttaacaacccgccgaccgccaaatactcgccctacctaacgcccccgcctacctttatacgacccgcgccgcccctcgccaaaacgaaccaaaaaccgcccccgcccgcgtaccgctaccaaacgaaacaactacgaacgctaccgaacaacgaaacgacgacgaaaaaaaaaaaaaatcgacgcgaaaatacccgaaacgaaacgaacacgaccgcgaaaaaaacaaaaaacgccgccaacgactacgacgcgaatctccgaacacctcccctaccgactacgccccccacgtcccaacaaaaaaaaaaaaccccctcccgcgccgtacccctcgcaaccgatacgcccacaccctaacttccgacaactaacaaccataacaacccgaccacaaaaaatttcgcgacgcaaaaaccgacttaaaataaaattttccttaacccctcgctcgctctcccccgacccgaatttacgaaaaacgacaaaaaatcaaaactcgcgacgtaccgactcccgcgtccaccttctccacccctaaccccgacaacgcgcccaaaataaatacaccacgccgaaatttcctaccccgtccccgaatccgacgtcctaaaacgcgacgcgaccaactcaccataataactcgcgccgcgatcgcgtcttcgccgaatcccgctacc

SEQ ID NO: 36671 - DNA, 958 bp, Artificial Sequence
  chemically treated genomic DNA (Homo sapiens) CpG-island No: 36671
atagtagaaaagttataagttaaagaggcggttttttttatatatttttaaagtgttaaagggaaaatagtaataaattcgaaattcgcgagggcgttttttcgtgcgaagcgttttttggattttcgaaaagtttcgattttttcgcgtttgggaaggggtggggttttttttaggaggtgtttatttggcgttcggggcgcggagattttcggggtcggcgttcggtataggttcggggcggcgtggttgtcgttcgcgttcgagtttttttggtttttgatagttcgtcggtcgttaggtgttcgttttatttggcgttttcgtttgtttttgtgcggttcgcgtcgtttttcgttaaggcgggttagggatcgttttcgttcgcgtgtcgttgttaggcgggatagttgcgggcgttgtcgggtagcggagcggcggcggggaggagagggagtcggcgcgagggtgttcggggcggggcgggtacggtcgcggggagggtaggggacgtcgttagcggttgcggcgcgagttttcgagtattttttttgtcggttgcgttttttacgttttagtaggaggaggggattttttttcgcgtcgtgtttttcgtagtcgatgcgtttatattttggttttcgatagttggtagttatagtaattcggttatagaaagtttcgcgacgtagaaatcgatttggaataaagttttttttggtttttcgttcgttttttttcggttcgggtttacggaaagcggtaggaaattagagttcgcgacgtgtcggttttcgcgtttattttttttatttttggtttcggtagcgcgtttaaggtgggtgtattacgtcggggttttttgtttcgttttcgggttcggcgttttaggacgcggcgcggttaatttattatggtgattcgcgtcgcggtcgcgttttcgtcgggtttcgttgtt

SEQ ID NO: 36672 - DNA, 958 bp, Artificial Sequence
  chemically treated genomic DNA (Homo sapiens) CpG-island No: 36672
aacaacgaaacccgacgaaaacgcgaccgcgacgcgaatcaccataataaattaaccgcgccgcgtcctaaaacgccgaacccgaaaacgaaacaaaaaaccccgacgtaatacacccaccttaaacgcgctaccgaaaccaaaaataaaaaaaataaacgcgaaaaccgacacgtcgcgaactctaatttcctaccgctttccgtaaacccgaaccgaaaaaaaacgaacgaaaaaccaaaaaaaactttattccaaatcgatttctacgtcgcgaaactttctataaccgaattactataactaccaactatcgaaaaccaaaatataaacgcatcgactacgaaaaacacgacgcgaaaaaaaatcccctcctcctactaaaacgtaaaaaacgcaaccgacaaaaaaaatactcgaaaactcgcgccgcaaccgctaacgacgtcccctaccctccccgcgaccgtacccgccccgccccgaacaccctcgcgccgactccctctcctccccgccgccgctccgctacccgacaacgcccgcaactatcccgcctaacaacgacacgcgaacgaaaacgatccctaacccgccttaacgaaaaacgacgcgaaccgcacaaaaacaaacgaaaacgccaaataaaacgaacacctaacgaccgacgaactatcaaaaaccaaaaaaactcgaacgcgaacgacaaccacgccgccccgaacctataccgaacgccgaccccgaaaatctccgcgccccgaacgccaaataaacacctcctaaaaaaaaccccaccccttcccaaacgcgaaaaaatcgaaacttttcgaaaatccaaaaaacgcttcgcacgaaaaaacgccctcgcgaatttcgaatttattactattttccctttaacactttaaaaatatataaaaaaaaccgcctctttaacttataacttttctactat

SEQ ID NO: 36673 - DNA, 1263 bp, Artificial Sequence
  chemically treated genomic DNA (Homo sapiens) CpG-island No: 36673
tttcgaggtgagaagtagttgaggattcgcgttagaagttttaggttcgaaatggagttgttttcgaggtggggtcgtagggattggtttggttgttgttgcgtcgtacgcggagagacgttcgggattttggttcgcgtcgagttcgacgagggtcggagttgcggacgagacgggacggagtggtgtttttgcgggcggtgttttttcgggtcggtagtgttcgggcgcggcgttcgttgatttcgtttaagcggagtttagttgttttcggggttcggcggcggcgagggcggttcggcgggggtttcggcgaagagatattgcgggtgcgtttttttcgtagcggattgggagcgattgggaggtgcgggcgttagttagtattatttttttacgaggggtggggaggtgggatgggaggtggagaggacgggggagggggcgacgggcggagtaatagtttcggagtttcgggggggagggttttggagttcgggggggtcgttgttcgtattttttatttttcgcggcgagagtggatgcgtggtttcggcgaaagtcgagtcgagttttcggcgcgttcgcgtagggggcggggttcgggttagggatcggtttttgcggtgcggttttttttttttcgtttttttttttttcgtaaacggagcggggtcggtcgggatttgtcggttcggagagttgtcgcgttcgtttcgtaagttttaagtttttcgtcgtcggttgcgggtttatcgcggtcggcgcggaacgattaggcggaggacggaattcggcgtagcgttgtcgcggttttgtttcgacgtaggtaggtttttttcggggagtaaggtatttagagatttagcgtcggggtttagaagtagtcggtttagaggggttcgtttgagagtcgcggcgttcgagaggcgtttcgggggggttcgcgggagttcggtttagggcgcgttatgtacgtttcgggttttgcgtcgtttcggtcgttcgcgtcgttttttttttttcgttcgttcgtcgtcgtcggagagtttttcgtatttttttttttcgttgttttttcgtttttcgcgtcgttcgggtttcggtttatagtcgcgcgaggtcgttttcgttttcggtttggttatggttttagtttcggcgtttcgcgggtatttttaggtttggtcgcgggtattttagttttttttttttatttaaaattttcgttgcgtttttttttttttgggattaggagtcgta

SEQ ID NO: 36674 - DNA, 1263 bp, Artificial Sequence
  chemically treated genomic DNA (Homo sapiens) CpG-island No: 36674
tacgactcctaatcccaaaaaaaaaaaaacgcaacgaaaattttaaataaaaaaaaaaaactaaaatacccgcgaccaaacctaaaaatacccgcgaaacgccgaaactaaaaccataaccaaaccgaaaacgaaaacgacctcgcgcgactataaaccgaaacccgaacgacgcgaaaaacgaaaaaacaacgaaaaaaaaaaatacgaaaaactctccgacgacgacgaacgaacgaaaaaaaaaaaacgacgcgaacgaccgaaacgacgcaaaacccgaaacgtacataacgcgccctaaaccgaactcccgcgaacccccccgaaacgcctctcgaacgccgcgactctcaaacgaacccctctaaaccgactacttctaaaccccgacgctaaatctctaaataccttactccccgaaaaaaacctacctacgtcgaaacaaaaccgcgacaacgctacgccgaattccgtcctccgcctaatcgttccgcgccgaccgcgataaacccgcaaccgacgacgaaaaacttaaaacttacgaaacgaacgcgacaactctccgaaccgacaaatcccgaccgaccccgctccgtttacgaaaaaaaaaaaaacgaaaaaaaaaaaaccgcaccgcaaaaaccgatccctaacccgaaccccgccccctacgcgaacgcgccgaaaactcgactcgactttcgccgaaaccacgcatccactctcgccgcgaaaaataaaaaatacgaacaacgacccccccgaactccaaaaccctcccccccgaaactccgaaactattactccgcccgtcgccccctcccccgtcctctccacctcccatcccacctccccacccctcgtaaaaaaataatactaactaacgcccgcacctcccaatcgctcccaatccgctacgaaaaaaacgcacccgcaatatctcttcgccgaaacccccgccgaaccgccctcgccgccgccgaaccccgaaaacaactaaactccgcttaaacgaaatcaacgaacgccgcgcccgaacactaccgacccgaaaaaacaccgcccgcaaaaacaccactccgtcccgtctcgtccgcaactccgaccctcgtcgaactcgacgcgaaccaaaatcccgaacgtctctccgcgtacgacgcaacaacaaccaaaccaatccctacgaccccacctcgaaaacaactccatttcgaacctaaaacttctaacgcgaatcctcaactacttctcacctcgaaa

SEQ ID NO: 36675 - DNA, 1263 bp, Artificial Sequence
  chemically treated genomic DNA (Homo sapiens) CpG-island No: 36675
tgcggtttttagttttagggagggaggggcgtagcgagaattttaggtgaggaaggggaattggggtgttcgcggttaggtttgaggatgttcgcggggcgtcgaggttggggttatggttaggtcgggggcggaggcggtttcgcgcggttgtgagtcgaggttcgggcggcgcggggggcggggaggtagcgggaggaggggatgcggagggtttttcggcggcggcgagcgggcgagaagggaggagcggcgcgagcggtcggagcggcgtagggttcgaagcgtgtatggcgcgttttgagtcgggttttcgcgggttttttcggagcgtttttcgggcgtcgcggtttttaggcgggtttttttgggtcggttgtttttgagtttcggcgttggatttttggatgttttatttttcgggagaagtttgtttgcgtcggggtagaatcgcggtagcgttgcgtcggatttcgtttttcgtttagtcgtttcgcgtcggtcgcggtgggttcgtagtcggcgacgaggagtttggggtttgcgaagcgggcgcgatagtttttcgggtcggtaggtttcggtcggtttcgtttcgtttgcgggaaagggagaggcgagaggggaagggtcgtatcgtaggagtcggtttttgattcggatttcgttttttgcgcggacgcgtcgaaggttcggttcggttttcgtcggggttacgtatttattttcgtcgcgagaggtgggggatgcgggtaacggttttttcgggttttaggattttttttttcggggtttcggagttgttgtttcgttcgtcgttttttttttcgttttttttattttttattttatttttttatttttcgtaagaaaataatgttggttggcgttcgtattttttagtcgtttttagttcgttgcgaggaaagcgtattcgtagtgttttttcgtcgggattttcgtcgagtcgttttcgtcgtcgtcgagtttcgagagtagttgggtttcgtttaggcggaattagcgagcgtcgcgttcgggtattgtcggttcgaggaggtatcgttcgtaaggatattatttcgtttcgtttcgttcgtaatttcggttttcgtcgagttcgacgcgagttaggatttcggacgttttttcgcgtgcggcgtagtagtagttagattagtttttgcgattttatttcggaggtaattttatttcggatttgggatttttgacgcggatttttagttattttttatttcgggg

SEQ ID NO: 36676 - DNA, 1263 bp, Artificial Sequence
  chemically treated genomic DNA (Homo sapiens) CpG-island No: 36676
ccccgaaataaaaaataactaaaaatccgcgtcaaaaatcccaaatccgaaataaaattacctccgaaataaaatcgcaaaaactaatctaactactactacgccgcacgcgaaaaaacgtccgaaatcctaactcgcgtcgaactcgacgaaaaccgaaattacgaacgaaacgaaacgaaataatatccttacgaacgatacctcctcgaaccgacaatacccgaacgcgacgctcgctaattccgcctaaacgaaacccaactactctcgaaactcgacgacgacgaaaacgactcgacgaaaatcccgacgaaaaaacactacgaatacgctttcctcgcaacgaactaaaaacgactaaaaaatacgaacgccaaccaacattattttcttacgaaaaataaaaaaataaaataaaaaataaaaaaaacgaaaaaaaaaacgacgaacgaaacaacaactccgaaaccccgaaaaaaaaaatcctaaaacccgaaaaaaccgttacccgcatcccccacctctcgcgacgaaaataaatacgtaaccccgacgaaaaccgaaccgaaccttcgacgcgtccgcgcaaaaaacgaaatccgaatcaaaaaccgactcctacgatacgacccttcccctctcgcctctccctttcccgcaaacgaaacgaaaccgaccgaaacctaccgacccgaaaaactatcgcgcccgcttcgcaaaccccaaactcctcgtcgccgactacgaacccaccgcgaccgacgcgaaacgactaaacgaaaaacgaaatccgacgcaacgctaccgcgattctaccccgacgcaaacaaacttctcccgaaaaataaaacatccaaaaatccaacgccgaaactcaaaaacaaccgacccaaaaaaacccgcctaaaaaccgcgacgcccgaaaaacgctccgaaaaaacccgcgaaaacccgactcaaaacgcgccatacacgcttcgaaccctacgccgctccgaccgctcgcgccgctcctcccttctcgcccgctcgccgccgccgaaaaaccctccgcatcccctcctcccgctacctccccgccccccgcgccgcccgaacctcgactcacaaccgcgcgaaaccgcctccgcccccgacctaaccataaccccaacctcgacgccccgcgaacatcctcaaacctaaccgcgaacaccccaattccccttcctcacctaaaattctcgctacgcccctccctccctaaaactaaaaaccgca

SEQ ID NO: 36677 - DNA, 513 bp, Artificial Sequence
  chemically treated genomic DNA (Homo sapiens) CpG-island No: 36677
  unsure (345, 412, 453, 491)
tcgggggttggttcgttcgtttatgggttttttttatttcgttttagtcgtacggcgaggagttgcgtttcgtggagaacggttgttacgataattttacgttggacgtggttagcgatagttagtcggagatgtaggagaagtattttagtttgaacggcggcggggtttttaacggttcggggagttggggggcgtttatggggggtaagcgggatttcgaggattcggacgtgttcgaggaggatacgtatttgtgagcgtaatcgaagcgtagggtcgagtggggtcgttagggatttaagcgaggtgggattttcggaaatcggacgggttttcggaggnttcggtaattaagtttttcgtcggttttaatttcgggttttcggttttttcgtcggggtttcggggntatttttcggtcggttcggggttttttttttttttttcggntttttttttttttcgggaattttttaattaattcgggnggggggtttttttgggggaatt

SEQ ID NO: 36678 - DNA, 513 bp, Artificial Sequence
  chemically treated genomic DNA (Homo sapiens) CpG-island No: 36678
  unsure (23, 61, 102, 169)
aattcccccaaaaaaaccccccncccgaattaattaaaaaattcccgaaaaaaaaaaaaanccgaaaaaaaaaaaaaaaaccccgaaccgaccgaaaaatanccccgaaaccccgacgaaaaaaccgaaaacccgaaattaaaaccgacgaaaaacttaattaccgaancctccgaaaacccgtccgatttccgaaaatcccacctcgcttaaatccctaacgaccccactcgaccctacgcttcgattacgctcacaaatacgtatcctcctcgaacacgtccgaatcctcgaaatcccgcttaccccccataaacgccccccaactccccgaaccgttaaaaaccccgccgccgttcaaactaaaatacttctcctacatctccgactaactatcgctaaccacgtccaacgtaaaattatcgtaacaaccgttctccacgaaacgcaactcctcgccgtacgactaaaacgaaataaaaaaaacccataaacgaacgaaccaacccccga

SEQ ID NO: 36679 - DNA, 513 bp, Artificial Sequence
  chemically treated genomic DNA (Homo sapiens) CpG-island No: 36679
  unsure (23, 61, 102, 169)
ggtttttttaaaaaagttttttnttcgggttggttaaaaagttttcgggggggggaaaaantcggggaaaaagggaaaggtttcgggtcggtcggaaggtgntttcggggtttcggcgggggggtcggggattcggggttagggtcggcggggggtttggttatcgggnttttcggggattcgttcggttttcgggggttttatttcgtttgggtttttggcggttttattcggttttgcgtttcggttgcgtttataggtgcgtgtttttttcgaatacgttcgagttttcggggtttcgtttgttttttatgagcgttttttagtttttcgggtcgttgagggtttcgtcgtcgtttaggttggggtgttttttttgtattttcgattggttgtcgttggttacgtttagcgtggggttgtcgtggtagtcgttttttacgaagcgtagtttttcgtcgtgcgattgaggcggggtggggagagtttatgggcgagcgagttagttttcgg

SEQ ID NO: 36680 - DNA, 513 bp, Artificial Sequence
  chemically treated genomic DNA (Homo sapiens) CpG-island No: 36680
  unsure (345, 412, 453, 491)
ccgaaaactaactcgctcgcccataaactctccccaccccgcctcaatcgcacgacgaaaaactacgcttcgtaaaaaacgactaccacgacaaccccacgctaaacgtaaccaacgacaaccaatcgaaaatacaaaaaaaacaccccaacctaaacgacgacgaaaccctcaacgacccgaaaaactaaaaaacgctcataaaaaacaaacgaaaccccgaaaactcgaacgtattcgaaaaaaacacgcacctataaacgcaaccgaaacgcaaaaccgaataaaaccgccaaaaacccaaacgaaataaaacccccgaaaaccgaacgaatccccgaaaancccgataaccaaaccccccgccgaccctaaccccgaatccccgacccccccgccgaaaccccgaaancaccttccgaccgacccgaaacctttccctttttccccgantttttcccccccccgaaaactttttaaccaacccgaanaaaaaacttttttaaaaaaacc

SEQ ID NO: 36681 - DNA, 1187 bp, Artificial Sequence
  chemically treated genomic DNA (Homo sapiens) CpG-island No: 36681
  unsure (263, 440, 567, 1099)
acgggtgatcgcgcggggagagagcggtattcgggcgcgaggtgcgaggtttaggtttgcgggcggtcgggttaagttttcgagtttcggcggtgttgattggtcggtttggcgggggggacgggcggagggacggtcgttcgcgcgttcgtttcgttttcgcgggggcgcgttcgcggtacgcggtcgggcggggtcgggcgtgagtgacggttatgcggattaatggggcgggtcgggttcgtcgtcgtcgttcgcgcggnttttgacgcgggttcgggcgtcgcgtcgttgcggttgtaggcggcgacggttatattatgggtcggttgttgcgggtcgttcggttgtcgtcgttgttttcgtcgttgttgtttttgttggttgggggtgagtgcgtttcgggttcgagcgcgggagggcgggcggcggcgtgggtncggtgttgaatagtttttcgggtcgttaataaaggggttagagtgcggcgtcgtcgggagcgcgcgtgtttcggtcgggtcgcggcgtcgtttcgatatacgcgtacgaggagtgggtgcgtggggntcgcggcgggcgtttggcgtgtcgggcgattttcgataaaggcgcggcggtgaagttgggatatagtatcgtggtttttacgtcgcggtttttaggggtaggtgcgtaggttgttgtttcgcgggtcgggggggcgcgtacgtgtgggtgtgtatgtgtgtgcgtgtgtttgtgtgtgtgcgagtgtattgtgtgtttgcgtattcgggggaagaggcgtgtgtgatagttacgcggggaggaggtcgtattgtgaaggttttaggggtcgtttgcggagtgtggggcgggtacgttgaggcgcgggtggttgtttacgcgtggcgttgtcgggagggagtgtgagtgtgttacggtgaatgggtatttttttttgttttgggcgattttattaggagttgataaaaacgggcgtatagttacggaaggttcgtgatagtatacggcgggaggtttttacgtagtttatatacgagggaggtgtgagatttagatgtgtggtttttatttagtagttacgttcggcggcggnttgtgtgggtgcgtggcgggttgggggtgtggtataggtgtgaaagggatgtgtttgtttgagagagaaagagacgggttttttgatg

SEQ ID NO: 36682 - DNA, 1187 bp, Artificial Sequence
  chemically treated genomic DNA (Homo sapiens) CpG-island No: 36682
  unsure (89, 621, 748, 925)
catcaaaaaacccgtctctttctctctcaaacaaacacatccctttcacacctataccacacccccaacccgccacgcacccacacaanccgccgccgaacgtaactactaaataaaaaccacacatctaaatctcacacctccctcgtatataaactacgtaaaaacctcccgccgtatactatcacgaaccttccgtaactatacgcccgtttttatcaactcctaataaaatcgcccaaaacaaaaaaaaatacccattcaccgtaacacactcacactccctcccgacaacgccacgcgtaaacaaccacccgcgcctcaacgtacccgccccacactccgcaaacgacccctaaaaccttcacaatacgacctcctccccgcgtaactatcacacacgcctcttcccccgaatacgcaaacacacaatacactcgcacacacacaaacacacgcacacacatacacacccacacgtacgcgcccccccgacccgcgaaacaacaacctacgcacctacccctaaaaaccgcgacgtaaaaaccacgatactatatcccaacttcaccgccgcgcctttatcgaaaatcgcccgacacgccaaacgcccgccgcganccccacgcacccactcctcgtacgcgtatatcgaaacgacgccgcgacccgaccgaaacacgcgcgctcccgacgacgccgcactctaacccctttattaacgacccgaaaaactattcaacaccgnacccacgccgccgcccgccctcccgcgctcgaacccgaaacgcactcacccccaaccaacaaaaacaacaacgacgaaaacaacgacgacaaccgaacgacccgcaacaaccgacccataatataaccgtcgccgcctacaaccgcaacgacgcgacgcccgaacccgcgtcaaaanccgcgcgaacgacgacgacgaacccgacccgccccattaatccgcataaccgtcactcacgcccgaccccgcccgaccgcgtaccgcgaacgcgcccccgcgaaaacgaaacgaacgcgcgaacgaccgtccctccgcccgtcccccccgccaaaccgaccaatcaacaccgccgaaactcgaaaacttaacccgaccgcccgcaaacctaaacctcgcacctcgcgcccgaataccgctctctccccgcgcgatcacccgt

SEQ ID NO: 36683 - DNA, 1187 bp, Artificial Sequence
  chemically treated genomic DNA (Homo sapiens) CpG-island No: 36683
  unsure (89, 621, 748, 925)
tattaggaggttcgttttttttttttttaggtagatatattttttttatatttgtgttatatttttagttcgttacgtatttatatagntcgtcgtcgggcgtggttgttgaatggaaattatatatttgagttttatatttttttcgtgtgtgagttgcgtgggagtttttcgtcgtgtgttgttacgggtttttcgtggttgtacgttcgtttttgttagtttttaatagagtcgtttagaataggagagaatatttatttatcgtgatatatttatattttttttcggtaacgttacgcgtaaatagttattcgcgttttagcgtattcgttttatatttcgtaggcggtttttgggatttttataatgcggtttttttttcgcgtggttgttatatacgttttttttttcgagtgcgtaggtatataatgtattcgtatatatataagtatacgtatatatatgtatatttatacgtgcgcgttttttcggttcgcgaggtagtagtttgcgtatttgtttttgagagtcgcggcgtgggggttacggtgttgtgttttagttttatcgtcgcgtttttgtcgggggtcgttcggtacgttaggcgttcgtcgcggnttttacgtatttatttttcgtgcgcgtgtgtcggggcggcgtcgcggttcggtcgggatacgcgcgttttcggcggcgtcgtattttggtttttttgttggcggttcggagagttgtttagtatcgngtttacgtcgtcgttcgttttttcgcgttcgggttcggagcgtatttatttttaattagtagaagtagtagcggcgaaagtagcggcggtagtcgggcggttcgtagtagtcggtttatggtgtagtcgtcgtcgtttgtagtcgtagcggcgcggcgttcgggttcgcgttagggntcgcgcgggcggcggcggcgggttcggttcgttttattggttcgtatggtcgttatttacgttcggtttcgttcggtcgcgtgtcgcgggcgcgttttcgcggagacgaagcggacgcgcgggcggtcgttttttcgttcgtttttttcgttaggtcggttaattagtatcgtcgaggttcgggggtttggttcggtcgttcgtagatttgggtttcgtatttcgcgttcggatgtcgtttttttttcgcgcggttattcgt

SEQ ID NO: 36684 - DNA, 1187 bp, Artificial Sequence
  chemically treated genomic DNA (Homo sapiens) CpG-island No: 36684
  unsure (263, 440, 567, 1099)
acgaataaccgcgcgaaaaaaaaacgacatccgaacgcgaaatacgaaacccaaatctacgaacgaccgaaccaaacccccgaacctcgacgatactaattaaccgacctaacgaaaaaaacgaacgaaaaaacgaccgcccgcgcgtccgcttcgtctccgcgaaaacgcgcccgcgacacgcgaccgaacgaaaccgaacgtaaataacgaccatacgaaccaataaaacgaaccgaacccgccgccgccgcccgcgcganccctaacgcgaacccgaacgccgcgccgctacgactacaaacgacgacgactacaccataaaccgactactacgaaccgcccgactaccgccgctactttcgccgctactacttctactaattaaaaataaatacgctccgaacccgaacgcgaaaaaacgaacgacgacgtaaacncgatactaaacaactctccgaaccgccaacaaaaaaaccaaaatacgacgccgccgaaaacgcgcgtatcccgaccgaaccgcgacgccgccccgacacacgcgcacgaaaaataaatacgtaaaanccgcgacgaacgcctaacgtaccgaacgacccccgacaaaaacgcgacgataaaactaaaacacaacaccgtaacccccacgccgcgactctcaaaaacaaatacgcaaactactacctcgcgaaccgaaaaaacgcgcacgtataaatatacatatatatacgtatacttatatatatacgaatacattatatacctacgcactcgaaaaaaaaaacgtatataacaaccacgcgaaaaaaaaaccgcattataaaaatcccaaaaaccgcctacgaaatataaaacgaatacgctaaaacgcgaataactatttacgcgtaacgttaccgaaaaaaaatataaatatatcacgataaataaatattctctcctattctaaacgactctattaaaaactaacaaaaacgaacgtacaaccacgaaaaacccgtaacaacacacgacgaaaaactcccacgcaactcacacacgaaaaaaatataaaactcaaatatataatttccattcaacaaccacgcccgacgacganctatataaatacgtaacgaactaaaaatataacacaaatataaaaaaaatatatctacctaaaaaaaaaaaaaacgaacctcctaata

SEQ ID NO: 36685 - DNA, 987 bp, Artificial Sequence
  chemically treated genomic DNA (Homo sapiens) CpG-island No: 36685
tatacggcggtttcgtattaattttttttttttcgttcgaggggtaggttttaaagttcgttttggtttcgttttttcgtttttgaatttcggtttcgcgggcggcgggcggcgttttttgcgtttcgggatttaattaaattcgttcggagattacgtcgggtttagcgcgtttgtttttttgatttatttttattttcggggttggggcggggcggggcgggcggggtatttcggggtaggggcggggtcgcggggcggggaggtcggggcgggcgggtttttcggacgtcgttgtagagcggggcggggcggggttgagcgtgtttatattcgtcgggtgcgcggtttcgtcgttcgaggtcgttcggttcgggtattatttttcgcgttatggatattagcgatttgttcgttagttgtaggaagggggatgtgggtcgagtgcggtgaggatttcgtagtttcggggagggtgcgggaggtggtcgttttcggaacgtttcgggttttgggacgggcggttgggcggtcgcggagaggcgggcgtttttgtcgggttatagttttcggagcgttttcgcggggtagattattcggattttcgtcgtagttttttagcggaagcgcgttggggcggggatattgatggttattgattttcggagggttttttgtaagaagggattgtttagcggaggttcgaaggcgtagaagtgggcggagagaaggcgggttattgttcgttttggtagggttcggacgttagatttttcgggcgtagggcgcgggtataggtttgggattttagacgtggtttttttttttcgtgttttttggatttggcgcggggaatatttagagtttataatcggttttcggtttttgaggattcggaaatttttgacgtagttaaagtgaatttggcgttgagatgttttttttatgggtcggacgcggagggaaggggtgtttagttgggttttg

SEQ ID NO: 36686 - DNA, 987 bp, Artificial Sequence
  chemically treated genomic DNA (Homo sapiens) CpG-island No: 36686
caaaacccaactaaacaccccttccctccgcgtccgacccataaaaaaaacatctcaacgccaaattcactttaactacgtcaaaaatttccgaatcctcaaaaaccgaaaaccgattataaactctaaatattccccgcgccaaatccaaaaaacacgaaaaaaaaaaaccacgtctaaaatcccaaacctatacccgcgccctacgcccgaaaaatctaacgtccgaaccctaccaaaacgaacaataacccgccttctctccgcccacttctacgccttcgaacctccgctaaacaatcccttcttacaaaaaaccctccgaaaatcaataaccatcaatatccccgccccaacgcgcttccgctaaaaaactacgacgaaaatccgaataatctaccccgcgaaaacgctccgaaaactataacccgacaaaaacgcccgcctctccgcgaccgcccaaccgcccgtcccaaaacccgaaacgttccgaaaacgaccacctcccgcaccctccccgaaactacgaaatcctcaccgcactcgacccacatcccccttcctacaactaacgaacaaatcgctaatatccataacgcgaaaaataatacccgaaccgaacgacctcgaacgacgaaaccgcgcacccgacgaatataaacacgctcaaccccgccccgccccgctctacaacgacgtccgaaaaacccgcccgccccgacctccccgccccgcgaccccgcccctaccccgaaataccccgcccgccccgccccgccccaaccccgaaaataaaaataaatcaaaaaaacaaacgcgctaaacccgacgtaatctccgaacgaatttaattaaatcccgaaacgcaaaaaacgccgcccgccgcccgcgaaaccgaaattcaaaaacgaaaaaacgaaaccaaaacgaactttaaaacctacccctcgaacgaaaaaaaaaaaattaatacgaaaccgccgtata

SEQ ID NO: 36687 - DNA, 987 bp, Artificial Sequence
  chemically treated genomic DNA (Homo sapiens) CpG-island No: 36687
tagaatttaattgggtatttttttttttcgcgttcggtttatggagggggtattttagcgttagatttattttagttgcgttaggagttttcgaatttttagggatcggaggtcgattatgggttttaggtgtttttcgcgttaggtttagagagtacgagagaaaggggttacgtttggagttttaggtttatattcgcgttttgcgttcggggggtttgacgttcgggttttattagggcgaatagtggttcgtttttttttcgtttatttttgcgttttcgggttttcgttgagtagtttttttttataggaagtttttcgggggttaatggttattagtgttttcgttttagcgcgttttcgttggggggttgcggcgggggttcgggtggtttgtttcgcgggggcgtttcgagggttgtgattcggtagaggcgttcgttttttcgcggtcgtttagtcgttcgttttagggttcgaggcgtttcgagggcggttatttttcgtatttttttcgggattgcgaggtttttatcgtattcggtttatatttttttttttgtagttggcgaataggtcgttggtgtttatggcgcggaggatggtattcgagtcgaacgatttcgggcggcgaagtcgcgtattcggcggatgtaaatacgtttagtttcgtttcgtttcgttttgtagcggcgttcggaggattcgttcgtttcggttttttcgtttcgcggtttcgtttttgtttcggggtgtttcgttcgtttcgtttcgttttaatttcggaaataagaatgagttaagaaggtagacgcgttgggttcggcgtggttttcgggcgggtttaattgagtttcggggcgtaggaagcgtcgttcgtcgttcgcggggtcggggtttaggggcgggaaagcggggttaaggcgggttttgaggtttgtttttcgggcgggagaaagggagttggtacgaagtcgtcgtgtg

SEQ ID NO: 36688 - DNA, 987 bp, Artificial Sequence
  chemically treated genomic DNA (Homo sapiens) CpG-island No: 36688
cacacgacgacttcgtaccaactccctttctcccgcccgaaaaacaaacctcaaaacccgccttaaccccgctttcccgcccctaaaccccgaccccgcgaacgacgaacgacgcttcctacgccccgaaactcaattaaacccgcccgaaaaccacgccgaacccaacgcgtctaccttcttaactcattcttatttccgaaattaaaacgaaacgaaacgaacgaaacaccccgaaacaaaaacgaaaccgcgaaacgaaaaaaccgaaacgaacgaatcctccgaacgccgctacaaaacgaaacgaaacgaaactaaacgtatttacatccgccgaatacgcgacttcgccgcccgaaatcgttcgactcgaataccatcctccgcgccataaacaccaacgacctattcgccaactacaaaaaaaaaaatataaaccgaatacgataaaaacctcgcaatcccgaaaaaaatacgaaaaataaccgccctcgaaacgcctcgaaccctaaaacgaacgactaaacgaccgcgaaaaaacgaacgcctctaccgaatcacaaccctcgaaacgcccccgcgaaacaaaccacccgaacccccgccgcaaccccccaacgaaaacgcgctaaaacgaaaacactaataaccattaacccccgaaaaacttcctataaaaaaaaactactcaacgaaaacccgaaaacgcaaaaataaacgaaaaaaaaacgaaccactattcgccctaataaaacccgaacgtcaaaccccccgaacgcaaaacgcgaatataaacctaaaactccaaacgtaacccctttctctcgtactctctaaacctaacgcgaaaaacacctaaaacccataatcgacctccgatccctaaaaattcgaaaactcctaacgcaactaaaataaatctaacgctaaaataccccctccataaaccgaacgcgaaaaaaaaaaatacccaattaaattcta

SEQ ID NO: 36689 - DNA, 523 bp, Artificial Sequence
  chemically treated genomic DNA (Homo sapiens) CpG-island No: 36689
  unsure (488)
aggcgtacgaggaaagcgcggaggagttagtgatcgggcgtattaggaagtttggtttttcgtttcggtattgtttcggtcggttgtgcgattttagtatagtatttaggtttttttttttttcgttttggaggattttcggaagagcgagattttttttcgttgtaaaatattaaattcggaaagggtcgcgtttttttcgtttagggtttttattttttttggttttacgcgttcgtcgttatttcggtaacgtcggtcgtggggcggatatcgttgtcgttaagtagtgcggtcgtaaagttagtcgagtgcgtagtcgtagagttttcgtcgggatttggcggagtgcgtttgcgtacggtcggttggcgggtgttttgtgcgttagttttgttattgcggagtatgaggcggaggttgcgtgcgcgttttgttgttttttgtaggattgtacggaagttagaacgattttgttagacgtattntatagatgagatgtagttattcgttaaatgttata

SEQ ID NO: 36690 - DNA, 523 bp, Artificial Sequence
  chemically treated genomic DNA (Homo sapiens) CpG-island No: 36690
  unsure (36)
tataacatttaacgaataactacatctcatctatanaatacgtctaacaaaatcgttctaacttccgtacaatcctacaaaaaacaacaaaacgcgcacgcaacctccgcctcatactccgcaataacaaaactaacgcacaaaacacccgccaaccgaccgtacgcaaacgcactccgccaaatcccgacgaaaactctacgactacgcactcgactaactttacgaccgcactacttaacgacaacgatatccgccccacgaccgacgttaccgaaataacgacgaacgcgtaaaaccaaaaaaaataaaaaccctaaacgaaaaaaacgcgaccctttccgaatttaatattttacaacgaaaaaaaatctcgctcttccgaaaatcctccaaaacgaaaaaaaaaaaaacctaaatactatactaaaatcgcacaaccgaccgaaacaataccgaaacgaaaaaccaaacttcctaatacgcccgatcactaactcctccgcgctttcctcgtacgcct

SEQ ID NO: 36691 - DNA, 523 bp, Artificial Sequence
  chemically treated genomic DNA (Homo sapiens) CpG-island No: 36691
  unsure (36)
tgtgatatttgacgggtaattgtattttatttgtanaatgcgtttggtaggatcgttttggttttcgtataattttgtagagagtagtaaagcgcgtacgtagttttcgttttatatttcgtagtggtagagttggcgtatagaatattcgttagtcggtcgtgcgtaggcgtatttcgttaagtttcgacgggagttttgcggttgcgtattcggttggttttgcggtcgtattgtttgacggtagcggtgttcgttttacggtcggcgttgtcggggtaacggcgagcgcgtggggttaagaaaggtaagggttttgggcgaggaaagcgcggtttttttcgagtttggtgttttgtagcgaaaggaaatttcgttttttcgaaagttttttagggcgagagaggaaagggtttaggtattgtgttggggtcgtatagtcggtcgagatagtgtcgggacggggagttaggttttttagtgcgttcggttattgattttttcgcgtttttttcgtgcgttt

SEQ ID NO: 36692 - DNA, 523 bp, Artificial Sequence
  chemically treated genomic DNA (Homo sapiens) CpG-island No: 36692
  unsure (488)
aaacgcacgaaaaaaacgcgaaaaaatcaataaccgaacgcactaaaaaacctaactccccgtcccgacactatctcgaccgactatacgaccccaacacaatacctaaaccctttcctctctcgccctaaaaaactttcgaaaaaacgaaatttcctttcgctacaaaacaccaaactcgaaaaaaaccgcgctttcctcgcccaaaacccttacctttcttaaccccacgcgctcgccgttaccccgacaacgccgaccgtaaaacgaacaccgctaccgtcaaacaatacgaccgcaaaaccaaccgaatacgcaaccgcaaaactcccgtcgaaacttaacgaaatacgcctacgcacgaccgactaacgaatattctatacgccaactctaccactacgaaatataaaacgaaaactacgtacgcgctttactactctctacaaaattatacgaaaaccaaaacgatcctaccaaacgcattntacaaataaaatacaattacccgtcaaatatcaca

SEQ ID NO: 36693 - DNA, 555 bp, Artificial Sequence
  chemically treated genomic DNA (Homo sapiens) CpG-island No: 36693
  unsure (472..473, 545, 553)
tcgttagcgttttagacgtattgttggtcgtattgttgagttgtattattttttttttcgtcgtatttgtatttttaagcgttacggcggatgtaatattttttgttcgtttagttgttgtttcggcgcgcgttgtcgcggatttcgtcgtatttttgttttgagttgtcgtcgtcgtattgttagtagtttttgtcgttttcgtggatgtcgtcgtggcgttgtttttcgttgttgacgtttgtttggtcgttttattttttgaagtagacgtcgatgatgtcgatgacgtcgtcgaattggttgacgatgcggtagtcgtttttgaggattttgcgtttgttttcgacgttttcgcgttcgtttcggatgttttcgttgcggaagtagatttcgttgttgcgttggtttgtttagtggtttcgttagttttcgttgtggttgttgaagtagacgatgcggcgttttttgnncgatttcggcggcggtggtattggttgaggtttgttcggtatttgttgacgttgtattggtagacgacgtanttcgttgntt

SEQ ID NO: 36694 - DNA, 555 bp, Artificial Sequence
  chemically treated genomic DNA (Homo sapiens) CpG-island No: 36694
  unsure (3, 11, 83..)
aancaacgaantacgtcgtctaccaatacaacgtcaacaaataccgaacaaacctcaaccaataccaccgccgccgaaatcgnncaaaaaacgccgcatcgtctacttcaacaaccacaacgaaaactaacgaaaccactaaacaaaccaacgcaacaacgaaatctacttccgcaacgaaaacatccgaaacgaacgcgaaaacgtcgaaaacaaacgcaaaatcctcaaaaacgactaccgcatcgtcaaccaattcgacgacgtcatcgacatcatcgacgtctacttcaaaaaataaaacgaccaaacaaacgtcaacaacgaaaaacaacgccacgacgacatccacgaaaacgacaaaaactactaacaatacgacgacgacaactcaaaacaaaaatacgacgaaatccgcgacaacgcgcgccgaaacaacaactaaacgaacaaaaaatattacatccgccgtaacgcttaaaaatacaaatacgacgaaaaaaaaaataatacaactcaacaatacgaccaacaatacgtctaaaacgctaacga

SEQ ID NO: 36695 - DNA, 555 bp, Artificial Sequence
  chemically treated genomic DNA (Homo sapiens) CpG-island No: 36695
  unsure (3, 11, 83..)
aantagcgggntgcgtcgtttgttagtgtagcgttaataagtgtcgggtaggttttagttagtgttatcgtcgtcgaaatcgnntagaaagcgtcgtatcgtttgttttaatagttataacgaaggttggcgaagttattgaataggttagcgtagtagcgaggtttgttttcgtagcgaagatattcgaaacgaacgcgaaagcgtcggaaataagcgtagaatttttaaaaacggttgtcgtatcgttagttagttcggcggcgttatcggtattatcggcgtttgttttaaaagatgaggcgattagataagcgttagtagcgaagagtagcgttacgacggtatttacgaaggcgatagaggttgttggtagtgcgacggcggtagtttagagtaaaagtacggcggaattcgcggtaacgcgcgtcgagatagtagttaaacgggtagaggatattgtattcgtcgtggcgtttgaggatgtaagtacgacgaaaaaggggatagtatagtttagtagtgcgattaatagtacgtttgaaacgttggcgg

SEQ ID NO: 36696 - DNA, 555 bp, Artificial Sequence
  chemically treated genomic DNA (Homo sapiens) CpG-island No: 36696
  unsure (472..473, 545, 553)
ccgccaacgtttcaaacgtactattaatcgcactactaaactatactatcccctttttcgtcgtacttacatcctcaaacgccacgacgaatacaatatcctctacccgtttaactactatctcgacgcgcgttaccgcgaattccgccgtacttttactctaaactaccgccgtcgcactaccaacaacctctatcgccttcgtaaataccgtcgtaacgctactcttcgctactaacgcttatctaatcgcctcatcttttaaaacaaacgccgataataccgataacgccgccgaactaactaacgatacgacaaccgtttttaaaaattctacgcttatttccgacgctttcgcgttcgtttcgaatatcttcgctacgaaaacaaacctcgctactacgctaacctattcaataacttcgccaaccttcgttataactattaaaacaaacgatacgacgctttctanncgatttcgacgacgataacactaactaaaacctacccgacacttattaacgctacactaacaaacgacgcancccgctantt

SEQ ID NO: 36697 - DNA, 593 bp, Artificial Sequence
  chemically treated genomic DNA (Homo sapiens) CpG-island No: 36697
aatggtttgtttttcgtcgaaacgtttggtggcgggattagtgacgaaggtttgagcgagggcgtgtaagatttcgaatatcgtaagcgataggtcgattatcgtcgcgttttagcgaaagcggttttcgtcgaaaatgatttagagcgttgtcggtatttgttttacgagttgtatgataaagaagatagttataagtgcggcgacgatagttatgtttcgcgtttatcggaaggagttgattgggttgaaggtttttaagggtatcggtcgacgtttttttttatgcgatttttgtattaggaagtagtttagtagtaggttgaggtcgttgagtatcgtcgtcgtaaggaatggtgtatgtaaggagatggcgtttaatagtttttcggttacggggtttgttattatatttacgtcgaaataagcgtttatgagttcgaagtggcgagttcgattttttttatcggtgatgtcggcgatataggcgttagtaatcgtatttgtggcgtcggtgatgtcggttacgatgcgttcggcgtagaggatttgaaaaagaagttaatagaaatgattttatataaagaagggaa

SEQ ID NO: 36698 - DNA, 593 bp, Artificial Sequence
  chemically treated genomic DNA (Homo sapiens) CpG-island No: 36698
ttcccttctttatataaaatcatttctattaacttctttttcaaatcctctacgccgaacgcatcgtaaccgacatcaccgacgccacaaatacgattactaacgcctatatcgccgacatcaccgataaaaaaaatcgaactcgccacttcgaactcataaacgcttatttcgacgtaaatataataacaaaccccgtaaccgaaaaactattaaacgccatctccttacatacaccattccttacgacgacgatactcaacgacctcaacctactactaaactacttcctaatacaaaaatcgcataaaaaaaaacgtcgaccgatacccttaaaaaccttcaacccaatcaactccttccgataaacgcgaaacataactatcgtcgccgcacttataactatcttctttatcatacaactcgtaaaacaaataccgacaacgctctaaatcattttcgacgaaaaccgctttcgctaaaacgcgacgataatcgacctatcgcttacgatattcgaaatcttacacgccctcgctcaaaccttcgtcactaatcccgccaccaaacgtttcgacgaaaaacaaaccatt

SEQ ID NO: 36699 - DNA, 593 bp, Artificial Sequence
  chemically treated genomic DNA (Homo sapiens) CpG-island No: 36699
tttttttttttatatgaggttatttttattgattttttttttagattttttacgtcggacgtatcgtggtcggtattatcggcgttataggtgcggttgttggcgtttatatcgtcgatattatcgatggggaagatcgggttcgttatttcgggtttatgagcgtttgtttcggcgtgggtatggtggtaggtttcgtggtcgggggattgttgggcgttatttttttgtatgtattattttttgcggcggcggtgtttaacggttttaatttattattgggttgttttttaatgtaggagtcgtataagggagagcgtcgatcgatgtttttgagagtttttaatttagttagtttttttcggtgggcgcggggtatgattatcgtcgtcgtatttatgattgttttttttattatgtaattcgtaggataggtgtcggtagcgttttgggttattttcggcgaggatcgttttcgttggagcgcgacgatgatcggtttgtcgtttgcggtattcggaattttgtacgttttcgtttaagttttcgttattggtttcgttattaaacgtttcggcgagaagtaggttatt

SEQ ID NO: 36700 - DNA, 593 bp, Artificial Sequence
  chemically treated genomic DNA (Homo sapiens) CpG-island No: 36700
aataacctacttctcgccgaaacgtttaataacgaaaccaataacgaaaacttaaacgaaaacgtacaaaattccgaataccgcaaacgacaaaccgatcatcgtcgcgctccaacgaaaacgatcctcgccgaaaataacccaaaacgctaccgacacctatcctacgaattacataataaaaaaaacaatcataaatacgacgacgataatcataccccgcgcccaccgaaaaaaactaactaaattaaaaactctcaaaaacatcgatcgacgctctcccttatacgactcctacattaaaaaacaacccaataataaattaaaaccgttaaacaccgccgccgcaaaaaataatacatacaaaaaaataacgcccaacaatcccccgaccacgaaacctaccaccatacccacgccgaaacaaacgctcataaacccgaaataacgaacccgatcttccccatcgataatatcgacgatataaacgccaacaaccgcacctataacgccgataataccgaccacgatacgtccgacgtaaaaaatctaaaaaaaaaatcaataaaaataacctcatataaaaaaaaaaa

SEQ ID NO: 36701 - DNA, 1194 bp, Artificial Sequence
  chemically treated genomic DNA (Homo sapiens) CpG-island No: 36701
  unsure (334, 478)
gaatagttgacgtacgttaggatttagtttattatcgtttcgttaatcgttaggttaatttttaggttgaataggtaggtggagaatattagttcgtcgaggcggcgattttgcggtttttttcgtagtttattacgttagaagttattagttattgtagcggcgtggtggtattaaagacgaataggaataggatgttgagggtaaaaatgagcgcgatgtgtttcgtcggggtgacgaaaattagtaggttgattagcgagtaggcgacgatgatttatttgaaggcggtgacgcggtcgaagcggtttagtaggcgtgaggagtaaagcgngtcgaatatggtggcgaggttgtcgtaaagtaaaaattgggtcgttaatttcgggtgatttattacgtattttacgaagtagagcgtcgtttcgtcgcgtattacgttggagtaggtcgttattattttgaacgcgtatatgantgtcgtattggttgttgtttagtagtagtttaaggtttttcgttatcgacgagtttcgttgtattttaaaggtgtagcgttttttggtcgtgaagatgtagacgtagagtagtattacgttgtttagttttagtacgtatatggcgtcgaagtagtttatttgttcgttttttttgtcgatgatgtttagttagcggtagcgcgatgtcgttgatagcgagcgagttcgtcgtcgttaggaagaagcgttaggattgtagggcgtgacgttttttcgggtcggcggtgatgacgttcggtatggcgtagtacggtacgttaacgaaggtgtagattagggttaggagaatgtaggttacgtaggcgtagatgattttgttttgtgcggagaagttcggcgtgtagaaggttagtacgtagacgatgtcgaacgggatggttttttatagtaggaacgggcggaattggtcgtgtcgcgtgcgggtgcggtttattagtagttttattagcgggtcggtgacggcgtcgagtacgcgggagattaaaaatagcgtgtttataattttcgtcgataggtcgaagacgtcggtgtagaaataggttagtaggaatatcgtggtttgttagacgtaagcgtaggcggtgttttttagttcgtagttaattttgttttttatggttaattgcgttattagaattatatttttatgtagtgt

SEQ ID NO: 36702 - DNA, 1194 bp, Artificial Sequence
  chemically treated genomic DNA (Homo sapiens) CpG-island No: 36702
  unsure (717, 861)
acactacataaaaatataattctaataacgcaattaaccataaaaaacaaaattaactacgaactaaaaaacaccgcctacgcttacgtctaacaaaccacgatattcctactaacctatttctacaccgacgtcttcgacctatcgacgaaaattataaacacgctatttttaatctcccgcgtactcgacgccgtcaccgacccgctaataaaactactaataaaccgcacccgcacgcgacacgaccaattccgcccgttcctactataaaaaaccatcccgttcgacatcgtctacgtactaaccttctacacgccgaacttctccgcacaaaacaaaatcatctacgcctacgtaacctacattctcctaaccctaatctacaccttcgttaacgtaccgtactacgccataccgaacgtcatcaccgccgacccgaaaaaacgtcacgccctacaatcctaacgcttcttcctaacgacgacgaactcgctcgctatcaacgacatcgcgctaccgctaactaaacatcatcgacaaaaaaaacgaacaaataaactacttcgacgccatatacgtactaaaactaaacaacgtaatactactctacgtctacatcttcacgaccaaaaaacgctacacctttaaaatacaacgaaactcgtcgataacgaaaaaccttaaactactactaaacaacaaccaatacgacantcatatacgcgttcaaaataataacgacctactccaacgtaatacgcgacgaaacgacgctctacttcgtaaaatacgtaataaatcacccgaaattaacgacccaatttttactttacgacaacctcgccaccatattcgacncgctttactcctcacgcctactaaaccgcttcgaccgcgtcaccgccttcaaataaatcatcgtcgcctactcgctaatcaacctactaattttcgtcaccccgacgaaacacatcgcgctcatttttaccctcaacatcctattcctattcgtctttaataccaccacgccgctacaataactaataacttctaacgtaataaactacgaaaaaaaccgcaaaatcgccgcctcgacgaactaatattctccacctacctattcaacctaaaaattaacctaacgattaacgaaacgataataaactaaatcctaacgtacgtcaactattc

SEQ ID NO: 36703 - DNA, 1194 bp, Artificial Sequence
  chemically treated genomic DNA (Homo sapiens) CpG-island No: 36703
  unsure (717, 861)
atattatataagggtgtaattttgatgacgtaattaattatgaaagataaaattggttacgggttgggagatatcgtttgcgtttacgtttggtaggttacgatgtttttgttggtttatttttatatcgacgttttcggtttgtcggcggggattatgggtacgttgtttttggtttttcgcgtgttcgacgtcgttatcgattcgttgatggggttgttggtagatcgtattcgtacgcggtacggttagtttcgttcgtttttgttgtggggggttatttcgttcggtatcgtttgcgtgttgattttttatacgtcggattttttcgtatagggtaagattatttacgtttgcgtgatttatatttttttgattttggtttatattttcgttaacgtgtcgtattgcgttatgtcgggcgttattatcgtcgattcgagagagcgttacgttttgtagttttggcgtttttttttggcggcggcgggttcgttcgttattagcggtatcgcgttgtcgttggttgagtattatcggtaaaggggacgagtaggtgggttatttcggcgttatgtgcgtgttggggttgagtagcgtggtgttgttttacgtttgtatttttacgattaaagagcgttatatttttgaggtgtagcggggttcgtcggtggcgaaagattttaagttgttgttgggtaatagttagtgcggtanttatgtgcgcgtttaagatgatggcgatttgttttaacgtggtgcgcggcggggcgacgttttatttcgtgaaatacgtgatggattattcggagttggcgatttagtttttattttacggtagtttcgttattatgttcggtncgttttgttttttacgtttgttgggtcgtttcgatcgcgttatcgtttttaagtggattatcgtcgtttattcgttgattagtttgttgattttcgttatttcggcggagtatatcgcgtttatttttgtttttaatattttgtttttgttcgtttttaatattattacgtcgttgtagtggttgatggtttttgacgtggtggattacgaggagagtcgtagggtcgtcgtttcgacgggttggtgttttttatttatttgtttagtttgaagattggtttggcgattggcggggcggtggtgggttggattttggcgtacgttaattattt

SEQ ID NO: 36704 - DNA, 1194 bp, Artificial Sequence
  chemically treated genomic DNA (Homo sapiens) CpG-island No: 36704
  unsure (334, 478)
aaataattaacgtacgccaaaatccaacccaccaccgccccgccaatcgccaaaccaatcttcaaactaaacaaataaataaaaaacaccaacccgtcgaaacgacgaccctacgactctcctcgtaatccaccacgtcaaaaaccatcaaccactacaacgacgtaataatattaaaaacgaacaaaaacaaaatattaaaaacaaaaataaacgcgatatactccgccgaaataacgaaaatcaacaaactaatcaacgaataaacgacgataatccacttaaaaacgataacgcgatcgaaacgacccaacaaacgtaaaaaacaaaacgnaccgaacataataacgaaactaccgtaaaataaaaactaaatcgccaactccgaataatccatcacgtatttcacgaaataaaacgtcgccccgccgcgcaccacgttaaaacaaatcgccatcatcttaaacgcgcacataantaccgcactaactattacccaacaacaacttaaaatctttcgccaccgacgaaccccgctacacctcaaaaatataacgctctttaatcgtaaaaatacaaacgtaaaacaacaccacgctactcaaccccaacacgcacataacgccgaaataacccacctactcgtcccctttaccgataatactcaaccaacgacaacgcgataccgctaataacgaacgaacccgccgccgccaaaaaaaaacgccaaaactacaaaacgtaacgctctctcgaatcgacgataataacgcccgacataacgcaatacgacacgttaacgaaaatataaaccaaaatcaaaaaaatataaatcacgcaaacgtaaataatcttaccctatacgaaaaaatccgacgtataaaaaatcaacacgcaaacgataccgaacgaaataaccccccacaacaaaaacgaacgaaactaaccgtaccgcgtacgaatacgatctaccaacaaccccatcaacgaatcgataacgacgtcgaacacgcgaaaaaccaaaaacaacgtacccataatccccgccgacaaaccgaaaacgtcgatataaaaataaaccaacaaaaacatcgtaacctaccaaacgtaaacgcaaacgatatctcccaacccgtaaccaattttatctttcataattaattacgtcatcaaaattacacccttatataatat

SEQ ID NO: 36705 - DNA, 934 bp, Artificial Sequence
  chemically treated genomic DNA (Homo sapiens) CpG-island No: 36705
  unsure (827, 878, 881, 888, 904, 914)
ttttacggttagaaaaagtgcgtagggggcgtttcgcgtcgggcgcgtatacggttagagtacggggttttttacgcgggttttgtttcggacgtagaggggtcgcgagcggagatatggacgcggtattttttacgttaggagtttttcgcgcgcgttttttttttatagttttcgtttcgtaggtcgagagaggatcgcggggatttgcgaggggttgggtcgtttaggaggttcgggtttgcgtttcgtttagttttcgcggacgtttttggcgagagacgcggttttgaaattagttgtggggtttcgtttaggttcgttttttggttgcgttatttaagtggatttcgcgtggtgaggcggggttagattcggtgattttcgaggggttagagatttgggcgggggcgggggttagtttttttttcgagagggcgtcgcggggatatagtttatcgtcgggagttagcgggataacggtttcgggtttgacgtcgtttattcgagggtgttcgaagttcgttgggattcgtttagagtttatgtatcgttttgggacgggatcgacgggagcggggggagcgaggagttcgttttgtcgtcggagtggagttcggagttagggggtttcgtcgttcgttcgttaagtcgtgcggtttcgttaatgaggaaatttggggggcggggttttcgtgttgtcgttttacgtatttgtggtcgatagatttttttacgagttattattttcgtttcgtatttggcggcgacgtttgaggtcgcggatatgcggtgggaagtagttcgttcggggcgtgtggaatganaggtgcgtcggcgtttttattttgtaacgtggggtcgtcgtaggtaagttngtngtttatnagaagggggatttttngtagaggttnagagtattgcgatggcgatt

SEQ ID NO: 36706 - DNA, 934 bp, Artificial Sequence
  chemically treated genomic DNA (Homo sapiens) CpG-island No: 36706
  unsure (21, 31, 47, 54, 57, 108)
aatcgccatcgcaatactctnaacctctacnaaaaatcccccttctnataaacnacnaacttacctacgacgaccccacgttacaaaataaaaacgccgacgcacctntcattccacacgccccgaacgaactacttcccaccgcatatccgcgacctcaaacgtcgccgccaaatacgaaacgaaaataataactcgtaaaaaaatctatcgaccacaaatacgtaaaacgacaacacgaaaaccccgccccccaaatttcctcattaacgaaaccgcacgacttaacgaacgaacgacgaaaccccctaactccgaactccactccgacgacaaaacgaactcctcgctccccccgctcccgtcgatcccgtcccaaaacgatacataaactctaaacgaatcccaacgaacttcgaacaccctcgaataaacgacgtcaaacccgaaaccgttatcccgctaactcccgacgataaactatatccccgcgacgccctctcgaaaaaaaaactaacccccgcccccgcccaaatctctaacccctcgaaaatcaccgaatctaaccccgcctcaccacgcgaaatccacttaaataacgcaaccaaaaaacgaacctaaacgaaaccccacaactaatttcaaaaccgcgtctctcgccaaaaacgtccgcgaaaactaaacgaaacgcaaacccgaacctcctaaacgacccaacccctcgcaaatccccgcgatcctctctcgacctacgaaacgaaaactataaaaaaaaaacgcgcgcgaaaaactcctaacgtaaaaaataccgcgtccatatctccgctcgcgacccctctacgtccgaaacaaaacccgcgtaaaaaaccccgtactctaaccgtatacgcgcccgacgcgaaacgccccctacgcactttttctaaccgtaaaa

SEQ ID NO: 36707 - DNA, 934 bp, Artificial Sequence
  chemically treated genomic DNA (Homo sapiens) CpG-island No: 36707
  unsure (21, 31, 47, 54, 57, 108)
agtcgttatcgtagtgttttngatttttatngaggattttttttttnataggtngtnggtttgtttgcggcgattttacgttgtagggtaggggcgtcggcgtatttnttattttatacgtttcgggcgggttgttttttatcgtatattcgcgattttagacgtcgtcgttaaatgcggggcggggatggtgattcgtggaaagatttgtcggttataggtacgtgggacggtagtacggggatttcgttttttaagtttttttattagcgaggtcgtacggtttggcgggcggacggcgggattttttggtttcgggttttatttcgacggtaggacgggtttttcgtttttttcgttttcgtcggtttcgttttagggcggtgtatgggttttgagcgggttttagcgggtttcgggtattttcgggtgggcggcgttaggttcgaggtcgttgtttcgttggttttcggcggtgggttgtgttttcgcggcgttttttcgggaggaggattggttttcgttttcgtttaggtttttaatttttcggaggttatcgggtttggtttcgttttattacgcggggtttatttggatggcgtagttagaggacgggtttgggcgaaattttatagttgattttagaatcgcgtttttcgttaaaggcgttcgcgggggttgagcggggcgtagattcgagttttttggacggtttagtttttcgtaggttttcgcggttttttttcggtttgcggggcggggattgtggaaggggagcgcgcgcggggagtttttggcgtgagaaatgtcgcgtttatgttttcgttcgcggtttttttgcgttcgagataaaattcgcgtggggagtttcgtgttttggtcgtgtgcgcgttcgacgcgggacgttttttgcgtattttttttggtcgtagag

SEQ ID NO: 36708 - DNA, 934 bp, Artificial Sequence
  chemically treated genomic DNA (Homo sapiens) CpG-island No: 36708
  unsure (827, 878, 881, 888, 904, 914)
ctctacgaccaaaaaaaatacgcaaaaaacgtcccgcgtcgaacgcgcacacgaccaaaacacgaaactccccacgcgaattttatctcgaacgcaaaaaaaccgcgaacgaaaacataaacgcgacatttctcacgccaaaaactccccgcgcgcgctccccttccacaatccccgccccgcaaaccgaaaaaaaaccgcgaaaacctacgaaaaactaaaccgtccaaaaaactcgaatctacgccccgctcaacccccgcgaacgcctttaacgaaaaacgcgattctaaaatcaactataaaatttcgcccaaacccgtcctctaactacgccatccaaataaaccccgcgtaataaaacgaaaccaaacccgataacctccgaaaaattaaaaacctaaacgaaaacgaaaaccaatcctcctcccgaaaaaacgccgcgaaaacacaacccaccgccgaaaaccaacgaaacaacgacctcgaacctaacgccgcccacccgaaaatacccgaaacccgctaaaacccgctcaaaacccatacaccgccctaaaacgaaaccgacgaaaacgaaaaaaacgaaaaacccgtcctaccgtcgaaataaaacccgaaaccaaaaaatcccgccgtccgcccgccaaaccgtacgacctcgctaataaaaaaacttaaaaaacgaaatccccgtactaccgtcccacgtacctataaccgacaaatctttccacgaatcaccatccccgccccgcatttaacgacgacgtctaaaatcgcgaatatacgataaaaaacaacccgcccgaaacgtataaaataanaaatacgccgacgcccctaccctacaacgtaaaatcgccgcaaacaaaccnacnacctatnaaaaaaaaaatcctcnataaaaatcnaaaacactacgataacgact

SEQ ID NO: 36709 - DNA, 601 bp, Artificial Sequence
  chemically treated genomic DNA (Homo sapiens) CpG-island No: 36709
  unsure (39..)
ttttcggcgtttaagttggttttgcgttttcgggaggtnnggcggagaggggcgtacgcgggtgggttcgtcggcgtggatggggtcgggttggtatggcgtatattaaaggtcgttcgtgtaatgtatgcgcgttttttttaattaacggtattttttgttttttcgtttttttttattcgtttcgtttttttcgcgttagttcgggttgtttgagcgcggggacgagttttttttcgcgcgttcgttcgtgcgagtgcgcgcgtgcgcgtgcgcgtgcgaagggttttaggggcgtttcggatttgtttaggggaggttgcgagggtcgtcgggtttcgaggtttcgtcgaggtcgagtttcgggcgcgttttggggagagcgaggtttaagggtgcggcgggtggaacgtagggaggattttagtttttgttttttcgaacgttttttgtgttcgtatttataggtttcgattttggttttaaggcgcggttgttgcgggattttacgtgtagggaggggcgttcgggtatttttattttatacgtcggcgcgggttgttttatcgtatatcggcgattttagacgtcgcgcgttaaa

SEQ ID NO: 36710 - DNA, 601 bp, Artificial Sequence
  chemically treated genomic DNA (Homo sapiens) CpG-island No: 36710
  unsure (562..)
tttaacgcgcgacgtctaaaatcgccgatatacgataaaacaacccgcgccgacgtataaaataaaaatacccgaacgcccctccctacacgtaaaatcccgcaacaaccgcgccttaaaaccaaaatcgaaacctataaatacgaacacaaaaaacgttcgaaaaaacaaaaactaaaatcctccctacgttccacccgccgcacccttaaacctcgctctccccaaaacgcgcccgaaactcgacctcgacgaaacctcgaaacccgacgaccctcgcaacctcccctaaacaaatccgaaacgcccctaaaacccttcgcacgcgcacgcgcacgcgcgcactcgcacgaacgaacgcgcgaaaaaaaactcgtccccgcgctcaaacaacccgaactaacgcgaaaaaaacgaaacgaataaaaaaaaacgaaaaaacaaaaaataccgttaattaaaaaaaacgcgcatacattacacgaacgacctttaatatacgccataccaacccgaccccatccacgccgacgaacccacccgcgtacgcccctctccgccnnacctcccgaaaacgcaaaaccaacttaaacgccgaaaa

SEQ ID NO: 36711 - DNA, 601 bp, Artificial Sequence
  chemically treated genomic DNA (Homo sapiens) CpG-island No: 36711
  unsure (562..)
tttggcgcgcgacgtttgaggtcgtcgatatgcggtgggatagttcgcgtcggcgtgtggaatgagggtgttcgggcgtttttttttgtacgtggggtttcgtagtagtcgcgttttaaggttagagtcgaagtttgtgggtgcggatatagggaacgttcgaggagatagaaattggggttttttttgcgttttattcgtcgtatttttaagtttcgttttttttaaaacgcgttcgaaattcggtttcgacggggtttcggggttcggcgattttcgtagttttttttgggtaaattcggagcgtttttgggatttttcgtacgcgtacgcgtacgcgcgtattcgtacggacgggcgcgcgggaaaaggttcgttttcgcgtttaagtagttcggattggcgcggggggggcggggcggatgaagggaagcgagggggtaggaaatgtcgttaattgagggaaacgcgtatgtattgtacgggcggtttttgatgtgcgttatgttagttcggttttatttacgtcggcgagtttattcgcgtgcgttttttttcgttnngtttttcgggagcgtagggttagtttgagcgtcgagga

SEQ ID NO: 36712 - DNA, 601 bp, Artificial Sequence
  chemically treated genomic DNA (Homo sapiens) CpG-island No: 36712
  unsure (39..)
tcctcgacgctcaaactaaccctacgctcccgaaaaacnnaacgaaaaaaaacgcacgcgaataaactcgccgacgtaaataaaaccgaactaacataacgcacatcaaaaaccgcccgtacaatacatacgcgtttccctcaattaacgacatttcctaccccctcgcttcccttcatccgccccgccccccccgcgccaatccgaactacttaaacgcgaaaacgaaccttttcccgcgcgcccgtccgtacgaatacgcgcgtacgcgtacgcgtacgaaaaatcccaaaaacgctccgaatttacccaaaaaaaactacgaaaatcgccgaaccccgaaaccccgtcgaaaccgaatttcgaacgcgttttaaaaaaaacgaaacttaaaaatacgacgaataaaacgcaaaaaaaaccccaatttctatctcctcgaacgttccctatatccgcacccacaaacttcgactctaaccttaaaacgcgactactacgaaaccccacgtacaaaaaaaaacgcccgaacaccctcattccacacgccgacgcgaactatcccaccgcatatcgacgacctcaaacgtcgcgcgccaaa

SEQ ID NO: 36713 - DNA, 1405 bp, Artificial Sequence
  chemically treated genomic DNA (Homo sapiens) CpG-island No: 36713
  unsure (1350..1351, 1366, 1381, 1388)
ggggcggcggttgggttgttcggtttttcggttttgagcgggattttttggggttttttcggggcgtttaggttcggggatttggagcggaagtttttattattgttgggggtcggcgatagggtttgcgaggacgaggattcggatagggcggggttgtcgcgttgcggttttttaggtcgtttacggtcgacgaggagtcgttgtttaggcggttatttttttcggattcgttttttacggatttgaggtcggttagttgttggtagtttatgatcgagtcgattatttttatttggttttttagggcggtaatgttggagatgatcgagggcggggagggcgggtaggatttcgcgtaggataggagtggtttggtcgggtcggtggtcgcgttttttagtttagcgtcgttttttatggagttttcgtttatgtcgttatcgtagttgtttagggttttcgcgtttttgtcgtcgtaggttagttcggagtttatggtattttggaagtttttcggtagcggcgtgttggggatttggtcgtttatgtgtatgcggatgtgttgttgtaggattacggcgttggtgaattttttttggtagatggggtaggagtgttgtacgcgtaggggcggttttgtacggtgtacgtcgaagtgcgttttgaggttgtttttggtggtgaaggcgcggtcgtagattttgtatttgaacggtcgttttttcgtgtgcgttcggtagtgtatttttagcgcgttttggtagtttagtattcggtggtagatgacgtattggttcgggttcgttatttttttgtcgatgttttttattagttgttgtagtttcgaggttttcgacgtttgtatcgagtttagtagtttttcgaacggaaattgggttttgaattgttcggagacggcgggtagtcggggttgtcgaggttcgtgggtgcgtcgtttatcgatgtgggtgtacgttagtttgcgcgtttacgggagcgttttcggttttggcgttggtgtagggtaggttgacgggttcggttttagtgaggggcggtcgcgaggagcgagtgtggggattcggcggtggtagtacgtcggagtggaggtggttgagggcgggggagaaggaggcgtattcgcgtggaggcggcgaggtcgtttgcggggagcggttggttggggtggcgcggggagagtgggcgtattggcgcggcgagggatagtgggcggtagtgtgtagcgtacggacgtgcgagcggtggagtagtacggggtgggttgtgcgaggtaggtggtgacgggtttttcggggggggagggatatgtcgttagggagtgtcganngtaggtgggacgttngtgtaggtattcggnggacggngtgaaggggttatttgg

SEQ ID NO: 36714 - DNA, 1405 bp, Artificial Sequence
  chemically treated genomic DNA (Homo sapiens) CpG-island No: 36714
  unsure (18, 25, 40, 55..)
ccaaataaccccttcacnccgtccnccgaatacctacacnaacgtcccacctacnntcgacactccctaacgacatatccctccccccccgaaaaacccgtcaccacctacctcgcacaacccaccccgtactactccaccgctcgcacgtccgtacgctacacactaccgcccactatccctcgccgcgccaatacgcccactctccccgcgccaccccaaccaaccgctccccgcaaacgacctcgccgcctccacgcgaatacgcctccttctcccccgccctcaaccacctccactccgacgtactaccaccgccgaatccccacactcgctcctcgcgaccgcccctcactaaaaccgaacccgtcaacctaccctacaccaacgccaaaaccgaaaacgctcccgtaaacgcgcaaactaacgtacacccacatcgataaacgacgcacccacgaacctcgacaaccccgactacccgccgtctccgaacaattcaaaacccaatttccgttcgaaaaactactaaactcgatacaaacgtcgaaaacctcgaaactacaacaactaataaaaaacatcgacaaaaaaataacgaacccgaaccaatacgtcatctaccaccgaatactaaactaccaaaacgcgctaaaaatacactaccgaacgcacacgaaaaaacgaccgttcaaatacaaaatctacgaccgcgccttcaccaccaaaaacaacctcaaaacgcacttcgacgtacaccgtacaaaaccgcccctacgcgtacaacactcctaccccatctaccaaaaaaaattcaccaacgccgtaatcctacaacaacacatccgcatacacataaacgaccaaatccccaacacgccgctaccgaaaaacttccaaaataccataaactccgaactaacctacgacgacaaaaacgcgaaaaccctaaacaactacgataacgacataaacgaaaactccataaaaaacgacgctaaactaaaaaacgcgaccaccgacccgaccaaaccactcctatcctacgcgaaatcctacccgccctccccgccctcgatcatctccaacattaccgccctaaaaaaccaaataaaaataatcgactcgatcataaactaccaacaactaaccgacctcaaatccgtaaaaaacgaatccgaaaaaaataaccgcctaaacaacgactcctcgtcgaccgtaaacgacctaaaaaaccgcaacgcgacaaccccgccctatccgaatcctcgtcctcgcaaaccctatcgccgacccccaacaataataaaaacttccgctccaaatccccgaacctaaacgccccgaaaaaaccccaaaaaatcccgctcaaaaccgaaaaaccgaacaacccaaccgccgcccc

SEQ ID NO: 36715 - DNA, 1405 bp, Artificial Sequence
  chemically treated genomic DNA (Homo sapiens) CpG-island No: 36715
  unsure (18, 25, 40, 55..)
ttagatgatttttttatntcgtttntcgagtatttgtatnaacgttttatttgtnntcggtattttttagcggtatgttttttttttttcgagaagttcgttattatttgtttcgtatagtttatttcgtgttgttttatcgttcgtacgttcgtgcgttgtatattgtcgtttattgtttttcgtcgcgttagtacgtttatttttttcgcgttattttagttagtcgtttttcgtagacgatttcgtcgtttttacgcgagtgcgtttttttttttttcgtttttaattatttttatttcggcgtgttgttatcgtcgagtttttatattcgtttttcgcggtcgttttttattaaagtcgagttcgttagtttgttttgtattaacgttagggtcggggacgttttcgtgggcgcgtaggttagcgtgtatttatatcggtggacggcgtatttacgagtttcggtagtttcggttgttcgtcgttttcgagtagtttaaggtttagttttcgttcggggggttgttagattcgatgtaaacgtcggaaatttcgaagttgtagtagttggtggagaatatcgataagaagatgacggattcgaattagtgcgttatttgttatcgggtgttgagttgttagagcgcgttgaagatgtattatcggacgtatacgggggagcggtcgtttaagtgtaagatttgcggtcgcgtttttattattaagggtaattttaagacgtatttcggcgtgtatcgtgtaaagtcgtttttgcgcgtgtagtatttttgttttatttgttagaagaagtttattaacgtcgtggttttgtagtagtatattcgtatgtatatgggcggttagatttttaatacgtcgttgtcggagggtttttaggatgttatggatttcgagttggtttacgacgataagaacgcggagattttgagtagttacgatgacgatatggacgagaattttatggaggacgacgttgagttgaaggacgcggttatcgattcggttaagttatttttgttttacgcggggttttgttcgtttttttcgttttcggttatttttagtattgtcgttttggagaattagatgaagatgatcgattcggttatgagttgttagtagttgatcggttttaagttcgtggagaacgggttcggggagagtgatcgtttgagtaacgatttttcgtcggtcgtgggcgatttggagagtcgtagcgcggtagtttcgttttgttcgagttttcgttttcgtaggttttgtcgtcggtttttagtaatggtgagagttttcgttttaagttttcgggtttgggcgtttcggaggagttttaggaaatttcgtttaagatcgagaggtcggatagtttagtcgtcgtttt

SEQ ID NO: 36716 - DNA, 1405 bp, Artificial Sequence
  chemically treated genomic DNA (Homo sapiens) CpG-island No: 36716
  unsure (1350..1351, 1366, 1381, 1388)
aaaacgacgactaaactatccgacctctcgatcttaaacgaaatttcctaaaactcctccgaaacgcccaaacccgaaaacttaaaacgaaaactctcaccattactaaaaaccgacgacaaaacctacgaaaacgaaaactcgaacaaaacgaaactaccgcgctacgactctccaaatcgcccacgaccgacgaaaaatcgttactcaaacgatcactctccccgaacccgttctccacgaacttaaaaccgatcaactactaacaactcataaccgaatcgatcatcttcatctaattctccaaaacgacaatactaaaaataaccgaaaacgaaaaaaacgaacaaaaccccgcgtaaaacaaaaataacttaaccgaatcgataaccgcgtccttcaactcaacgtcgtcctccataaaattctcgtccatatcgtcatcgtaactactcaaaatctccgcgttcttatcgtcgtaaaccaactcgaaatccataacatcctaaaaaccctccgacaacgacgtattaaaaatctaaccgcccatatacatacgaatatactactacaaaaccacgacgttaataaacttcttctaacaaataaaacaaaaatactacacgcgcaaaaacgactttacacgatacacgccgaaatacgtcttaaaattacccttaataataaaaacgcgaccgcaaatcttacacttaaacgaccgctcccccgtatacgtccgataatacatcttcaacgcgctctaacaactcaacacccgataacaaataacgcactaattcgaatccgtcatcttcttatcgatattctccaccaactactacaacttcgaaatttccgacgtttacatcgaatctaacaaccccccgaacgaaaactaaaccttaaactactcgaaaacgacgaacaaccgaaactaccgaaactcgtaaatacgccgtccaccgatataaatacacgctaacctacgcgcccacgaaaacgtccccgaccctaacgttaatacaaaacaaactaacgaactcgactttaataaaaaacgaccgcgaaaaacgaatataaaaactcgacgataacaacacgccgaaataaaaataattaaaaacgaaaaaaaaaaaaacgcactcgcgtaaaaacgacgaaatcgtctacgaaaaacgactaactaaaataacgcgaaaaaaataaacgtactaacgcgacgaaaaacaataaacgacaatatacaacgcacgaacgtacgaacgataaaacaacacgaaataaactatacgaaacaaataataacgaacttctcgaaaaaaaaaaaacataccgctaaaaaataccgannacaaataaaacgttnatacaaatactcganaaacganataaaaaaatcatctaa

SEQ ID NO: 36717 - DNA, 538 bp, Artificial Sequence
  chemically treated genomic DNA (Homo sapiens) CpG-island No: 36717
ataaacggttcggtcgggggggggcgttgcgatatagggggaggggtcggattaatagcgttttttcgtgtggttgcgttagcgtttgattttcgcggggagtcgcgtttattcgttcggttagtaagtcggttatcgttttttttaattttttataattaataaatttatcgtcgttttttttatcgcgcgcgcgttttttttgatttttgcgtagtcgttatcgggaaaaggcggggggaggggggaataggttttgcgcgaggtttattaggtcgcgttagagttagggtttcgcgtgaatgatcggtttggtatagtgaggtggtaggcgtttacgcgggattacgcgagatcgcggttcgtgattaggattcgagtcggttaagaagaagataaaagtggaaattgtagttatagtcgggggcgtaagggaaatttttaggtttatttgtaggcgcgaggcgattgaggggaaaaggggagcgggcgggaaggggaagggcgggaggtcgggggcggaataataggggcgggt

SEQ ID NO: 36718 - DNA, 538 bp, Artificial Sequence
  chemically treated genomic DNA (Homo sapiens) CpG-island No: 36718
acccgcccctattattccgcccccgacctcccgcccttccccttcccgcccgctccccttttcccctcaatcgcctcgcgcctacaaataaacctaaaaatttcccttacgcccccgactataactacaatttccacttttatcttcttcttaaccgactcgaatcctaatcacgaaccgcgatctcgcgtaatcccgcgtaaacgcctaccacctcactataccaaaccgatcattcacgcgaaaccctaactctaacgcgacctaataaacctcgcgcaaaacctattcccccctccccccgccttttcccgataacgactacgcaaaaatcaaaaaaaacgcgcgcgcgataaaaaaaacgacgataaatttattaattataaaaaattaaaaaaaacgataaccgacttactaaccgaacgaataaacgcgactccccgcgaaaatcaaacgctaacgcaaccacacgaaaaaacgctattaatccgacccctccccctatatcgcaacgcccccccccgaccgaaccgtttat

SEQ ID NO: 36719 - DNA, 538 bp, Artificial Sequence
  chemically treated genomic DNA (Homo sapiens) CpG-island No: 36719
gttcgtttttattgtttcgttttcggtttttcgtttttttttttttcgttcgttttttttttttttttagtcgtttcgcgtttgtaggtaagtttaaaaattttttttgcgttttcggttatggttataatttttatttttgttttttttttagtcggttcgggttttagttacgagtcgcggtttcgcgtagtttcgcgtgagcgtttattattttattgtgttaggtcggttatttacgcgaggttttggttttggcgcggtttagtaggtttcgcgtaaggtttattttttttttttttcgttttttttcggtggcggttgcgtaggagttagggagggcgcgcgcgcggtagggggggcggcggtggatttgttggttgtggggggttgggggaggcgatggtcggtttgttggtcgggcgggtgagcgcggtttttcgcgggggttaggcgttggcgtagttatacggggaggcgttattagttcggtttttttttttgtatcgtagcgttttttttcgatcgaatcgtttat

SEQ ID NO: 36720 - DNA, 538 bp, Artificial Sequence
  chemically treated genomic DNA (Homo sapiens) CpG-island No: 36720
ataaacgattcgatcgaaaaaaaacgctacgatacaaaaaaaaaaaccgaactaataacgcctccccgtataactacgccaacgcctaacccccgcgaaaaaccgcgctcacccgcccgaccaacaaaccgaccatcgcctcccccaaccccccacaaccaacaaatccaccgccgccccccctaccgcgcgcgcgccctccctaactcctacgcaaccgccaccgaaaaaaaacgaaaaaaaaaaaaaataaaccttacgcgaaacctactaaaccgcgccaaaaccaaaacctcgcgtaaataaccgacctaacacaataaaataataaacgctcacgcgaaactacgcgaaaccgcgactcgtaactaaaacccgaaccgactaaaaaaaaaacaaaaataaaaattataaccataaccgaaaacgcaaaaaaaatttttaaacttacctacaaacgcgaaacgactaaaaaaaaaaaaaaaacgaacgaaaaaaaaaaaaacgaaaaaccgaaaacgaaacaataaaaacgaac

SEQ ID NO: 36721 - DNA, 705 bp, Artificial Sequence
  chemically treated genomic DNA (Homo sapiens) CpG-island No: 36721
ttttcgtacggttttacgtttttcgttttgaaggaatcggtacgagacggtttatttaggtagttcgtagttcgtggtagtgtcggagttttgtttttttttatttattttttttttcgttttcgcgggcgttatcgtgattgtagtttttacgcgttttaatatatagtcgacgagttagggtcggggttaagttcggagtcgcggtcggtagggttcgtcgcggggtacgttgggatatggagtttttcgtttattttatttcgtgagtttttatttggaggggagttattcgttttataattttttgcgtgcgtggttcgttcgggtaggttgtatcgttttttgggaggagcgggtttttcgtcgtcgtttttcgagaaggtcgtatttttttgtttgtaatatcgtttcgttttttttttttcgcgttttttttttttcggttcgtgaagttgtggatatgcgtattagcggaggggaagtcgttgggtagggaggcggtaaggatttatttgggtacggagttttttggatcgcgagaaaattatagaatttaagagttcgcgcgttatttgtgtcgtagttggagaggtagggttaagtacgtacgagaagttttatggcgttattggttatttttattgcgattattttttttaggtgtattgagattggttatttcgattaaaggggcggagataa

SEQ ID NO: 36722 - DNA, 705 bp, Artificial Sequence
  chemically treated genomic DNA (Homo sapiens) CpG-island No: 36722
ttatctccgcccctttaatcgaaataaccaatctcaatacacctaaaaaaaataatcgcaataaaaataaccaataacgccataaaacttctcgtacgtacttaaccctacctctccaactacgacacaaataacgcgcgaactcttaaattctataattttctcgcgatccaaaaaactccgtacccaaataaatccttaccgcctccctacccaacgacttcccctccgctaatacgcatatccacaacttcacgaaccgaaaaaaaaaaaacgcgaaaaaaaaaaaacgaaacgatattacaaacaaaaaaatacgaccttctcgaaaaacgacgacgaaaaacccgctcctcccaaaaaacgatacaacctacccgaacgaaccacgcacgcaaaaaattataaaacgaataactcccctccaaataaaaactcacgaaataaaataaacgaaaaactccatatcccaacgtaccccgcgacgaaccctaccgaccgcgactccgaacttaaccccgaccctaactcgtcgactatatattaaaacgcgtaaaaactacaatcacgataacgcccgcgaaaacgaaaaaaaaaataaataaaaaaaaacaaaactccgacactaccacgaactacgaactacctaaataaaccgtctcgtaccgattccttcaaaacgaaaaacgtaaaaccgtacgaaaa

SEQ ID NO: 36723 - DNA, 705 bp, Artificial Sequence
  chemically treated genomic DNA (Homo sapiens) CpG-island No: 36723
ttgttttcgtttttttagtcgaagtaattaattttagtgtatttaggggaagtaatcgtaatgggagtaattaatgacgttatgaagtttttcgtgcgtgtttgattttgtttttttagttgcgatatagatggcgcgcgggtttttgggttttgtagttttttcgcgatttaaaaggtttcgtgtttaagtgagtttttatcgtttttttatttagcggtttttttttcgttagtacgtatgtttatagttttacggatcgggagagagggggcgcggaaggaaggaggcgggacggtattataaataaaaaaatacggttttttcgagaagcgacggcggagggttcgttttttttagaaggcggtgtagtttgttcgggcgagttacgtacgtagagggttgtggggcggatagtttttttttagatggaggtttacgaagtagggtgggcgggggattttatattttagcgtgtttcgcggcgggttttatcggtcgcgatttcgggtttggtttcggttttagttcgtcggttgtgtattggggcgcgtggaggttgtagttacggtggcgttcgcggggacggaggagggaatgagtgaagaggagtaaggtttcggtattattacgggttgcgggttgtttaggtgagtcgtttcgtatcgatttttttagggcgaaaagcgtggggtcgtgcggagg

SEQ ID NO: 36724 - DNA, 705 bp, Artificial Sequence
  chemically treated genomic DNA (Homo sapiens) CpG-island No: 36724
cctccgcacgaccccacgcttttcgccctaaaaaaatcgatacgaaacgactcacctaaacaacccgcaacccgtaataataccgaaaccttactcctcttcactcattccctcctccgtccccgcgaacgccaccgtaactacaacctccacgcgccccaatacacaaccgacgaactaaaaccgaaaccaaacccgaaatcgcgaccgataaaacccgccgcgaaacacgctaaaatataaaatcccccgcccaccctacttcgtaaacctccatctaaaaaaaaactatccgccccacaaccctctacgtacgtaactcgcccgaacaaactacaccgccttctaaaaaaaacgaaccctccgccgtcgcttctcgaaaaaaccgtatttttttatttataataccgtcccgcctccttccttccgcgccccctctctcccgatccgtaaaactataaacatacgtactaacgaaaaaaaaaccgctaaataaaaaaacgataaaaactcacttaaacacgaaaccttttaaatcgcgaaaaaactacaaaacccaaaaacccgcgcgccatctatatcgcaactaaaaaaacaaaatcaaacacgcacgaaaaacttcataacgtcattaattactcccattacgattacttcccctaaatacactaaaattaattacttcgactaaaaaaacgaaaacaa

SEQ ID NO: 36725 - DNA, 775 bp, Artificial Sequence
  chemically treated genomic DNA (Homo sapiens) CpG-island No: 36725
gtaattcgtcgtttgttagtagtcgttgtttcgttggtgtttacgttgttaaaggagtcgttttaggtttttgggaggtcgtttgtattgcgtggggaaggtttggacgacgtaatcgtttcgtcggttttcggggtggttagcgttttcggggtcgaagggtgcgcggggttgaaagtaggtcgtttcgtttcgttttttttttagattagtagaggtagtagtcggagtaatcgtagtttgggttttttttcgttcggtcgggtttcggatagatagatcggtatttcgagggtaaaaaatttcgttcgggaaagtttagcgtaaaacgcgttatattagtcgacggcgtagaagatttacgagaagatacgacgattaaaattttcgtcgatcgtaaagtacgtacgtcgcgatatattaattaatcgtatgtataggatcgaaacgaaattatcggtaggcgttaagagtttcgagatttacgttagcgatagtcgttcgtaaatatattttatagttttatatcgagataattatcgttttaacgaaagtacgagaagcgattatcgtagagatagtagcgacgttttatattcgatatatattacgcgaagacgttcgattgtgattatatatcgtaacgatagacgatcgatagcgtagatcgtattaaaagagttattttatcgattagttcgtcgttaagatttagtaacgcgatatattatacgaagcgtacgacgtacgtacgattatatatagatcgcgtcgt

SEQ ID NO: 36726 - DNA, 775 bp, Artificial Sequence
  chemically treated genomic DNA (Homo sapiens) CpG-island No: 36726
acgacgcgatctatatataatcgtacgtacgtcgtacgcttcgtataatatatcgcgttactaaatcttaacgacgaactaatcgataaaataactcttttaatacgatctacgctatcgatcgtctatcgttacgatatataatcacaatcgaacgtcttcgcgtaatatatatcgaatataaaacgtcgctactatctctacgataatcgcttctcgtactttcgttaaaacgataattatctcgatataaaactataaaatatatttacgaacgactatcgctaacgtaaatctcgaaactcttaacgcctaccgataatttcgtttcgatcctatacatacgattaattaatatatcgcgacgtacgtactttacgatcgacgaaaattttaatcgtcgtatcttctcgtaaatcttctacgccgtcgactaatataacgcgttttacgctaaactttcccgaacgaaattttttaccctcgaaataccgatctatctatccgaaacccgaccgaacgaaaaaaaacccaaactacgattactccgactactacctctactaatctaaaaaaaaaacgaaacgaaacgacctactttcaaccccgcgcacccttcgaccccgaaaacgctaaccaccccgaaaaccgacgaaacgattacgtcgtccaaaccttccccacgcaatacaaacgacctcccaaaaacctaaaacgactcctttaacaacgtaaacaccaacgaaacaacgactactaacaaacgacgaattac

SEQ ID NO: 36727 - DNA, 775 bp, Artificial Sequence
  chemically treated genomic DNA (Homo sapiens) CpG-island No: 36727
gcggcgcggtttgtgtgtggtcgtgcgtgcgtcgtgcgtttcgtgtggtgtgtcgcgttgttgggttttggcggcgggttggtcggtggagtggtttttttggtgcggtttacgttgtcgatcgtttgtcgttgcggtgtgtggttatagtcgggcgttttcgcgtagtgtgtgtcgggtgtagggcgtcgttgttgtttttgcggtggtcgtttttcgtgttttcgttgaggcggtggttgtttcgatgtgaggttgtggggtgtgtttgcgggcggttgtcgttggcgtgggtttcggggtttttggcgtttgtcggtggtttcgtttcggttttgtgtatgcggttggttggtgtgtcgcggcgtgcgtgttttgcggtcggcgggggttttggtcgtcgtgttttttcgtgggttttttgcgtcgtcggttagtgtggcgcgttttgcgttaggttttttcgggcggggttttttgttttcggagtgtcggtttgtttgttcggagttcggtcgggcgggagagggtttaggttgcggttgtttcggttgttgtttttgttggtttgggagggggacggggcggagcggtttgtttttaatttcgcgtatttttcgatttcggaagcgttaattatttcgggggtcggcgaggcgattgcgtcgtttaagttttttttacgtaatgtagacggttttttaaaagtttagagcggtttttttgatagcgtaggtattagcgagataacggttgttagtaagcgacgaattgt

SEQ ID NO: 36728 - DNA, 775 bp, Artificial Sequence
  chemically treated genomic DNA (Homo sapiens) CpG-island No: 36728
acaattcgtcgcttactaacaaccgttatctcgctaatacctacgctatcaaaaaaaccgctctaaacttttaaaaaaccgtctacattacgtaaaaaaaacttaaacgacgcaatcgcctcgccgacccccgaaataattaacgcttccgaaatcgaaaaatacgcgaaattaaaaacaaaccgctccgccccgtccccctcccaaaccaacaaaaacaacaaccgaaacaaccgcaacctaaaccctctcccgcccgaccgaactccgaacaaacaaaccgacactccgaaaacaaaaaaccccgcccgaaaaaacctaacgcaaaacgcgccacactaaccgacgacgcaaaaaacccacgaaaaaacacgacgaccaaaacccccgccgaccgcaaaacacgcacgccgcgacacaccaaccaaccgcatacacaaaaccgaaacgaaaccaccgacaaacgccaaaaaccccgaaacccacgccaacgacaaccgcccgcaaacacaccccacaacctcacatcgaaacaaccaccgcctcaacgaaaacacgaaaaacgaccaccgcaaaaacaacaacgacgccctacacccgacacacactacgcgaaaacgcccgactataaccacacaccgcaacgacaaacgatcgacaacgtaaaccgcaccaaaaaaaccactccaccgaccaacccgccgccaaaacccaacaacgcgacacaccacacgaaacgcacgacgcacgcacgaccacacacaaaccgcgccgc

SEQ ID NO: 36729 - DNA, 556 bp, Artificial Sequence
  chemically treated genomic DNA (Homo sapiens) CpG-island No: 36729
gataagcggtcgtcgttagggggcgtcgttatttttttgttaggcgattattcgcggaggcgcgcgcgttaggttttttatcgcgtttgcgttgaggatggatattagttcgttttttttcgacgtttagtcgttcgggtcggggtgaaaaattgcgtgatacgtagtgagcgtggcggttattttcgttttttgggtacgttagttgagtcggttagggttgaagaggagcgttgcgtaagcgtatttaagacggttataggtaatttttatttgacgagcgaggcgtcgtcgtcgtcgtcggaagtttggtgtttgcgtcgcgggggaggcggcggtcgtagtagaagtagttgagtgttttttgatattcggatgtgaggcgattcgttggcgttagtttgatttttcgttaggtaaaaggaaggtacgcgagcgtttttgacggttttcgtcgtttgtgtttttattttttttttgttagtttttttagggagcggatagttttttttttttttgttttattttcggtggcgtgttgtttcgtacgtttttt

SEQ ID NO: 36730 - DNA, 556 bp, Artificial Sequence
  chemically treated genomic DNA (Homo sapiens) CpG-island No: 36730
aaaaaacgtacgaaacaacacgccaccgaaaataaaacaaaaaaaaaaaaaactatccgctccctaaaaaaactaacaaaaaaaaaataaaaacacaaacgacgaaaaccgtcaaaaacgctcgcgtaccttccttttacctaacgaaaaatcaaactaacgccaacgaatcgcctcacatccgaatatcaaaaaacactcaactacttctactacgaccgccgcctcccccgcgacgcaaacaccaaacttccgacgacgacgacgacgcctcgctcgtcaaataaaaattacctataaccgtcttaaatacgcttacgcaacgctcctcttcaaccctaaccgactcaactaacgtacccaaaaaacgaaaataaccgccacgctcactacgtatcacgcaatttttcaccccgacccgaacgactaaacgtcgaaaaaaaacgaactaatatccatcctcaacgcaaacgcgataaaaaacctaacgcgcgcgcctccgcgaataatcgcctaacaaaaaaataacgacgccccctaacgacgaccgcttatc

SEQ ID NO: 36731 - DNA, 556 bp, Artificial Sequence
  chemically treated genomic DNA (Homo sapiens) CpG-island No: 36731
aaggggcgtgcgaggtaatacgttatcgagggtggaataggaagagggagaattgttcgttttttgaaggggttggtaaaagagaggtgaagatataggcggcggggatcgttagggacgttcgcgtattttttttttgtttggcggagggttagattagcgttagcggatcgttttatattcgggtattaggagatatttagttgtttttgttgcggtcgtcgtttttttcgcggcgtaaatattaaattttcggcgacgacggcgacgtttcgttcgttagatgggagttatttgtgatcgttttgggtgcgtttgcgtaacgtttttttttagttttaatcggtttagttgacgtgtttagaagacgaagatggtcgttacgtttattgcgtgttacgtagttttttatttcggttcggacggttgggcgtcgaggaaaggcgagttagtgtttatttttagcgtaggcgcggtgggaggtttagcgcgcgcgttttcgcgggtggtcgtttggtagggaagtggcggcgttttttagcggcggtcgtttgtt

SEQ ID NO: 36732 - DNA, 556 bp, Artificial Sequence
  chemically treated genomic DNA (Homo sapiens) CpG-island No: 36732
aacaaacgaccgccgctaaaaaacgccgccacttccctaccaaacgaccacccgcgaaaacgcgcgcgctaaacctcccaccgcgcctacgctaaaaataaacactaactcgcctttcctcgacgcccaaccgtccgaaccgaaataaaaaactacgtaacacgcaataaacgtaacgaccatcttcgtcttctaaacacgtcaactaaaccgattaaaactaaaaaaaaacgttacgcaaacgcacccaaaacgatcacaaataactcccatctaacgaacgaaacgtcgccgtcgtcgccgaaaatttaatatttacgccgcgaaaaaaacgacgaccgcaacaaaaacaactaaatatctcctaatacccgaatataaaacgatccgctaacgctaatctaaccctccgccaaacaaaaaaaaaatacgcgaacgtccctaacgatccccgccgcctatatcttcacctctcttttaccaaccccttcaaaaaacgaacaattctccctcttcctattccaccctcgataacgtattacctcgcacgcccctt

SEQ ID NO: 36733 - DNA, 657 bp, Artificial Sequence
  chemically treated genomic DNA (Homo sapiens) CpG-island No: 36733
cgggatttcggggtcgcgggcgcgtttcggggttcgggcgagtggatatattttatcgttcgggttagtcgttcgtttttttcgtcggtcggggatcgcgtttttatttgttttcgttttcgttttcgtattttcggggtcgcgcgtttcgtttagcgattcgtttttcggggtttcgtcgcgcggtcgtcgtagtcgtattcgtacgttagttcgggtcgcggcgcgtttatggggttcgtacgttttattttttgtttttaaaaattcggttcgtagattatttttttgggtagagttcggcggtggcgacggcgaggggcgaggtttggaggtgggatcggtcggcgaggagcgtcgtataaagaagtttcgtgggggcggggggtggtaggaggacggatagatcgtcggatcgacgcgggacgcgcggtcggagtagcggggcggtcgggtttaggcgtttttttttttgagtcgggcgggcggattcggggaggcggcggcggttcgtgattttagagagttggaatgcgggtagtcgcgcgggggaggcgcggatagttgcgttcggtcgtcggggagggggcgcgtcgttgttttttttaatcgtatgattatttattttaagagtttttaaataaagtaaggttttta

SEQ ID NO: 36734 - DNA, 657 bp, Artificial Sequence
  chemically treated genomic DNA (Homo sapiens) CpG-island No: 36734
taaaaaccttactttatttaaaaactcttaaaataaataatcatacgattaaaaaaaacaacgacgcgccccctccccgacgaccgaacgcaactatccgcgcctcccccgcgcgactacccgcattccaactctctaaaatcacgaaccgccgccgcctccccgaatccgcccgcccgactcaaaaaaaaaaacgcctaaacccgaccgccccgctactccgaccgcgcgtcccgcgtcgatccgacgatctatccgtcctcctaccaccccccgcccccacgaaacttctttatacgacgctcctcgccgaccgatcccacctccaaacctcgcccctcgccgtcgccaccgccgaactctacccaaaaaaataatctacgaaccgaatttttaaaaacaaaaaataaaacgtacgaaccccataaacgcgccgcgacccgaactaacgtacgaatacgactacgacgaccgcgcgacgaaaccccgaaaaacgaatcgctaaacgaaacgcgcgaccccgaaaatacgaaaacgaaaacgaaaacaaataaaaacgcgatccccgaccgacgaaaaaaacgaacgactaacccgaacgataaaatatatccactcgcccgaaccccgaaacgcgcccgcgaccccgaaatcccg

SEQ ID NO: 36735 - DNA, 657 bp, Artificial Sequence
  chemically treated genomic DNA (Homo sapiens) CpG-island No: 36735
taaaagttttgttttatttggaaatttttaaaataagtggttatacgattaaaaaaagtagcggcgcgtttttttttcggcggtcgggcgtagttgttcgcgtttttttcgcgcggttgttcgtattttaattttttgaggttacgggtcgtcgtcgttttttcggattcgttcgttcggtttagggggagggacgtttgggttcggtcgtttcgttgtttcggtcgcgcgtttcgcgtcggttcgacggtttgttcgtttttttgttatttttcgtttttacggggtttttttgtgcggcgtttttcgtcggtcggttttatttttaggtttcgtttttcgtcgtcgttatcgtcggattttgtttaggggaatggtttgcgagtcgggtttttggagataggaagtgaggcgtgcgagttttatgagcgcgtcgcggttcgggttggcgtgcgggtgcggttgcggcggtcgcgcggcggggtttcgggaggcgggtcgttgagcggggcgcgcggtttcgaggatgcgggagcgggagcgggagtaggtgagggcgcggttttcggtcggcgggaggggcgggcggttggttcgagcggtggggtgtgtttattcgttcggatttcggagcgcgttcgcggtttcggaatttcg

SEQ ID NO: 36736 - DNA, 657 bp, Artificial Sequence
  chemically treated genomic DNA (Homo sapiens) CpG-island No: 36736
cgaaattccgaaaccgcgaacgcgctccgaaatccgaacgaataaacacaccccaccgctcgaaccaaccgcccgcccctcccgccgaccgaaaaccgcgccctcacctactcccgctcccgctcccgcatcctcgaaaccgcgcgccccgctcaacgacccgcctcccgaaaccccgccgcgcgaccgccgcaaccgcacccgcacgccaacccgaaccgcgacgcgctcataaaactcgcacgcctcacttcctatctccaaaaacccgactcgcaaaccattcccctaaacaaaatccgacgataacgacgacgaaaaacgaaacctaaaaataaaaccgaccgacgaaaaacgccgcacaaaaaaaccccgtaaaaacgaaaaataacaaaaaaacgaacaaaccgtcgaaccgacgcgaaacgcgcgaccgaaacaacgaaacgaccgaacccaaacgtccctccccctaaaccgaacgaacgaatccgaaaaaacgacgacgacccgtaacctcaaaaaattaaaatacgaacaaccgcgcgaaaaaaacgcgaacaactacgcccgaccgccgaaaaaaaaacgcgccgctactttttttaatcgtataaccacttattttaaaaatttccaaataaaacaaaactttta

SEQ ID NO: 36737 - DNA, 699 bp, Artificial Sequence
  chemically treated genomic DNA (Homo sapiens) CpG-island No: 36737
ggagttgtaagattattcgtacgcgtacgtcgtcgttttttttgtttgagtataggtttcgcgggtagaaggcgtgcgtaggcgcggatacgggcgtatgcgcgtttatttcggcgcgtagtgtcggtcggggcggggatacgtcgtgtgcgcggtcgggggcggaacggaggaggaggcggtggtgtttcggttgcggggtaggagttcgcggtagttttcgggtaagttaagcgtcgcgtagtgttgagttttcgtacgtcgtagagttatggagatcggtatcgagattagtcgtaagattcgggtgaggttcgtgtcggtcgggggtgggaagttaggtttcggcgagcgggcggttgttaggagtaacggggattgtgggttcgggtggacgtcgcggtttggttttcgttggacgtttttggcgggttgcggttttttttcgtttaggtcgtttcggttttggggatatttgcggtttcggagcgtggttgcggttgaagtagtcgtcgggaaatggaaggataggcgtaggttcggttggagttattatcgcggcgtacggcgtcgttttggattcgttgcgggaggtgggcgtcgcggggttggggttggagttggagtggggtgcggggtggggggcggtgtaggcgaggttttttttagttttcgttcgggggattcgaggtgcgcgta

SEQ ID NO: 36738 - DNA, 699 bp, Artificial Sequence
  chemically treated genomic DNA (Homo sapiens) CpG-island No: 36738
tacgcgcacctcgaatcccccgaacgaaaactaaaaaaaacctcgcctacaccgccccccaccccgcaccccactccaactccaaccccaaccccgcgacgcccacctcccgcaacgaatccaaaacgacgccgtacgccgcgataataactccaaccgaacctacgcctatccttccatttcccgacgactacttcaaccgcaaccacgctccgaaaccgcaaatatccccaaaaccgaaacgacctaaacgaaaaaaaaccgcaacccgccaaaaacgtccaacgaaaaccaaaccgcgacgtccacccgaacccacaatccccgttactcctaacaaccgcccgctcgccgaaacctaacttcccacccccgaccgacacgaacctcacccgaatcttacgactaatctcgataccgatctccataactctacgacgtacgaaaactcaacactacgcgacgcttaacttacccgaaaactaccgcgaactcctaccccgcaaccgaaacaccaccgcctcctcctccgttccgcccccgaccgcgcacacgacgtatccccgccccgaccgacactacgcgccgaaataaacgcgcatacgcccgtatccgcgcctacgcacgccttctacccgcgaaacctatactcaaacaaaaaaaacgacgacgtacgcgtacgaataatcttacaactcc

SEQ ID NO: 36739 - DNA, 699 bp, Artificial Sequence
  chemically treated genomic DNA (Homo sapiens) CpG-island No: 36739
tgcgcgtatttcggatttttcgggcgggggttgggaggagtttcgtttgtatcgttttttatttcgtattttattttagttttagttttagtttcgcggcgtttatttttcgtagcggatttaaagcggcgtcgtgcgtcgcggtggtggttttagtcgggtttgcgtttgtttttttatttttcggcggttattttagtcgtagttacgtttcgaggtcgtaaatgtttttagggtcgaggcggtttggacgaggaggagtcgtagttcgttaggagcgtttagcggaggttaggtcgcggcgtttattcgggtttatagttttcgttatttttgataatcgttcgttcgtcgagatttggttttttattttcgatcggtacgggttttattcggattttgcggttgatttcggtgtcgatttttatggttttgcggcgtgcgggaatttagtattgcgcggcgtttggtttattcggaggttgtcgcggatttttatttcgtagtcgggatattatcgttttttttttcgtttcgttttcggtcgcgtatacggcgtattttcgtttcggtcggtattgcgcgtcggagtgaacgcgtatgcgttcgtgttcgcgtttgcgtacgttttttattcgcgaaatttgtgtttaggtaaggagggcggcggcgtgcgcgtgcgggtggttttgtagtttt

SEQ ID NO: 36740 - DNA, 699 bp, Artificial Sequence
  chemically treated genomic DNA (Homo sapiens) CpG-island No: 36740
aaaactacaaaaccacccgcacgcgcacgccgccgccctccttacctaaacacaaatttcgcgaataaaaaacgtacgcaaacgcgaacacgaacgcatacgcgttcactccgacgcgcaataccgaccgaaacgaaaatacgccgtatacgcgaccgaaaacgaaacgaaaaaaaaaacgataatatcccgactacgaaataaaaatccgcgacaacctccgaataaaccaaacgccgcgcaatactaaattcccgcacgccgcaaaaccataaaaatcgacaccgaaatcaaccgcaaaatccgaataaaacccgtaccgatcgaaaataaaaaaccaaatctcgacgaacgaacgattatcaaaaataacgaaaactataaacccgaataaacgccgcgacctaacctccgctaaacgctcctaacgaactacgactcctcctcgtccaaaccgcctcgaccctaaaaacatttacgacctcgaaacgtaactacgactaaaataaccgccgaaaaataaaaaaacaaacgcaaacccgactaaaaccaccaccgcgacgcacgacgccgctttaaatccgctacgaaaaataaacgccgcgaaactaaaactaaaactaaaataaaatacgaaataaaaaacgatacaaacgaaactcctcccaacccccgcccgaaaaatccgaaatacgcgca

SEQ ID NO: 36741 - DNA, 563 bp, Artificial Sequence
  chemically treated genomic DNA (Homo sapiens) CpG-island No: 36741
cgttttttggtattttcgttagtttcgtttcgtcggtaacgagtttggtttagtttattgtcgtatcgaggacgttgttgttgtattggttgtttagtttagaaagacgggtcgtaatttcgtcgtaacgttgttgtttttttttcggtagatttatgttagagagtttaaagtcgcgtagtgcgttattaatcgtttttttttgcgtcgtgtttagcgtggcgtaatgatcgttatcgcgtaggtcgcgatacgttttatatagttttttatgttgttttatttaggtgttgtatttcgatagtagcggtagggtttgttcgtaggttttacgtagtttcgggttattttttatcgagtttaggtggttgatcggggagaagatacgttttaatatatcgtttattttcgttagcggttggtagagatttttttaggtgtacggtgttttttgcgttattacgcgttttacgttttcgcggtagtcgtttaatgttttagttacggttggaacgatatgtttcgggagaattttagaaaacggaggtaatttaaagggagtt

SEQ ID NO: 36742 - DNA, 563 bp, Artificial Sequence
  chemically treated genomic DNA (Homo sapiens) CpG-island No: 36742
aactccctttaaattacctccgttttctaaaattctcccgaaacatatcgttccaaccgtaactaaaacattaaacgactaccgcgaaaacgtaaaacgcgtaataacgcaaaaaacaccgtacacctaaaaaaatctctaccaaccgctaacgaaaataaacgatatattaaaacgtatcttctccccgatcaaccacctaaactcgataaaaaataacccgaaactacgtaaaacctacgaacaaaccctaccgctactatcgaaatacaacacctaaataaaacaacataaaaaactatataaaacgtatcgcgacctacgcgataacgatcattacgccacgctaaacacgacgcaaaaaaaaacgattaataacgcactacgcgactttaaactctctaacataaatctaccgaaaaaaaaacaacaacgttacgacgaaattacgacccgtctttctaaactaaacaaccaatacaacaacaacgtcctcgatacgacaataaactaaaccaaactcgttaccgacgaaacgaaactaacgaaaataccaaaaaacg

SEQ ID NO: 36743 - DNA, 563 bp, Artificial Sequence
  chemically treated genomic DNA (Homo sapiens) CpG-island No: 36743
gattttttttgaattgttttcgttttttaaaattttttcggaatatgtcgttttagtcgtgattaaggtattgaacgattgtcgcgaaaacgtggagcgcgtagtagcgtaaggggtatcgtatatttgggaaaatttttgttagtcgttggcggaagtggacgatgtgttggggcgtatttttttttcggttagttatttgaattcggtgaaaaatagttcggaattgcgtgaagtttacgaataaattttgtcgttgttgtcggaatatagtatttgggtagggtaatatgaagggttgtataaagcgtatcgcgatttgcgcgatggcgattattacgttacgttgaatacggcgtagaagaaagcggttgataacgtattgcgcgattttgaattttttggtataggtttgtcgaaagagaaatagtagcgttacggcgaaattgcgattcgtttttttgaattgggtaattagtatagtaataacgttttcgatgcgataatgggttggattaaattcgttatcgacgaagcggagttggcggggatgttagaaagcg

SEQ ID NO: 36744 - DNA, 563 bp, Artificial Sequence
  chemically treated genomic DNA (Homo sapiens) CpG-island No: 36744
cgctttctaacatccccgccaactccgcttcgtcgataacgaatttaatccaacccattatcgcatcgaaaacgttattactatactaattacccaattcaaaaaaacgaatcgcaatttcgccgtaacgctactatttctctttcgacaaacctataccaaaaaattcaaaatcgcgcaatacgttatcaaccgctttcttctacgccgtattcaacgtaacgtaataatcgccatcgcgcaaatcgcgatacgctttatacaacccttcatattaccctacccaaatactatattccgacaacaacgacaaaatttattcgtaaacttcacgcaattccgaactatttttcaccgaattcaaataactaaccgaaaaaaaaatacgccccaacacatcgtccacttccgccaacgactaacaaaaattttcccaaatatacgataccccttacgctactacgcgctccacgttttcgcgacaatcgttcaataccttaatcacgactaaaacgacatattccgaaaaaattttaaaaaacgaaaacaattcaaaaaaaatc

SEQ ID NO: 36745 - DNA, 829 bp, Artificial Sequence
  chemically treated genomic DNA (Homo sapiens) CpG-island No: 36745
tcgcgcgcggattttcggtagagttttttcggtcgtattttcgacgttttttcgcgtttagtttaggtgtcgatcgttttatttcggtttttgtttttggtttttttggttttgtttttcgtttttttggttcggggggcggtcggttcggcgttttcggttttcgtcgttttttttttgcgtcgtttgtttcgtagttagttgaaggcgcggcggaggtcggacgcgtcggagcgggatttttttttgcgcggggggtcgttcgggtttttcggtttttcggtcgtaggtgcggcggggggcgcgcgggtcgttatggtaggcgggggcggagcgggcggcgggttaggttttttgcggcgcggtgtttatgtcggggggcggtcgtcggggacgcgcgttcggagaaaagtttgggcggcggaggtcgagcgggcgcggagagcggacggcgggagcggcgcgggaggggtcggtcgagcggcgggcggggcgtaggtcggcggggagggaaggagcggggcgggagcggtcgtagggcgggagcgtcgttgtttgcggttttttttcgtttttttcggtttcggcggagggcgaggtttagtttcgagaggagggggtttcgggagttcggggtcgtgtttttcgttggggttcgagagggcgggtcgtggggtcgttcgggagggggcggtattgaggtttcgtttcgtagggggtatcgcgggagatttgttcggaagagggtggtatggggtggggacggaaaggggaagggcgtaggaaaggaggagcgagaggttggggttggattttaggagatttggta

SEQ ID NO: 36746 - DNA, 829 bp, Artificial Sequence
  chemically treated genomic DNA (Homo sapiens) CpG-island No: 36746
taccaaatctcctaaaatccaaccccaacctctcgctcctcctttcctacgcccttcccctttccgtccccaccccataccaccctcttccgaacaaatctcccgcgataccccctacgaaacgaaacctcaataccgccccctcccgaacgaccccacgacccgccctctcgaaccccaacgaaaaacacgaccccgaactcccgaaaccccctcctctcgaaactaaacctcgccctccgccgaaaccgaaaaaaacgaaaaaaaaccgcaaacaacgacgctcccgccctacgaccgctcccgccccgctccttccctccccgccgacctacgccccgcccgccgctcgaccgacccctcccgcgccgctcccgccgtccgctctccgcgcccgctcgacctccgccgcccaaacttttctccgaacgcgcgtccccgacgaccgccccccgacataaacaccgcgccgcaaaaaacctaacccgccgcccgctccgcccccgcctaccataacgacccgcgcgccccccgccgcacctacgaccgaaaaaccgaaaaacccgaacgaccccccgcgcaaaaaaaaatcccgctccgacgcgtccgacctccgccgcgccttcaactaactacgaaacaaacgacgcaaaaaaaaaacgacgaaaaccgaaaacgccgaaccgaccgccccccgaaccaaaaaaacgaaaaacaaaaccaaaaaaaccaaaaacaaaaaccgaaataaaacgatcgacacctaaactaaacgcgaaaaaacgtcgaaaatacgaccgaaaaaactctaccgaaaatccgcgcgcga

SEQ ID NO: 36747 - DNA, 829 bp, Artificial Sequence
  chemically treated genomic DNA (Homo sapiens) CpG-island No: 36747
tattaagttttttggggtttaattttagtttttcgtttttttttttttgcgtttttttttttttcgtttttattttatattattttttttcgaatagatttttcgcggtgttttttgcgggacggaattttagtgtcgttttttttcgggcggttttacgattcgttttttcgggttttagcggggggtacgatttcgggttttcgggatttttttttttcgggattggatttcgtttttcgtcgggatcgggggaggcggggaggggtcgtaggtagcggcgttttcgttttgcggtcgttttcgtttcgtttttttttttttcgtcggtttgcgtttcgttcgtcgttcggtcggtttttttcgcgtcgttttcgtcgttcgtttttcgcgttcgttcggttttcgtcgtttaaattttttttcgggcgcgcgttttcggcggtcgtttttcggtatgggtatcgcgtcgtagggggtttgattcgtcgttcgtttcgttttcgtttgttatggcggttcgcgcgtttttcgtcgtatttgcggtcgaggagtcggggaattcgggcggtttttcgcgtaggaagaagtttcgtttcggcgcgttcggttttcgtcgcgtttttagttggttgcggggtaagcggcgtaagaagaaggcggcgggggtcgagggcgtcgaatcggtcgtttttcgggttaagaaggcggaggataaggttaagagggttaagggtaaaggtcgaggtaaggcggtcggtatttgggttgagcgcgggggggcgtcgagggtgcggtcgagggggttttgtcgggggttcgcgcgcgg

SEQ ID NO: 36748 - DNA, 829 bp, Artificial Sequence
  chemically treated genomic DNA (Homo sapiens) CpG-island No: 36748
ccgcgcgcgaacccccgacaaaaccccctcgaccgcaccctcgacgcccccccgcgctcaacccaaataccgaccgccttacctcgacctttacccttaaccctcttaaccttatcctccgccttcttaacccgaaaaacgaccgattcgacgccctcgacccccgccgccttcttcttacgccgcttaccccgcaaccaactaaaaacgcgacgaaaaccgaacgcgccgaaacgaaacttcttcctacgcgaaaaaccgcccgaattccccgactcctcgaccgcaaatacgacgaaaaacgcgcgaaccgccataacaaacgaaaacgaaacgaacgacgaatcaaaccccctacgacgcgatacccataccgaaaaacgaccgccgaaaacgcgcgcccgaaaaaaaatttaaacgacgaaaaccgaacgaacgcgaaaaacgaacgacgaaaacgacgcgaaaaaaaccgaccgaacgacgaacgaaacgcaaaccgacgaaaaaaaaaaaaacgaaacgaaaacgaccgcaaaacgaaaacgccgctacctacgacccctccccgcctcccccgatcccgacgaaaaacgaaatccaatcccgaaaaaaaaaaatcccgaaaacccgaaatcgtaccccccgctaaaacccgaaaaaacgaatcgtaaaaccgcccgaaaaaaaacgacactaaaattccgtcccgcaaaaaacaccgcgaaaaatctattcgaaaaaaaataatataaaataaaaacgaaaaaaaaaaaaacgcaaaaaaaaaaaaacgaaaaactaaaattaaaccccaaaaaacttaata

SEQ ID NO: 36749 - DNA, 969 bp, Artificial Sequence
  chemically treated genomic DNA (Homo sapiens) CpG-island No: 36749
ttttttcgcggggtcgtttcgtagtatcgattggttcgcgtcgtatcgttcgtttcgttgttttcgttcgcggttgtcgcgaaaattcggcggttatattcgcgttttcgcgtcgttcggcgagtcgtattgggtatgttcggtttcggtcggtttaggtttttgtaggtgggaagtttcgcgttttcggtagtcggcggcgtagttcgtaacgttgtgaggcgtcggcggaggcggttcgttcgtagtaggcgttatcgggcgttcggcgtagagtgcggcgtatcgttcgttgtcgggttggttatggcgaggggtgttacggcggtttatttgagtggcgcggcggtgttaggttaggcgggggttttcggcgggtcggggcggaggggtacgggtgggagttagtttcgtatcgggtcggcggtcgagtcggcgtcggggtcgtcgaattttcgggtgtttgggttggttgagattgcggcggaggttgcgttgcgagacgtcgtagggttcgggtagcgggttttagggggtcgtaggatgtttcgagattcgtgcggggcgggggttggtcgtttggggattgtcgtatttcgggttcgaatcgtaatttttcgagggcgaggagcgcggaatttattgttagttgtcggcgagttttttaggtgtcgtgggggaaggggacgtcgaatagtcgtgggggttttcgttgggttttggattttttttatcgttgtgttttagtttattcggatagggaggagcgtgcgttggttagggtttcggagaacgtgaatgcgggtttcgcgtcgggagggcgtcgtgttttgatgtcgtaggagtgcgggcggttgtgggtgttgcgagtcgtcgtttcgttattgaagttttcggagtttgtcgtatttgattttataataagttgatatcgaattgttttatggcgtggaatggggaaacgtgttt

SEQ ID NO: 36750 - DNA, 969 bp, Artificial Sequence
  chemically treated genomic DNA (Homo sapiens) CpG-island No: 36750
aaacacgtttccccattccacgccataaaacaattcgatatcaacttattataaaatcaaatacgacaaactccgaaaacttcaataacgaaacgacgactcgcaacacccacaaccgcccgcactcctacgacatcaaaacacgacgccctcccgacgcgaaacccgcattcacgttctccgaaaccctaaccaacgcacgctcctccctatccgaataaactaaaacacaacgataaaaaaaatccaaaacccaacgaaaacccccacgactattcgacgtccccttcccccacgacacctaaaaaactcgccgacaactaacaataaattccgcgctcctcgccctcgaaaaattacgattcgaacccgaaatacgacaatccccaaacgaccaacccccgccccgcacgaatctcgaaacatcctacgaccccctaaaacccgctacccgaaccctacgacgtctcgcaacgcaacctccgccgcaatctcaaccaacccaaacacccgaaaattcgacgaccccgacgccgactcgaccgccgacccgatacgaaactaactcccacccgtacccctccgccccgacccgccgaaaacccccgcctaacctaacaccgccgcgccactcaaataaaccgccgtaacacccctcgccataaccaacccgacaacgaacgatacgccgcactctacgccgaacgcccgataacgcctactacgaacgaaccgcctccgccgacgcctcacaacgttacgaactacgccgccgactaccgaaaacgcgaaacttcccacctacaaaaacctaaaccgaccgaaaccgaacatacccaatacgactcgccgaacgacgcgaaaacgcgaatataaccgccgaattttcgcgacaaccgcgaacgaaaacaacgaaacgaacgatacgacgcgaaccaatcgatactacgaaacgaccccgcgaaaaaa

SEQ ID NO: 36751 - DNA, 969 bp, Artificial Sequence
  chemically treated genomic DNA (Homo sapiens) CpG-island No: 36751
aagtacgtttttttattttacgttatgaagtaattcgatgttaatttgttatggagttaaatgcgataaatttcgagagttttagtagcgaggcggcggttcgtagtatttatagtcgttcgtatttttgcggtattaggatacggcgttttttcgacgcggaattcgtatttacgtttttcggagttttggttagcgtacgtttttttttgttcgggtaaattgaggtatagcgatgagagagatttagagtttagcgaaagtttttacggttgttcggcgttttttttttttacgatatttaggaggttcgtcggtagttggtagtggatttcgcgtttttcgttttcggaaggttacggttcgagttcgggatgcggtagtttttaaacggttagttttcgtttcgtacggatttcgaagtattttgcgattttttggagttcgttgttcggattttgcggcgtttcgtagcgtagttttcgtcgtagttttagttagtttaaatattcgaaagttcggcggtttcggcgtcgattcggtcgtcgattcggtgcggggttggtttttattcgtgttttttcgtttcggttcgtcgggggttttcgtttaatttgatatcgtcgcgttatttaggtgggtcgtcgtggtatttttcgttatggttagttcgatagcgggcggtgcgtcgtattttgcgtcggacgttcggtagcgtttattgcgggcgagtcgttttcgtcggcgttttatagcgttgcgagttgcgtcgtcggttgtcgggagcgcggagttttttatttataggagtttgggtcggtcggggtcgagtatgtttagtgcggttcgtcgggcggcgcggaggcgcgggtgtagtcgtcgggttttcgcggtagtcgcgggcgggggtagcggggcgggcggtgcggcgcgagttagtcggtgttgcggagcggtttcgcggaggag

SEQ ID NO: 36752 - DNA, 969 bp, Artificial Sequence
  chemically treated genomic DNA (Homo sapiens) CpG-island No: 36752
ctcctccgcgaaaccgctccgcaacaccgactaactcgcgccgcaccgcccgccccgctacccccgcccgcgactaccgcgaaaacccgacgactacacccgcgcctccgcgccgcccgacgaaccgcactaaacatactcgaccccgaccgacccaaactcctataaataaaaaactccgcgctcccgacaaccgacgacgcaactcgcaacgctataaaacgccgacgaaaacgactcgcccgcaataaacgctaccgaacgtccgacgcaaaatacgacgcaccgcccgctatcgaactaaccataacgaaaaataccacgacgacccacctaaataacgcgacgatatcaaattaaacgaaaacccccgacgaaccgaaacgaaaaaacacgaataaaaaccaaccccgcaccgaatcgacgaccgaatcgacgccgaaaccgccgaactttcgaatatttaaactaactaaaactacgacgaaaactacgctacgaaacgccgcaaaatccgaacaacgaactccaaaaaatcgcaaaatacttcgaaatccgtacgaaacgaaaactaaccgtttaaaaactaccgcatcccgaactcgaaccgtaaccttccgaaaacgaaaaacgcgaaatccactaccaactaccgacgaacctcctaaatatcgtaaaaaaaaaaaacgccgaacaaccgtaaaaactttcgctaaactctaaatctctctcatcgctatacctcaatttacccgaacaaaaaaaaacgtacgctaaccaaaactccgaaaaacgtaaatacgaattccgcgtcgaaaaaacgccgtatcctaataccgcaaaaatacgaacgactataaatactacgaaccgccgcctcgctactaaaactctcgaaatttatcgcatttaactccataacaaattaacatcgaattacttcataacgtaaaataaaaaaacgtactt

SEQ ID NO: 36753 - DNA, 578 bp, Artificial Sequence
  chemically treated genomic DNA (Homo sapiens) CpG-island No: 36753
gcgttttacgttttcggaggcgggttcgagagtcggcgagaatcggaggtcgggcgaaagagtgttcggtgcggggggcgggttaggttagtggggcgggcgtcgtcgagcgttgggcgtggcggacgcggcggggtttagatgcggttatacgtaggggggcggggtcgcggcgggagaggcggggttttattgggcggtagtttcgggaggggcggaattgcggtgggaggggcggggttttattgggcgatcgtagtggacgagaatttagattggaatcggttcgaagaaaaaaaggtagtttttattgggttgtcgtttggaataggagattaggtcgggagaaagggaggggcgtgtttaacgtattgtattatttatcgaaattcggacggtagcgggagaggcgcggtcgagaaggtagaggtttggttgggttgttatttcgagtcggggcggtatgtggttgggttttttaatcgcgagcggtcggggtaggggaaaggaatacgtttttttatattttttttttttattttttaaagattagaatttaattttttggttatttttag

SEQ ID NO: 36754 - DNA, 578 bp, Artificial Sequence
  chemically treated genomic DNA (Homo sapiens) CpG-island No: 36754
ctaaaaataaccaaaaaattaaattctaatctttaaaaaataaaaaaaaaaaatataaaaaaacgtattcctttcccctaccccgaccgctcgcgattaaaaaacccaaccacataccgccccgactcgaaataacaacccaaccaaacctctaccttctcgaccgcgcctctcccgctaccgtccgaatttcgataaataatacaatacgttaaacacgcccctccctttctcccgacctaatctcctattccaaacgacaacccaataaaaactacctttttttcttcgaaccgattccaatctaaattctcgtccactacgatcgcccaataaaaccccgcccctcccaccgcaattccgcccctcccgaaactaccgcccaataaaaccccgcctctcccgccgcgaccccgcccccctacgtataaccgcatctaaaccccgccgcgtccgccacgcccaacgctcgacgacgcccgccccactaacctaacccgccccccgcaccgaacactctttcgcccgacctccgattctcgccgactctcgaacccgcctccgaaaacgtaaaacgc

SEQ ID NO: 36755 - DNA, 578 bp, Artificial Sequence
  chemically treated genomic DNA (Homo sapiens) CpG-island No: 36755
ttgaaagtgattagaaaattaggttttggtttttaagagatggaagagggaaatgtgaaggggcgtattttttttttttgtttcgatcgttcgcggttggagagtttagttatatgtcgtttcggttcggagtgatagtttaattaggtttttgttttttcggtcgcgtttttttcgttgtcgttcggatttcgatgggtggtatagtacgttaggtacgtttttttttttttttcggtttggttttttgttttaggcgatagtttaatgagggttgttttttttttttcggatcggttttagtttaggttttcgtttattacgatcgtttagtgaggtttcgttttttttatcgtagtttcgtttttttcggagttatcgtttagtgaggtttcgtttttttcgtcgcggtttcgtttttttgcgtgtgatcgtatttaggtttcgtcgcgttcgttacgtttagcgttcggcggcgttcgttttattggtttggttcgtttttcgtatcgagtattttttcgttcggttttcggttttcgtcggttttcggattcgttttcgaagacgtggagcgt

SEQ ID NO: 36756 - DNA, 578 bp, Artificial Sequence
  chemically treated genomic DNA (Homo sapiens) CpG-island No: 36756
acgctccacgtcttcgaaaacgaatccgaaaaccgacgaaaaccgaaaaccgaacgaaaaaatactcgatacgaaaaacgaaccaaaccaataaaacgaacgccgccgaacgctaaacgtaacgaacgcgacgaaacctaaatacgatcacacgcaaaaaaacgaaaccgcgacgaaaaaaacgaaacctcactaaacgataactccgaaaaaaacgaaactacgataaaaaaaacgaaacctcactaaacgatcgtaataaacgaaaacctaaactaaaaccgatccgaaaaaaaaaaaacaaccctcattaaactatcgcctaaaacaaaaaaccaaaccgaaaaaaaaaaaaaaacgtacctaacgtactataccacccatcgaaatccgaacgacaacgaaaaaaacgcgaccgaaaaaacaaaaacctaattaaactatcactccgaaccgaaacgacatataactaaactctccaaccgcgaacgatcgaaacaaaaaaaaaaaatacgccccttcacatttccctcttccatctcttaaaaaccaaaacctaattttctaatcactttcaa

SEQ ID NO: 36757 - DNA, 1015 bp, Artificial Sequence
  chemically treated genomic DNA (Homo sapiens) CpG-island No: 36757
tacggcgggttcggggattcggtcgcgtaggcgcgaggagttcgggttgtcgggggggtatcgttttagatattcggaagttttcgtttaacgggtttagttcgtattttttgttcgggaagggggcggggtcgaagtttttcggcgcggggcgttatagagtatggacggaggatttgcgttttagatattttcggaagtggtttttttaggcgttcgtcgggtattatagagttgggggcggtggtcgggatagcgggttcgtttttttagagcggcgaggatagggtggcggttcggggggtagggagtagggagaagggggggagcggcgcgggcggaagcggtcgggaaggttattttcggtttgggcgttcgtttttttgattttagggtttgagtcgtcgttgtcgtcgttgttattattcgcgaggtaggagagaggaggaggagtgcggcgcggcggtttcgggattaaggaggtgaggggtgggggcgggggtcgtgcgttgggggttaggtgggcgcgcgtttcgggaagttgggtttgggttgggggtgggtggggagattggagggcgagcgcgattgggcggcgggcgcgcgtgcgcgttgttggggggcgtgagtgggcgcgcggtcggggtgacgcgggcggggggagtgcgcgtgcgcgtcgaagagttgtgggaggggacgcgcgttcgggcggttcgcgggcggcgagcggggttggagggggggtgcgcgtgcgcgggttcgggtttaggggcgcgcgcgtgcgcgtggcgggggtaggagcgggggtttcggtgggggtttttttgttgcgggtcgtcgggggtggggtcgttgttcgttttttcgaagttttaatttcgtcggtcgtggtcggaagtggtggcgatttcggggggaagttgaggtttaggtgggggaaggggtcgcgcggttgggttggtttggtcggatatcgcggtttcgagggtacggttttagttttcggtttttttag

SEQ ID NO: 36758 - DNA, 1015 bp, Artificial Sequence
  chemically treated genomic DNA (Homo sapiens) CpG-island No: 36758
ctaaaaaaaccgaaaactaaaaccgtaccctcgaaaccgcgatatccgaccaaaccaacccaaccgcgcgaccccttcccccacctaaacctcaacttccccccgaaatcgccaccacttccgaccacgaccgacgaaattaaaacttcgaaaaaacgaacaacgaccccacccccgacgacccgcaacaaaaaaacccccaccgaaacccccgctcctacccccgccacgcgcacgcgcgcgcccctaaacccgaacccgcgcacgcgcaccccccctccaaccccgctcgccgcccgcgaaccgcccgaacgcgcgtcccctcccacaactcttcgacgcgcacgcgcactccccccgcccgcgtcaccccgaccgcgcgcccactcacgccccccaacaacgcgcacgcgcgcccgccgcccaatcgcgctcgccctccaatctccccacccacccccaacccaaacccaacttcccgaaacgcgcgcccacctaacccccaacgcacgacccccgcccccacccctcacctccttaatcccgaaaccgccgcgccgcactcctcctcctctctcctacctcgcgaataataacaacgacgacaacgacgactcaaaccctaaaatcaaaaaaacgaacgcccaaaccgaaaataaccttcccgaccgcttccgcccgcgccgctcccccccttctccctactccctaccccccgaaccgccaccctatcctcgccgctctaaaaaaacgaacccgctatcccgaccaccgcccccaactctataatacccgacgaacgcctaaaaaaaccacttccgaaaatatctaaaacgcaaatcctccgtccatactctataacgccccgcgccgaaaaacttcgaccccgcccccttcccgaacaaaaaatacgaactaaacccgttaaacgaaaacttccgaatatctaaaacgatacccccccgacaacccgaactcctcgcgcctacgcgaccgaatccccgaacccgccgta

SEQ ID NO: 36759 - DNA, 1015 bp, Artificial Sequence
  chemically treated genomic DNA (Homo sapiens) CpG-island No: 36759
ttgggggggtcgagggttgagatcgtgttttcggggtcgcggtattcggttaggttagtttaatcgcgcggtttttttttttatttgggttttaattttttttcgaagtcgttattattttcggttacgatcggcggagttggaatttcggggggacggatagcggttttattttcgacggttcgtagtagagggatttttatcgaggttttcgtttttgttttcgttacgcgtacgcgcgcgtttttggattcggattcgcgtacgcgtattttttttttagtttcgttcgtcgttcgcgggtcgttcgggcgcgcgtttttttttatagtttttcggcgcgtacgcgtatttttttcgttcgcgttatttcggtcgcgcgtttatttacgttttttagtagcgcgtacgcgcgttcgtcgtttagtcgcgttcgttttttagtttttttatttatttttagtttaagtttagtttttcgaagcgcgcgtttatttggtttttagcgtacggttttcgtttttattttttatttttttggtttcggggtcgtcgcgtcgtattttttttttttttttttgtttcgcggatggtggtagcggcggtagcggcgatttagattttggggttagggggacgggcgtttaggtcggaagtgattttttcggtcgttttcgttcgcgtcgtttttttttttttttttattttttgtttttcgggtcgttattttgttttcgtcgttttaggaaggcgagttcgttatttcggttatcgtttttagttttgtggtgttcggcgggcgtttgagggagttattttcggaagtgtttaggacgtaggtttttcgtttatgttttatggcgtttcgcgtcgaggggtttcggtttcgtttttttttcggataggaggtgcgggttgggttcgttaggcggagattttcgggtgtttagggcggtgttttttcgataattcgggtttttcgcgtttgcgcggtcgggttttcgggttcgtcgtg

SEQ ID NO: 36760 - DNA, 1015 bp, Artificial Sequence
  chemically treated genomic DNA (Homo sapiens) CpG-island No: 36760
cacgacgaacccgaaaacccgaccgcgcaaacgcgaaaaacccgaattatcgaaaaaacaccgccctaaacacccgaaaatctccgcctaacgaacccaacccgcacctcctatccgaaaaaaaaacgaaaccgaaacccctcgacgcgaaacgccataaaacataaacgaaaaacctacgtcctaaacacttccgaaaataactccctcaaacgcccgccgaacaccacaaaactaaaaacgataaccgaaataacgaactcgccttcctaaaacgacgaaaacaaaataacgacccgaaaaacaaaaaataaaaaaaaaaaaaaaaacgacgcgaacgaaaacgaccgaaaaaatcacttccgacctaaacgcccgtccccctaaccccaaaatctaaatcgccgctaccgccgctaccaccatccgcgaaacaaaaaaaaaaaaaaaaaatacgacgcgacgaccccgaaaccaaaaaaataaaaaataaaaacgaaaaccgtacgctaaaaaccaaataaacgcgcgcttcgaaaaactaaacttaaactaaaaataaataaaaaaactaaaaaacgaacgcgactaaacgacgaacgcgcgtacgcgctactaaaaaacgtaaataaacgcgcgaccgaaataacgcgaacgaaaaaaatacgcgtacgcgccgaaaaactataaaaaaaaacgcgcgcccgaacgacccgcgaacgacgaacgaaactaaaaaaaaaatacgcgtacgcgaatccgaatccaaaaacgcgcgcgtacgcgtaacgaaaacaaaaacgaaaacctcgataaaaatccctctactacgaaccgtcgaaaataaaaccgctatccgtccccccgaaattccaactccgccgatcgtaaccgaaaataataacgacttcgaaaaaaaattaaaacccaaataaaaaaaaaaaccgcgcgattaaactaacctaaccgaataccgcgaccccgaaaacacgatctcaaccctcgacccccccaa

SEQ ID NO: 36761 - DNA, 884 bp, Artificial Sequence
  chemically treated genomic DNA (Homo sapiens) CpG-island No: 36761
ttggtgcgtggtacggattagtggcgtgtgtagagatttttattgtgcgtggtacgggtcggcgtgcgtagggattttttcggtgcgtggtacgggtcggcggcgtgcgtagggattttttcggtgcgtggtacgggtcggcggcgtgcgtagggattttttcggtgcgtggtacgggtcggcggcgtgcgtagggattttttcggtgcgtggtacgggtcggcggcgtgcgtagggattttttcggtgcgtggtacgggtcggcggcgtgcgtagggattttttcggtgcgtggtacgggtcggcggtgtcgtgcgtagggattttttcggtgcgtggtacgggtcggcggtgtcgtgcgtagggattttttcggtgcgtggtacgggtcggcggcgtgcgtagggattttttcggtgcgtggtacgggtcggcggtgtcgtgcgtagggattttttcggtgcgtggtacgggtcggcggtgtcgtgcgtagggattttttcggtgcgtggtacgggtcggcggtgtcgtgcgtagggattttttcggtgcgtggtacgggtcggcggtgtcgtgcgtagggattttttcggtgcgtggtacgggtcggcggcgtgcgtagggattttttcggtgcgtggtacgggtcggcggcgtgcgtagggattttttcggtgcgtggtacgggtcggcggtgtcgtgcgtagagattttttcggtgcgtggtacgggtcggtggtgtcgtgcgtagagatttttttggtgcgtggtacgggtcggtggtgtcgtgcgtagagatttttacggtgtgtggtacgggttgggagtgtcgtgtgtagagatttttaggcgtttgttgttttgtttttgttgtgatgggtaag

SEQ ID NO: 36762 - DNA, 884 bp, Artificial Sequence
  chemically treated genomic DNA (Homo sapiens) CpG-island No: 36762
cttacccatcacaacaaaaacaaaacaacaaacgcctaaaaatctctacacacgacactcccaacccgtaccacacaccgtaaaaatctctacgcacgacaccaccgacccgtaccacgcaccaaaaaaatctctacgcacgacaccaccgacccgtaccacgcaccgaaaaaatctctacgcacgacaccgccgacccgtaccacgcaccgaaaaaatccctacgcacgccgccgacccgtaccacgcaccgaaaaaatccctacgcacgccgccgacccgtaccacgcaccgaaaaaatccctacgcacgacaccgccgacccgtaccacgcaccgaaaaaatccctacgcacgacaccgccgacccgtaccacgcaccgaaaaaatccctacgcacgacaccgccgacccgtaccacgcaccgaaaaaatccctacgcacgacaccgccgacccgtaccacgcaccgaaaaaatccctacgcacgccgccgacccgtaccacgcaccgaaaaaatccctacgcacgacaccgccgacccgtaccacgcaccgaaaaaatccctacgcacgacaccgccgacccgtaccacgcaccgaaaaaatccctacgcacgccgccgacccgtaccacgcaccgaaaaaatccctacgcacgccgccgacccgtaccacgcaccgaaaaaatccctacgcacgccgccgacccgtaccacgcaccgaaaaaatccctacgcacgccgccgacccgtaccacgcaccgaaaaaatccctacgcacgccgccgacccgtaccacgcaccgaaaaaatccctacgcacgccgacccgtaccacgcacaataaaaatctctacacacgccactaatccgtaccacgcaccaa

SEQ ID NO: 36763 - DNA, 884 bp, Artificial Sequence
  chemically treated genomic DNA (Homo sapiens) CpG-island No: 36763
tttatttattatagtagaaatagggtaataggcgtttaagggtttttgtatacgatatttttaattcgtgttatatatcgtgagggtttttgcgtacgatattatcgattcgtgttacgtattaggagggtttttacgtacgatattatcgattcgtgttacgtatcgggagggtttttacgtacgatatcgtcgattcgtgttacgtatcgggagggtttttacgtacgtcgtcgattcgtgttacgtatcgggagggtttttacgtacgtcgtcgattcgtgttacgtatcgggagggtttttacgtacgatatcgtcgattcgtgttacgtatcgggagggtttttacgtacgatatcgtcgattcgtgttacgtatcgggagggtttttacgtacgatatcgtcgattcgtgttacgtatcgggagggtttttacgtacgatatcgtcgattcgtgttacgtatcgggagggtttttacgtacgtcgtcgattcgtgttacgtatcgggagggtttttacgtacgatatcgtcgattcgtgttacgtatcgggagggtttttacgtacgatatcgtcgattcgtgttacgtatcgggagggtttttacgtacgtcgtcgattcgtgttacgtatcgggagggtttttacgtacgtcgtcgattcgtgttacgtatcgggagggtttttacgtacgtcgtcgattcgtgttacgtatcgggagggtttttacgtacgtcgtcgattcgtgttacgtatcgggagggtttttacgtacgtcgtcgattcgtgttacgtatcgggagggtttttacgtacgtcgattcgtgttacgtatagtgagggtttttatatacgttattgattcgtgttacgtattag

SEQ ID NO: 36764 - DNA, 884 bp, Artificial Sequence
  chemically treated genomic DNA (Homo sapiens) CpG-island No: 36764
ctaatacgtaacacgaatcaataacgtatataaaaaccctcactatacgtaacacgaatcgacgtacgtaaaaaccctcccgatacgtaacacgaatcgacgacgtacgtaaaaaccctcccgatacgtaacacgaatcgacgacgtacgtaaaaaccctcccgatacgtaacacgaatcgacgacgtacgtaaaaaccctcccgatacgtaacacgaatcgacgacgtacgtaaaaaccctcccgatacgtaacacgaatcgacgacgtacgtaaaaaccctcccgatacgtaacacgaatcgacgatatcgtacgtaaaaaccctcccgatacgtaacacgaatcgacgatatcgtacgtaaaaaccctcccgatacgtaacacgaatcgacgacgtacgtaaaaaccctcccgatacgtaacacgaatcgacgatatcgtacgtaaaaaccctcccgatacgtaacacgaatcgacgatatcgtacgtaaaaaccctcccgatacgtaacacgaatcgacgatatcgtacgtaaaaaccctcccgatacgtaacacgaatcgacgatatcgtacgtaaaaaccctcccgatacgtaacacgaatcgacgacgtacgtaaaaaccctcccgatacgtaacacgaatcgacgacgtacgtaaaaaccctcccgatacgtaacacgaatcgacgatatcgtacgtaaaaaccctcccgatacgtaacacgaatcgataatatcgtacgtaaaaaccctcctaatacgtaacacgaatcgataatatcgtacgcaaaaaccctcacgatatataacacgaattaaaaatatcgtatacaaaaacccttaaacgcctattaccctatttctactataataaataaa

SEQ ID NO: 36765 - DNA, 612 bp, Artificial Sequence
  chemically treated genomic DNA (Homo sapiens) CpG-island No: 36765
ggttaagtatcggcgttcgtatagcggttttaagtttttcgtgtgttcgcgttgcggtcgcggttttagttagtttaagagtttcgcgcgttatttgcggttgtattcggagttgtcggggtttggcgtggcggttaaggtgttggcggttagcgttcggcgggttaaggggttcgaagaggcggtggcggcggacggcgagatcgttattttcgtgggcgatggcgagggtattatcgtggtgggcgcgtcgggcgagggggtcgcggtcgcggtagttatggcgggcgcgggggtaaaggtcgcggggtttcggtcgcggcgcgtttcggtttttaagtcgtacgtgtgtttggagtgcgggaagggtttcgggtacggggtcgggtttttggcgtattagcgggtttagtacggggacgggttcggggcggcggggggcgaggagtcggtttatatttgcgtggagtgcggggagggtttcgtgtagggcgtcgcgtttcggagatataagaagatttacgcggtgggcgcgttttcggtttgtagtagttgcggatagagttattatcgcgcgggcggggaggaggaggacgacgacgacgataggtt

SEQ ID NO: 36766 - DNA, 612 bp, Artificial Sequence
  chemically treated genomic DNA (Homo sapiens) CpG-island No: 36766
aacctatcgtcgtcgtcgtcctcctcctccccgcccgcgcgataataactctatccgcaactactacaaaccgaaaacgcgcccaccgcgtaaatcttcttatatctccgaaacgcgacgccctacacgaaaccctccccgcactccacgcaaatataaaccgactcctcgccccccgccgccccgaacccgtccccgtactaaacccgctaatacgccaaaaacccgaccccgtacccgaaacccttcccgcactccaaacacacgtacgacttaaaaaccgaaacgcgccgcgaccgaaaccccgcgacctttacccccgcgcccgccataactaccgcgaccgcgaccccctcgcccgacgcgcccaccacgataataccctcgccatcgcccacgaaaataacgatctcgccgtccgccgccaccgcctcttcgaaccccttaacccgccgaacgctaaccgccaacaccttaaccgccacgccaaaccccgacaactccgaatacaaccgcaaataacgcgcgaaactcttaaactaactaaaaccgcgaccgcaacgcgaacacacgaaaaacttaaaaccgctatacgaacgccgatacttaacc

SEQ ID NO: 36767 - DNA, 612 bp, Artificial Sequence
  chemically treated genomic DNA (Homo sapiens) CpG-island No: 36767
ggtttgtcgtcgtcgtcgtttttttttttttcgttcgcgcggtagtagttttgttcgtagttgttgtagatcgagggcgcgtttatcgcgtggatttttttgtgttttcggagcgcggcgttttgtacgaagtttttttcgtattttacgtagatgtgggtcggtttttcgtttttcgtcgtttcgagttcgttttcgtgttgggttcgttggtgcgttaggagttcggtttcgtgttcgaagtttttttcgtattttagatatacgtacggtttgggggtcggggcgcgtcgcgatcggggtttcgcggtttttgttttcgcgttcgttatggttgtcgcggtcgcggttttttcgttcggcgcgtttattacgatgatgttttcgttatcgtttacggggatggcgatttcgtcgttcgtcgttatcgttttttcgggttttttggttcgtcggacgttagtcgttagtattttggtcgttacgttaggtttcgatagtttcgggtgtagtcgtaggtgacgcgcgaggtttttgggttggttgaagtcgcggtcgtagcgcgggtatacgaagggtttgaggtcgttgtgcgagcgtcggtgtttggtt

SEQ ID NO: 36768 - DNA, 612 bp, Artificial Sequence
  chemically treated genomic DNA (Homo sapiens) CpG-island No: 36768
aaccaaacaccgacgctcgcacaacgacctcaaacccttcgtatacccgcgctacgaccgcgacttcaaccaacccaaaaacctcgcgcgtcacctacgactacacccgaaactatcgaaacctaacgtaacgaccaaaatactaacgactaacgtccgacgaaccaaaaaacccgaaaaaacgataacgacgaacgacgaaatcgccatccccgtaaacgataacgaaaacatcatcgtaataaacgcgccgaacgaaaaaaccgcgaccgcgacaaccataacgaacgcgaaaacaaaaaccgcgaaaccccgatcgcgacgcgccccgacccccaaaccgtacgtatatctaaaatacgaaaaaaacttcgaacacgaaaccgaactcctaacgcaccaacgaacccaacacgaaaacgaactcgaaacgacgaaaaacgaaaaaccgacccacatctacgtaaaatacgaaaaaaacttcgtacaaaacgccgcgctccgaaaacacaaaaaaatccacgcgataaacgcgccctcgatctacaacaactacgaacaaaactactaccgcgcgaacgaaaaaaaaaaaaacgacgacgacgacaaacc

SEQ ID NO: 36769 - DNA, 553 bp, Artificial Sequence
  chemically treated genomic DNA (Homo sapiens) CpG-island No: 36769
gtaggttttgtaggtattcgtattatataggtattttcgtaagattgtcgttgggatacgttggacgacgatcgcgttaatggttgtattcgttcgttggaatacgtttatagtaaagacggcggtttggcggtgttttacggtaattttgcggaaaacggttgtatcgtgaaaacggtaggcgtcgatgatagtatttttaaattatcggttcggcgaaagtgtacgaaagttaggacgatgcggtagaagcgattttcggcggtaaagttgtcgtcggagatgtggtagtaattcgttatgaaggttcgaaaggcggttcggggatgtaggaaatgttttatttaattagttttttgaaattaatgggtttcggtaaagtttgtgcgttgattatcgacggtcgtttttttggtggtatttttggtttttttatcggttacgttttatcggaagcggtaagcggcggtagtattggtttgattgaagatggtgatttgatcgttatcgatatttcgaatcgtggtagttagttataggtaagcgatgcgcg

SEQ ID NO: 36770 - DNA, 553 bp, Artificial Sequence
  chemically treated genomic DNA (Homo sapiens) CpG-island No: 36770
cgcgcatcgcttacctataactaactaccacgattcgaaatatcgataacgatcaaatcaccatcttcaatcaaaccaatactaccgccgcttaccgcttccgataaaacgtaaccgataaaaaaaccaaaaataccaccaaaaaaacgaccgtcgataatcaacgcacaaactttaccgaaacccattaatttcaaaaaactaattaaataaaacatttcctacatccccgaaccgcctttcgaaccttcataacgaattactaccacatctccgacgacaactttaccgccgaaaatcgcttctaccgcatcgtcctaactttcgtacactttcgccgaaccgataatttaaaaatactatcatcgacgcctaccgttttcacgatacaaccgttttccgcaaaattaccgtaaaacaccgccaaaccgccgtctttactataaacgtattccaacgaacgaatacaaccattaacgcgatcgtcgtccaacgtatcccaacgacaatcttacgaaaatacctatataatacgaatacctacaaaacctac

SEQ ID NO: 36771 - DNA, 553 bp, Artificial Sequence
  chemically treated genomic DNA (Homo sapiens) CpG-island No: 36771
cgcgtatcgtttatttgtaattgattgttacggttcgggatgtcgatagcgattaggttattatttttaattaggttaatgttgtcgtcgtttgtcgttttcggtgagacgtggtcgatggaaagattagaggtgttattagagaaacgatcgtcggtgattagcgtataggttttgtcgagatttattgattttaggaagttggttgggtagagtattttttgtattttcggatcgtttttcgggtttttatagcgaattattattatattttcggcgataattttatcgtcgagaatcgtttttatcgtatcgttttggttttcgtatattttcgtcgggtcggtaatttgaggatgttgttatcgacgtttgtcgtttttacgatgtagtcgtttttcgtaaagttatcgtagagtatcgttaggtcgtcgtttttgttgtaggcgtgttttagcgagcggatatagttattggcgcgatcgtcgtttagcgtattttaacggtaattttgcgagaatgtttgtgtggtacgaatgtttgtaggatttgt

SEQ ID NO: 36772 - DNA, 553 bp, Artificial Sequence
  chemically treated genomic DNA (Homo sapiens) CpG-island No: 36772
acaaatcctacaaacattcgtaccacacaaacattctcgcaaaattaccgttaaaatacgctaaacgacgatcgcgccaataactatatccgctcgctaaaacacgcctacaacaaaaacgacgacctaacgatactctacgataactttacgaaaaacgactacatcgtaaaaacgacaaacgtcgataacaacatcctcaaattaccgacccgacgaaaatatacgaaaaccaaaacgatacgataaaaacgattctcgacgataaaattatcgccgaaaatataataataattcgctataaaaacccgaaaaacgatccgaaaatacaaaaaatactctacccaaccaacttcctaaaatcaataaatctcgacaaaacctatacgctaatcaccgacgatcgtttctctaataacacctctaatctttccatcgaccacgtctcaccgaaaacgacaaacgacgacaacattaacctaattaaaaataataacctaatcgctatcgacatcccgaaccgtaacaatcaattacaaataaacgatacgcg

SEQ ID NO: 36773 - DNA, 565 bp, Artificial Sequence
  chemically treated genomic DNA (Homo sapiens) CpG-island No: 36773
gtaaaagtattttcgttagtttattgatgggttattattcgttaacggaaggtgagattcgttttgatggtcgtttattaagttcgttaagttatagcgcgttgcgttagggcgtggtaatggtgtagtaagattcggtggtgttggcggatatttttttcgttaacgtgacgttgggcgggatattttcgaagaacgcgtttggtaggcgttggaaatcgtgtaattggcggagttggcgtttagtatgagcgacggtatttatacgtcgttgggcgagtaggggaataattttttagttgggtaaaagtaattgttggtattggcgcgcgtgttggtcgagacgtcgtaaattttgatttttgatgaggtaatcgttagtattgatttcggtattgaataggcgatttaatatgttttggcggcggtgcgtgaatatattacgttggtagtgattgtttatcgtttatcgattattgttgatgtcgatattattttggtgttttatcgtgggtaagtcgtggagtagggtatttattagtaattgttggcggtttagggacgt

SEQ ID NO: 36774 - DNA, 565 bp, Artificial Sequence
  chemically treated genomic DNA (Homo sapiens) CpG-island No: 36774
acgtccctaaaccgccaacaattactaataaataccctactccacgacttacccacgataaaacaccaaaataatatcgacatcaacaataatcgataaacgataaacaatcactaccaacgtaatatattcacgcaccgccgccaaaacatattaaatcgcctattcaataccgaaatcaatactaacgattacctcatcaaaaatcaaaatttacgacgtctcgaccaacacgcgcgccaataccaacaattacttttacccaactaaaaaattattcccctactcgcccaacgacgtataaataccgtcgctcatactaaacgccaactccgccaattacacgatttccaacgcctaccaaacgcgttcttcgaaaatatcccgcccaacgtcacgttaacgaaaaaaatatccgccaacaccaccgaatcttactacaccattaccacgccctaacgcaacgcgctataacttaacgaacttaataaacgaccatcaaaacgaatctcaccttccgttaacgaataataacccatcaataaactaacgaaaatacttttac

SEQ ID NO: 36775 - DNA, 565 bp, Artificial Sequence
  chemically treated genomic DNA (Homo sapiens) CpG-island No: 36775
gcgtttttgggtcgttagtagttgttggtgagtgttttgttttacggtttgtttacgatgaagtattagaatggtgtcggtattaataatggtcgataagcggtgagtaattattattagcgtggtatgtttacgtatcgtcgttagagtatgttgaatcgtttgtttagtatcggagttaatgttggcggttgttttattaaggattaggatttgcggcgtttcgattagtacgcgcgttagtgttagtagttgtttttgtttaattgagagattatttttttgttcgtttagcggcgtgtaaatatcgtcgtttatgttaagcgttagtttcgttagttgtacggtttttagcgtttgttagacgcgtttttcggagatatttcgtttagcgttacgttggcgaggaaggtattcgttagtattatcggattttgttgtattattgttacgttttggcgtagcgcgttgtgatttagcgaatttaatggacgattattaaggcgaattttatttttcgttagcgggtaatagtttattaataaattggcgagggtgtttttgt

SEQ ID NO: 36776 - DNA, 565 bp, Artificial Sequence
  chemically treated genomic DNA (Homo sapiens) CpG-island No: 36776
acaaaaacaccctcgccaatttattaataaactattacccgctaacgaaaaataaaattcgccttaataatcgtccattaaattcgctaaatcacaacgcgctacgccaaaacgtaacaataatacaacaaaatccgataatactaacgaataccttcctcgccaacgtaacgctaaacgaaatatctccgaaaaacgcgtctaacaaacgctaaaaaccgtacaactaacgaaactaacgcttaacataaacgacgatatttacacgccgctaaacgaacaaaaaaataatctctcaattaaacaaaaacaactactaacactaacgcgcgtactaatcgaaacgccgcaaatcctaatccttaataaaacaaccgccaacattaactccgatactaaacaaacgattcaacatactctaacgacgatacgtaaacataccacgctaataataattactcaccgcttatcgaccattattaataccgacaccattctaatacttcatcgtaaacaaaccgtaaaacaaaacactcaccaacaactactaacgacccaaaaacgc

SEQ ID NO: 36777 - DNA, 952 bp, Artificial Sequence
  chemically treated genomic DNA (Homo sapiens) CpG-island No: 36777
gtaggtcggggcgattattatgttgatcgtgcgtttggggtcggtgatttcgtttatgattggcggtttattgttggcgatcggtggcgtagtttggaattacgggttggcggcggcgggtacgtttattattttgttatcgttgttaagtttttcggcgttgttatcgttatcgtagtcgcgtgagtattcgttgaaattattattggtaggatttcgttttttgtttgttagttcgttggtgggcgggattgcgttgttgggtggtttattgacgatggcgagcgcggtgcgggtattgtattcggcgttggttgataattggtagatgttagcggtatagattggttttttttacgcggcgatttcgttcggcgcggttattggtgcgttaattagcgggaagttggtatatagtgcgcgattagggttattgatgttgttttttacgttgggatcgtttttcgttattggtttgtttggtttgatgtcgatgtggattttaggcgtggtttgtttggcgttgttcggttggttgagtgcggttagttcgttgttgtaatatataatgttgtaaacgtaaatttcggaagcgatgttagggcggattaacggtttgtggacggcgtagaacgtgacgggcgatgttataggcgcggcgttgttgggtggtttgggcgcgatgatgatatcggttgttttcgttaagcgcgagcggttttggtttgttgattatcggcgtgtttgttattgttggtgttggtggagttgcgatattttcgttagacgtcgtcgtaggtgatagcgttcgatagttaatgtttaaaatagcgttttaagtttatttagtattgtgtagtggcgttgtagtaatttagacggaacgtttcggtttttagcgtataaatttgtttgttttgtattgtaggtaggtgtagcgagtagcggatta

SEQ ID NO: 36778 - DNA, 952 bp, Artificial Sequence
  chemically treated genomic DNA (Homo sapiens) CpG-island No: 36778
taatccgctactcgctacacctacctacaatacaaaacaaacaaatttatacgctaaaaaccgaaacgttccgtctaaattactacaacgccactacacaatactaaataaacttaaaacgctattttaaacattaactatcgaacgctatcacctacgacgacgtctaacgaaaatatcgcaactccaccaacaccaacaataacaaacacgccgataatcaacaaaccaaaaccgctcgcgcttaacgaaaacaaccgatatcatcatcgcgcccaaaccacccaacaacgccgcgcctataacatcgcccgtcacgttctacgccgtccacaaaccgttaatccgccctaacatcgcttccgaaatttacgtttacaacattatatattacaacaacgaactaaccgcactcaaccaaccgaacaacgccaaacaaaccacgcctaaaatccacatcgacatcaaaccaaacaaaccaataacgaaaaacgatcccaacgtaaaaaacaacatcaataaccctaatcgcgcactatataccaacttcccgctaattaacgcaccaataaccgcgccgaacgaaatcgccgcgtaaaaaaaaccaatctataccgctaacatctaccaattatcaaccaacgccgaatacaatacccgcaccgcgctcgccatcgtcaataaaccacccaacaacgcaatcccgcccaccaacgaactaacaaacaaaaaacgaaatcctaccaataataatttcaacgaatactcacgcgactacgataacgataacaacgccgaaaaacttaacaacgataacaaaataataaacgtacccgccgccgccaacccgtaattccaaactacgccaccgatcgccaacaataaaccgccaatcataaacgaaatcaccgaccccaaacgcacgatcaacataataatcgccccgacctac

SEQ ID NO: 36779 - DNA, 952 bp, Artificial Sequence
  chemically treated genomic DNA (Homo sapiens) CpG-island No: 36779
taattcgttgttcgttgtatttgtttgtagtataaaataagtaggtttatgcgttgggaatcgagacgtttcgtttggattattatagcgttattgtatagtgttggataggtttaaggcgttgttttaagtattaattgtcggacgttgttatttgcggcggcgtttggcgaaaatgtcgtaattttattagtattagtaataataagtacgtcgataattaataaattaaaatcgttcgcgtttagcggaagtaatcggtgttattatcgcgtttaaattatttagtagcgtcgcgtttatggtatcgttcgttacgttttgcgtcgtttataaatcgttaattcgttttaatatcgttttcggggtttgcgtttgtagtattgtgtattgtagtaacgagttgatcgtatttaattagtcgaatagcgttagataaattacgtttaaaatttatatcggtattaggttaaatagattaatggcgaggaacgattttagcgtggagagtagtattaataattttggtcgcgtattatgtgttagtttttcgttggttaacgtattaatagtcgcgtcgagcgggatcgtcgcgtagagaaaattaatttgtgtcgttgatatttgttagttgttagttagcgtcggatatagtattcgtatcgcgttcgttatcgttaataaattatttagtagcgtaatttcgtttattagcgggttggtaagtagaaaacgaaattttgttagtaatgattttaacggatgtttacgcggttgcggtggcggtggtaacgtcggaaggtttaataacggtagtaaggtaataaacgtgttcgtcgtcgttagttcgtagttttaggttacgttatcggtcgttagtaataaatcgttaattatgggcgaaattatcgattttagacgtacggttaatatggtgatcgtttcggtttgt

SEQ ID NO: 36780 - DNA, 952 bp, Artificial Sequence
  chemically treated genomic DNA (Homo sapiens) CpG-island No: 36780
acaaaccgaaacgatcaccatattaaccgtacgtctaaaatcgataatttcgcccataattaacgatttattactaacgaccgataacgtaacctaaaactacgaactaacgacgacgaacacgtttattaccttactaccgttattaaaccttccgacgttaccaccgccaccgcaaccgcgtaaacatccgttaaaatcattactaacaaaatttcgttttctacttaccaacccgctaataaacgaaattacgctactaaataatttattaacgataacgaacgcgatacgaatactatatccgacgctaactaacaactaacaaatatcaacgacacaaattaattttctctacgcgacgatcccgctcgacgcgactattaatacgttaaccaacgaaaaactaacacataatacgcgaccaaaattattaatactactctccacgctaaaatcgttcctcgccattaatctatttaacctaataccgatataaattttaaacgtaatttatctaacgctattcgactaattaaatacgatcaactcgttactacaatacacaatactacaaacgcaaaccccgaaaacgatattaaaacgaattaacgatttataaacgacgcaaaacgtaacgaacgataccataaacgcgacgctactaaataatttaaacgcgataataacaccgattacttccgctaaacgcgaacgattttaatttattaattatcgacgtacttattattactaatactaataaaattacgacattttcgccaaacgccgccgcaaataacaacgtccgacaattaatacttaaaacaacgccttaaacctatccaacactatacaataacgctataataatccaaacgaaacgtctcgattcccaacgcataaacctacttattttatactacaaacaaatacaacgaacaacgaatta

SEQ ID NO: 36781 - DNA, 701 bp, Artificial Sequence
  chemically treated genomic DNA (Homo sapiens) CpG-island No: 36781
gaagacgcgcggttttagcggcgtaggttttacgcggaacgtcggtatcgagtagcggttgtattattatttttagtgttgagatacgcgggatgacgcgtagaaattggtttatttagtcgacggtggttttgcggatttttattattttgcgcgttggcgcggtgattaggtttatttattcgttatcgtgtttgatttggatttgattttcgtcgggtagatagttggcgtatagcgagcgtagtagagttgatttgtcgttgtcggaatggtcgtggagtattacgtattcgttcgcgttgacggtgagcgaggcgcgattgaggacgggtaggcgtacgtcgttttgttggtgtaggatgaaggttttattgacgttttgtacgttaattatttttcgtttcgtggttcgggtgtcggatgcgacgttggcgcgttttattcgatttacggggagcgtatgtgtaggtcggataaggcgtttacgtcgtattcggtaatggtgtttaaatgtaatacgttttattcgttttggattttattcgttaattaacgcgtcgtagtaataattttttgttttagagataaatcgttattattcgtcggtaaattttgtggaaagagtaatgtgaaattagcgagataatgcgttagacgtgtacgtagtaaacggttatgaataatttcgtcgttaaata

SEQ ID NO: 36782 - DNA, 701 bp, Artificial Sequence
  chemically treated genomic DNA (Homo sapiens) CpG-island No: 36782
tatttaacgacgaaattattcataaccgtttactacgtacacgtctaacgcattatctcgctaatttcacattactctttccacaaaatttaccgacgaataataacgatttatctctaaaacaaaaaattattactacgacgcgttaattaacgaataaaatccaaaacgaataaaacgtattacatttaaacaccattaccgaatacgacgtaaacgccttatccgacctacacatacgctccccgtaaatcgaataaaacgcgccaacgtcgcatccgacacccgaaccacgaaacgaaaaataattaacgtacaaaacgtcaataaaaccttcatcctacaccaacaaaacgacgtacgcctacccgtcctcaatcgcgcctcgctcaccgtcaacgcgaacgaatacgtaatactccacgaccattccgacaacgacaaatcaactctactacgctcgctatacgccaactatctacccgacgaaaatcaaatccaaatcaaacacgataacgaataaataaacctaatcaccgcgccaacgcgcaaaataataaaaatccgcaaaaccaccgtcgactaaataaaccaatttctacgcgtcatcccgcgtatctcaacactaaaaataataatacaaccgctactcgataccgacgttccgcgtaaaacctacgccgctaaaaccgcgcgtcttc

SEQ ID NO: 36783 - DNA, 701 bp, Artificial Sequence
  chemically treated genomic DNA (Homo sapiens) CpG-island No: 36783
tatttagcggcggggttatttataatcgtttgttgcgtgtacgtttggcgtattatttcgttgattttatattgttttttttatagagtttatcggcgggtgatggcggtttgtttttggggtagggggttattgttgcggcgcgttggttagcgggtgaagtttagaacggataaaacgtgttgtatttggatattattgtcggatgcggcgtaaacgttttattcggtttatatatgcgtttttcgtaggtcggataagacgcgttagcgtcgtattcgatattcgaattacgaggcgaaaaatgattaacgtataaaacgttagtaaaatttttattttgtattagtaaaacggcgtgcgtttgttcgtttttaatcgcgtttcgtttatcgttaacgcgggcgaatgcgtggtgttttacggttatttcggtagcggtaaattaattttgttacgttcgttgtacgttaattatttgttcgacgaaggttaaatttagattaaatacggtgacgagtgggtagatttggttatcgcgttagcgcgtaaagtggtggaaattcgtaaaattatcgtcggttgggtgagttagtttttgcgcgttatttcgcgtattttagtattggaagtggtgatgtagtcgttgttcgatatcggcgtttcgcgtgaagtttgcgtcgttaaagtcgcgcgttttt

SEQ ID NO: 36784 - DNA, 701 bp, Artificial Sequence
  chemically treated genomic DNA (Homo sapiens) CpG-island No: 36784
aaaaacgcgcgactttaacgacgcaaacttcacgcgaaacgccgatatcgaacaacgactacatcaccacttccaatactaaaatacgcgaaataacgcgcaaaaactaactcacccaaccgacgataattttacgaatttccaccactttacgcgctaacgcgataaccaaatctacccactcgtcaccgtatttaatctaaatttaaccttcgtcgaacaaataattaacgtacaacgaacgtaacaaaattaatttaccgctaccgaaataaccgtaaaacaccacgcattcgcccgcgttaacgataaacgaaacgcgattaaaaacgaacaaacgcacgccgttttactaatacaaaataaaaattttactaacgttttatacgttaatcatttttcgcctcgtaattcgaatatcgaatacgacgctaacgcgtcttatccgacctacgaaaaacgcatatataaaccgaataaaacgtttacgccgcatccgacaataatatccaaatacaacacgttttatccgttctaaacttcacccgctaaccaacgcgccgcaacaataaccccctaccccaaaaacaaaccgccatcacccgccgataaactctataaaaaaaacaatataaaatcaacgaaataatacgccaaacgtacacgcaacaaacgattataaataaccccgccgctaaata

SEQ ID NO: 36785 - DNA, 546 bp, Artificial Sequence
  chemically treated genomic DNA (Homo sapiens) CpG-island No: 36785
gagtaagttatcgatttttggatggcgatcgtatatcgttatttttacgttattgcgggttagaatattcgtataggttagttttgtcggatttgtatcgataatcgttattcgtttgtttattttggtgatatggtttaagttaggacgttaatttttcgttaacgtttgatttgaaatgtagcgtttaatgttgtcgatagttatcgcgtcgtgtttatcgcgaatagtataggtatttttatataaacggttttgcggataaacgcgttcggtaattttcggtagggtgttggtttggtgagaaagttcgacggcggcgtcgatgttttcggtttttattagtttaatttattgcggtatatggttatgtagcgggtaggtttatttataaacgttgtgttcgtcgtatttaaggtagcgcgaggtttttcgttgtgtttggtcggcgcgaaatggtagataaattttattaaaatcggttttgcgcgttttaatcgttcgtttattttcgttcgttacgcgcgggcgtttgttgggtttgtg

SEQ ID NO: 36786 - DNA, 546 bp, Artificial Sequence
  chemically treated genomic DNA (Homo sapiens) CpG-island No: 36786
cacaaacccaacaaacgcccgcgcgtaacgaacgaaaataaacgaacgattaaaacgcgcaaaaccgattttaataaaatttatctaccatttcgcgccgaccaaacacaacgaaaaacctcgcgctaccttaaatacgacgaacacaacgtttataaataaacctacccgctacataaccatataccgcaataaattaaactaataaaaaccgaaaacatcgacgccgccgtcgaactttctcaccaaaccaacaccctaccgaaaattaccgaacgcgtttatccgcaaaaccgtttatataaaaatacctatactattcgcgataaacacgacgcgataactatcgacaacattaaacgctacatttcaaatcaaacgttaacgaaaaattaacgtcctaacttaaaccatatcaccaaaataaacaaacgaataacgattatcgatacaaatccgacaaaactaacctatacgaatattctaacccgcaataacgtaaaaataacgatatacgatcgccatccaaaaatcgataacttactc

SEQ ID NO: 36787 - DNA, 546 bp, Artificial Sequence
  chemically treated genomic DNA (Homo sapiens) CpG-island No: 36787
tataaatttagtaaacgttcgcgcgtggcgagcgggaataaacgggcgattgaagcgcgtaaaatcggttttgatgaaatttatttgttatttcgcgtcgattaggtataacgggaagtttcgcgttgttttaagtgcggcgagtatagcgtttgtgaatggatttgttcgttgtataattatatatcgtagtggattgaattggtgaaagtcggaaatatcgacgtcgtcgtcgagtttttttattagattaatattttgtcggaaattatcggacgcgtttgttcgtaagatcgtttgtgtgaaggtgtttgtattattcgcgatgagtacggcgcggtaattatcggtaatattgaacgttatattttagattaggcgttggcgaaaggttggcgttttgatttaagttatgttattaaagtggataagcgggtggcgattatcggtgtaggttcggtagggttggtttgtgcggatgttttgattcgtaatggcgtgggggtgacggtgtacgatcgttatttagaaatcggtggtttgttt

SEQ ID NO: 36788 - DNA, 546 bp, Artificial Sequence
  chemically treated genomic DNA (Homo sapiens) CpG-island No: 36788
aaacaaaccaccgatttctaaataacgatcgtacaccgtcacccccacgccattacgaatcaaaacatccgcacaaaccaaccctaccgaacctacaccgataatcgccacccgcttatccactttaataacataacttaaatcaaaacgccaacctttcgccaacgcctaatctaaaatataacgttcaatattaccgataattaccgcgccgtactcatcgcgaataatacaaacaccttcacacaaacgatcttacgaacaaacgcgtccgataatttccgacaaaatattaatctaataaaaaaactcgacgacgacgtcgatatttccgactttcaccaattcaatccactacgatatataattatacaacgaacaaatccattcacaaacgctatactcgccgcacttaaaacaacgcgaaacttcccgttatacctaatcgacgcgaaataacaaataaatttcatcaaaaccgattttacgcgcttcaatcgcccgtttattcccgctcgccacgcgcgaacgtttactaaatttata

SEQ ID NO: 36789 - DNA, 864 bp, Artificial Sequence
  chemically treated genomic DNA (Homo sapiens) CpG-island No: 36789
ttgggtaatcggcgtaggtaaaggtatcggttacgttacggcgttggcgtttgttgaggcgggagcgaaagttataggttttgattaagcgtttatttaggagtaatatttttttgcgatcgaagtgatggatgttgtcgacgttgcgtaggtcgcgtaagtgtgttagcgattgttagttgaaacggagcgattggacgcgttggttaatgcggcgggaattttacgtatgggcgcgatcgattagtttagtaaagaggattggtagtagatttttgcggttaacgtcggcggtgcgtttaatttgttttagtaaattatgaattagtttcgtcgttagcggggcggggcgattgttattgtggcgttcgacgtcgcgtatacgtcgcgtattggtatgagtgtttatggcgtatcgaaagcggcgttgaaaagtttggcgttgagcgtcgggttggaattggcgggtagcggcgtgcgttgtaatgtgggtttcgttttggttttatcgatatcgatatgtaacgtacgttgtgggtgagcgatgacgtcgaagaatagcgtattcgcggttttggcgagtagtttaaattcggtatttcgttggggaaaatcgttcgtttataagagatcgttaatacgattttgtttttcgtttttgatttcgttagttatattattttataggatattgtggtcgatggcggtttaacgttgggggtataagtatgatttggaaacgttatttaacgttcgacgaattgaacgttattagcgataatataatggtggcgtatttgggaattgtgtatattcgtttgggcgatgatgtgttggaagtcgaaatgtcggttgatattcgta

SEQ ID NO: 36790 - DNA, 864 bp, Artificial Sequence
  chemically treated genomic DNA (Homo sapiens) CpG-island No: 36790
tacgaatatcaaccgacatttcgacttccaacacatcatcgcccaaacgaatatacacaattcccaaatacgccaccattatattatcgctaataacgttcaattcgtcgaacgttaaataacgtttccaaatcatacttatacccccaacgttaaaccgccatcgaccacaatatcctataaaataatataactaacgaaatcaaaaacgaaaaacaaaatcgtattaacgatctcttataaacgaacgattttccccaacgaaataccgaatttaaactactcgccaaaaccgcgaatacgctattcttcgacgtcatcgctcacccacaacgtacgttacatatcgatatcgataaaaccaaaacgaaacccacattacaacgcacgccgctacccgccaattccaacccgacgctcaacgccaaacttttcaacgccgctttcgatacgccataaacactcataccaatacgcgacgtatacgcgacgtcgaacgccacaataacaatcgccccgccccgctaacgacgaaactaattcataatttactaaaacaaattaaacgcaccgccgacgttaaccgcaaaaatctactaccaatcctctttactaaactaatcgatcgcgcccatacgtaaaattcccgccgcattaaccaacgcgtccaatcgctccgtttcaactaacaatcgctaacacacttacgcgacctacgcaacgtcgacaacatccatcacttcgatcgcaaaaaaatattactcctaaataaacgcttaatcaaaacctataactttcgctcccgcctcaacaaacgccaacgccgtaacgtaaccgatacctttacctacgccgattacccaa

SEQ ID NO: 36791 - DNA, 864 bp, Artificial Sequence
  chemically treated genomic DNA (Homo sapiens) CpG-island No: 36791
tacgggtattaatcggtatttcggtttttagtatattatcgtttagacgggtatatataatttttagatgcgttattattgtgttatcgttggtggcgtttagttcgtcgagcgttaaatggcgtttttagattatgtttatgtttttagcgttgagtcgttatcgattataatattttgtagggtaatatggttggcgaggttagaggcgaggaataaaatcgtgttggcgattttttgtggacgggcgattttttttagcggaatgtcgagtttaaattgttcgttaaagtcgcgaatacgttgtttttcggcgttatcgtttatttatagcgtgcgttgtatatcggtgtcggtggagttagggcgaaatttatattatagcgtacgtcgttattcgttagttttagttcgacgtttaacgttaggttttttagcgtcgttttcgatgcgttataagtatttatgttaatacgcggcgtgtgcgcggcgtcggacgttatagtgataatcgtttcgtttcgttgacggcgaaattggtttatggtttgttggaataggttaaacgtatcgtcgacgttaatcgtaaaagtttgttgttagttttttttattgagttgatcggtcgcgtttatgcgtaaaattttcgtcgtattgattagcgcgtttagtcgtttcgttttagttaatagtcgttgatatatttgcgcgatttgcgtagcgtcggtaatatttattatttcggtcgtaaagggatattgtttttgagtgaacgtttgattaaaatttgtaattttcgttttcgttttaataaacgttagcgtcgtggcgtagtcgatatttttatttgcgtcggttatttag

SEQ ID NO: 36792 - DNA, 864 bp, Artificial Sequence
  chemically treated genomic DNA (Homo sapiens) CpG-island No: 36792
ctaaataaccgacgcaaataaaaatatcgactacgccacgacgctaacgtttattaaaacgaaaacgaaaattacaaattttaatcaaacgttcactcaaaaacaatatccctttacgaccgaaataataaatattaccgacgctacgcaaatcgcgcaaatatatcaacgactattaactaaaacgaaacgactaaacgcgctaatcaatacgacgaaaattttacgcataaacgcgaccgatcaactcaataaaaaaaactaacaacaaacttttacgattaacgtcgacgatacgtttaacctattccaacaaaccataaaccaatttcgccgtcaacgaaacgaaacgattatcactataacgtccgacgccgcgcacacgccgcgtattaacataaatacttataacgcatcgaaaacgacgctaaaaaacctaacgttaaacgtcgaactaaaactaacgaataacgacgtacgctataatataaatttcgccctaactccaccgacaccgatatacaacgcacgctataaataaacgataacgccgaaaaacaacgtattcgcgactttaacgaacaatttaaactcgacattccgctaaaaaaaatcgcccgtccacaaaaaatcgccaacacgattttattcctcgcctctaacctcgccaaccatattaccctacaaaatattataatcgataacgactcaacgctaaaaacataaacataatctaaaaacgccatttaacgctcgacgaactaaacgccaccaacgataacacaataataacgcatctaaaaattatatatacccgtctaaacgataatatactaaaaaccgaaataccgattaatacccgta

SEQ ID NO: 36793 - DNA, 615 bp, Artificial Sequence
  chemically treated genomic DNA (Homo sapiens) CpG-island No: 36793
tgtggttggggtcggttaagtcgaatatcggttatacgtaagcggcggcgggtgtggttggtgtgattaagatggtgatggcgatgcggtacgggtagttgttacgtacgttgtacgtggaatcgtcgtcgtcggaggtggattggtcggcggggacggtttaattttttacggagaatacgttttggtttaggagtggtcgtgttcgtcgggtgggggtgtcgtcgttcgggattagtggtattaacgcgtacgttattttcgaatagttttcgggagtgtcgagttagtttgcggggtcgggttcgggttttgtcgtggatgtttcggtggtgtcgtggatggtgtcgggtaaaatattcgaagcgttattcgcgtaggtaacggcgttgatgatttatttggacgagcgatttgatgttttttcgttggatgttgggtattcgttggcgttgatacggtcggcgttggatgaacgagcggtggtgttggggttcgatcgtgaaacgttgttgtgcggtgtgaagcgttgtttgtcggttatgaggtttttgggttggtgatcggattttggggggtttgggggtcgattgggttttggttttttcgttaggg

SEQ ID NO: 36794 - DNA, 615 bp, Artificial Sequence
  chemically treated genomic DNA (Homo sapiens) CpG-island No: 36794
ccctaacgaaaaaaccaaaacccaatcgacccccaaaccccccaaaatccgatcaccaacccaaaaacctcataaccgacaaacaacgcttcacaccgcacaacaacgtttcacgatcgaaccccaacaccaccgctcgttcatccaacgccgaccgtatcaacgccaacgaatacccaacatccaacgaaaaaacatcaaatcgctcgtccaaataaatcatcaacgccgttacctacgcgaataacgcttcgaatattttacccgacaccatccacgacaccaccgaaacatccacgacaaaacccgaacccgaccccgcaaactaactcgacactcccgaaaactattcgaaaataacgtacgcgttaataccactaatcccgaacgacgacacccccacccgacgaacacgaccactcctaaaccaaaacgtattctccgtaaaaaattaaaccgtccccgccgaccaatccacctccgacgacgacgattccacgtacaacgtacgtaacaactacccgtaccgcatcgccatcaccatcttaatcacaccaaccacacccgccgccgcttacgtataaccgatattcgacttaaccgaccccaaccaca

SEQ ID NO: 36795 - DNA, 615 bp, Artificial Sequence
  chemically treated genomic DNA (Homo sapiens) CpG-island No: 36795
ttttggcgggaaaattaaaatttaatcggtttttaggttttttagaattcggttattaatttagaagttttatgatcggtagatagcgttttatatcgtataataacgttttacggtcgaattttagtattatcgttcgtttatttagcgtcgatcgtgttaacgttagcgagtatttaatatttagcgaggagatattaggtcgttcgtttagataggttattaacgtcgttgtttgcgcggatagcgtttcgggtgttttgttcgatattatttacggtattatcggaatatttacgatagaattcgaattcggtttcgtagattgattcggtattttcgggggttgttcgaggatgacgtgcgcgttagtattattgatttcgaacgacgatatttttattcgacgaatacgattatttttgggttagggcgtgtttttcgtaaggagttgaatcgttttcgtcgattaatttattttcggcgacggcgattttacgtgtaacgtgcgtggtagttgttcgtgtcgtatcgttattattattttgattatattagttatattcgtcgtcgtttgcgtatgatcgatgttcgatttgatcgattttaattata

SEQ ID NO: 36796 - DNA, 615 bp, Artificial Sequence
  chemically treated genomic DNA (Homo sapiens) CpG-island No: 36796
tataattaaaatcgatcaaatcgaacatcgatcatacgcaaacgacgacgaatataactaatataatcaaaataataataacgatacgacacgaacaactaccacgcacgttacacgtaaaatcgccgtcgccgaaaataaattaatcgacgaaaacgattcaactccttacgaaaaacacgccctaacccaaaaataatcgtattcgtcgaataaaaatatcgtcgttcgaaatcaataatactaacgcgcacgtcatcctcgaacaacccccgaaaataccgaatcaatctacgaaaccgaattcgaattctatcgtaaatattccgataataccgtaaataatatcgaacaaaacacccgaaacgctatccgcgcaaacaacgacgttaataacctatctaaacgaacgacctaatatctcctcgctaaatattaaatactcgctaacgttaacacgatcgacgctaaataaacgaacgataatactaaaattcgaccgtaaaacgttattatacgatataaaacgctatctaccgatcataaaacttctaaattaataaccgaattctaaaaaacctaaaaaccgattaaattttaattttcccgccaaaa

SEQ ID NO: 36797 - DNA, 520 bp, Artificial Sequence
  chemically treated genomic DNA (Homo sapiens) CpG-island No: 36797
tcgttatcgttttttttttttttttttttggtcgttacgtagcgtcgttttatgtaggtcgtagcggttaaggcggggagttcggggcgggcgtttaggtaaggaattttcgagtcgggagagttggattaggagcgtttttcggtttcgttcgaataaggacgtcggtagagtcggtagtcgagtgtgtcgttttcgtttttagagtcgcgtcggtggtggtaaaaagcggcggcggtgggggtaaaaagttggggcggcggggataaaaagtttcggtggcgggggtaaaaagttacggcggtaaaaatcggcggcggcggggtaaaattcgtagggtaaaaagtcgtaaaaagcgcggcggcgggggtaagaagtcggtggcgggagtaaaaaattgcggcggtaaaaaggggcggcggcgggggtaaaaagtcgtaaaaagtttcgtttagggggtaaaagcgtggcgtcgggggtaagaatcgcggcggcgtgtaaaaaaaatatatatataatt

SEQ ID NO: 36798 - DNA, 520 bp, Artificial Sequence
  chemically treated genomic DNA (Homo sapiens) CpG-island No: 36798
aattatatatatattttttttacacgccgccgcgattcttacccccgacgccacgcttttaccccctaaacgaaactttttacgactttttacccccgccgccgcccctttttaccgccgcaattttttactcccgccaccgacttcttacccccgccgccgcgctttttacgactttttaccctacgaattttaccccgccgccgccgatttttaccgccgtaactttttacccccgccaccgaaactttttatccccgccgccccaactttttacccccaccgccgccgctttttaccaccaccgacgcgactctaaaaacgaaaacgacacactcgactaccgactctaccgacgtccttattcgaacgaaaccgaaaaacgctcctaatccaactctcccgactcgaaaattccttacctaaacgcccgccccgaactccccgccttaaccgctacgacctacataaaacgacgctacgtaacgaccaaaaaaaaaaaaaaaaaaaacgataacga

SEQ ID NO: 36799 - DNA, 520 bp, Artificial Sequence
  chemically treated genomic DNA (Homo sapiens) CpG-island No: 36799
aattatatatatattttttttgtacgtcgtcgcgatttttgttttcgacgttacgtttttgttttttgagcgaggttttttgcggttttttgttttcgtcgtcgtttttttttgtcgtcgtagttttttgttttcgttatcggttttttgttttcgtcgtcgcgttttttgcggttttttgttttgcggattttgtttcgtcgtcgtcggtttttgtcgtcgtggttttttattttcgttatcgaggttttttgttttcgtcgttttagttttttgtttttatcgtcgtcgttttttgttattatcgacgcggttttgagggcgggagcggtatattcggttgtcggttttatcggcgtttttgttcgggcggagtcgaggggcgtttttggtttagttttttcggttcgggggttttttgtttaggcgttcgtttcgagtttttcgttttggtcgttgcggtttgtatagagcggcgttgcgtagcggttaggggagagaagaaggagggcggtggcgg

SEQ ID NO: 36800 - DNA, 520 bp, Artificial Sequence
  chemically treated genomic DNA (Homo sapiens) CpG-island No: 36800
ccgccaccgccctccttcttctctcccctaaccgctacgcaacgccgctctatacaaaccgcaacgaccaaaacgaaaaactcgaaacgaacgcctaaacaaaaaacccccgaaccgaaaaaactaaaccaaaaacgcccctcgactccgcccgaacaaaaacgccgataaaaccgacaaccgaatataccgctcccgccctcaaaaccgcgtcgataataacaaaaaacgacgacgataaaaacaaaaaactaaaacgacgaaaacaaaaaacctcgataacgaaaataaaaaaccacgacgacaaaaaccgacgacgacgaaacaaaatccgcaaaacaaaaaaccgcaaaaaacgcgacgacgaaaacaaaaaaccgataacgaaaacaaaaaactacgacgacaaaaaaaaacgacgacgaaaacaaaaaaccgcaaaaaacctcgctcaaaaaacaaaaacgtaacgtcgaaaacaaaaatcgcgacgacgtacaaaaaaaatatatatataatt

SEQ ID NO: 36801 - DNA, 988 bp, Artificial Sequence
  chemically treated genomic DNA (Homo sapiens) CpG-island No: 36801
  unsure (230, 276, 400, 503, 513, 618, 638, 642, 656, 674, 757, 767)
  unsure (882, 940, 965, 983)
gttcgttcgtataattttcgtttttattttttcgtttttttaattatatttttttttatttatttatttttattttattcgtacgttttcgtcgtatacgttatttatatacgttcgtttaatacgtttttcgcgcgcgttcgtttattatatttcgtacgttcgtacgttattatagtattttagttagtttttatattttgcgttcgtatttcgtcgtatttttattnatcgttttttcgttattttatttttacgttttcgcgcgtatatatngttcgtatcgcgttcgtttttacgttatcgtttatttttatattcgcgattttcgcgttttatatcgtcgtcgcgcgcgtacgtatcgtcgcgttttttcgtcgtttattttcgcgcgttcgtnttatcgcgttcgcgtttttttttttttttttttttagtttacgttcgtacgtatcgcgcgttatatttattatcgtatttatcgttttttttttatttcgttnttcgcgtttnttcgtacgtattatttttcgttacgttatattcgcgttttttatcgttcgcgttttttcgtttttttacgttatcgtcgtatataagttttttcgttttttgtantcgcgttcgcgtttttcgtnatanttcgcgttaataanttttcgttttattataantttaatatacgtaattacgttttcgtatcgttatcggttttcgagttcgtttcgttttttagttttttcgcgttaataattangttttttatntcgttttaatacgtaatcgttgcgtagtttttatatcgttttaatatcgcgtcgtaaataattcgtttttcgtttagcgcgtcgtatcgcgttatttttatcgttgtatatttantttagttttaatattttaacgttttttttcgcgcgtcgtcgtacgttcgttcgttaanatttatttatatattcgcgtaaatnttttaaagcggtacgttntttcg

SEQ ID NO: 36802 - DNA, 988 bp, Artificial Sequence
  chemically treated genomic DNA (Homo sapiens) CpG-island No: 36802
  unsure (6, 24, 49, 107, 222, 232, 315, 333, 347, 351, 371, 476, 486)
  unsure (589, 713, 759)
cgaaanaacgtaccgctttaaaanatttacgcgaatatataaataaatnttaacgaacgaacgtacgacgacgcgcgaaaaaaaacgttaaaatattaaaactaaantaaatatacaacgataaaaataacgcgatacgacgcgctaaacgaaaaacgaattatttacgacgcgatattaaaacgatataaaaactacgcaacgattacgtattaaaacganataaaaaacntaattattaacgcgaaaaaactaaaaaacgaaacgaactcgaaaaccgataacgatacgaaaacgtaattacgtatattaaanttataataaaacgaaaanttattaacgcgaantatnacgaaaaacgcgaacgcgantacaaaaaacgaaaaaacttatatacgacgataacgtaaaaaaacgaaaaaacgcgaacgataaaaaacgcgaatataacgtaacgaaaaataatacgtacgaanaaacgcgaanaacgaaataaaaaaaaaacgataaatacgataataaatataacgcgcgatacgtacgaacgtaaactaaaaaaaaaaaaaaaaaaaaacgcgaacgcgataanacgaacgcgcgaaaataaacgacgaaaaaacgcgacgatacgtacgcgcgcgacgacgatataaaacgcgaaaatcgcgaatataaaaataaacgataacgtaaaaacgaacgcgatacgaacnatatatacgcgcgaaaacgtaaaaataaaataacgaaaaaacgatnaataaaaatacgacgaaatacgaacgcaaaatataaaaactaactaaaatactataataacgtacgaacgtacgaaatataataaacgaacgcgcgcgaaaaacgtattaaacgaacgtatataaataacgtatacgacgaaaacgtacgaataaaataaaaataaataaataaaaaaaaatataattaaaaaaacgaaaaaataaaaacgaaaattatacgaacgaac

SEQ ID NO: 36803 - DNA, 988 bp, Artificial Sequence
  chemically treated genomic DNA (Homo sapiens) CpG-island No: 36803
  unsure (6, 24, 49, 107, 222, 232, 315, 333, 347, 351, 371, 476, 486)
  unsure (589, 713, 759)
cggggnggcgtgtcgttttgaggngtttgcgcggatgtgtgagtgggtnttgacgggcgagcgtgcgacggcgcgcgaagaaaagcgttgggatgttggggttggantgggtgtgtagcggtgagggtggcgcgatgcggcgcgttggacgaggagcgggttgtttgcggcgcggtgttggagcggtgtgggagttgcgtagcggttgcgtgttgagacgangtggggagtntggttgttggcgcgagaaggttgggaagcgaagcgagttcgagagtcggtgacggtgcgggggcgtgattgcgtgtgttgganttgtgatgagacgggganttgttggcgcggantgtngcgggaagcgcgagcgcgantgtagagagcgaggggatttgtgtgcggcggtggcgtgggggggcgagagagcgcgagcggtggggagcgcgggtgtggcgtggcgagaagtggtgcgtgcgagngggcgcgagnggcggggtgggagagggacgatgagtgcgatggtgggtgtggcgcgcggtgcgtgcgagcgtgggttggagagagaggagagagagagcgcgagcgcggtggngcgggcgcgcgagagtgagcggcgagagagcgcggcggtgcgtgcgcgcgcggcggcggtgtgggacgcgggagtcgcgagtgtgagagtgggcgatggcgtggggacgagcgcgatgcgagtngtgtgtgcgcgcgggagcgtggggatgagatggcgggaggacgatnggtggggatgcggcgagatgcgggcgtagagtgtgagagttggttgggatgttgtgatggcgtgcgagcgtgcggagtgtgatgggcgagcgcgcgcgaggggcgtgttgagcgagcgtgtgtgagtggcgtgtgcggcgggggcgtgcgggtggagtaaaaatgggtgagtgggggagagtgtggttgggagggcgggggagtgagagcgagagttgtgcgagcgagt

SEQ ID NO: 36804 - DNA, 988 bp, Artificial Sequence
  chemically treated genomic DNA (Homo sapiens) CpG-island No: 36804
  unsure (230, 276, 400, 503, 513, 618, 638, 642, 656, 674, 757, 767)
  unsure (882, 940, 965, 983)
actcgctcgcacaactctcgctctcactcccccgccctcccaaccacactctcccccactcacccatttttactccacccgcacgcccccgccgcacacgccactcacacacgctcgctcaacacgcccctcgcgcgcgctcgcccatcacactccgcacgctcgcacgccatcacaacatcccaaccaactctcacactctacgcccgcatctcgccgcatccccaccnatcgtcctcccgccatctcatccccacgctcccgcgcgcacacacnactcgcatcgcgctcgtccccacgccatcgcccactctcacactcgcgactcccgcgtcccacaccgccgccgcgcgcgcacgcaccgccgcgctctctcgccgctcactctcgcgcgcccgcnccaccgcgctcgcgctctctctctcctctctctccaacccacgctcgcacgcaccgcgcgccacacccaccatcgcactcatcgtccctctcccaccccgccnctcgcgcccnctcgcacgcaccacttctcgccacgccacacccgcgctccccaccgctcgcgctctctcgcccccccacgccaccgccgcacacaaatcccctcgctctctacantcgcgctcgcgcttcccgcnacantccgcgccaacaantccccgtctcatcacaantccaacacacgcaatcacgcccccgcaccgtcaccgactctcgaactcgcttcgcttcccaaccttctcgcgccaacaaccanactccccacntcgtctcaacacgcaaccgctacgcaactcccacaccgctccaacaccgcgccgcaaacaacccgctcctcgtccaacgcgccgcatcgcgccaccctcaccgctacacacccantccaaccccaacatcccaacgcttttcttcgcgcgccgtcgcacgctcgcccgtcaanacccactcacacatccgcgcaaacncctcaaaacgacacgccnccccg

SEQ ID NO: 36805 - DNA, 502 bp, Artificial Sequence
  chemically treated genomic DNA (Homo sapiens) CpG-island No: 36805
tttaggggcggcggtcgtttttcggtggcgacggtagaagtagcgataggcgtttggagtcggagtcgtttagttggggttcgcgatttatttcgagtttcggaggcgaggttcggagggggcgggtcggcgagagggcggagtcgcgttttttcgcgtatttgttatttttcgcgttagtttaggtgaagtttagggtttttttatcggttacgattcgggtcgatttatcggttaggaaggtcgcgttgtttatatattttttttggatttcgggtagtcgtttttgatttagttcgagtggcgtaagtagtacgcgttcgtatttttcgtttgatttgttttttttcggtttcggtgttcgttatttttatagtttttcgttatttattacgcgtttttagatttttgcggtcgaaatatcgcgagatttcgttcggggtagttgttattgtggtaaagaatttatttttttattatagcgtgcgtattagtaagtgaa

SEQ ID NO: 36806 - DNA, 502 bp, Artificial Sequence
  chemically treated genomic DNA (Homo sapiens) CpG-island No: 36806
ttcacttactaatacgcacgctataataaaaaaataaattctttaccacaataacaactaccccgaacgaaatctcgcgatatttcgaccgcaaaaatctaaaaacgcgtaataaataacgaaaaactataaaaataacgaacaccgaaaccgaaaaaaaacaaatcaaacgaaaaatacgaacgcgtactacttacgccactcgaactaaatcaaaaacgactacccgaaatccaaaaaaaatatataaacaacgcgaccttcctaaccgataaatcgacccgaatcgtaaccgataaaaaaaccctaaacttcacctaaactaacgcgaaaaataacaaatacgcgaaaaaacgcgactccgccctctcgccgacccgccccctccgaacctcgcctccgaaactcgaaataaatcgcgaaccccaactaaacgactccgactccaaacgcctatcgctacttctaccgtcgccaccgaaaaacgaccgccgcccctaaa

SEQ ID NO: 36807 - DNA, 502 bp, Artificial Sequence
  chemically treated genomic DNA (Homo sapiens) CpG-island No: 36807
tttatttgttgatacgtacgttgtggtaaaaaagtgaattttttattatagtagtagttgtttcgagcgaagtttcgcgatatttcggtcgtagggatttagaggcgcgtagtgagtggcggaggattgtgggggtggcgggtatcggagtcgggaagggataggttaggcggggagtgcgagcgcgtattgtttgcgttattcgggttgggttaggagcggttgttcgaggtttagaggaagtgtgtggatagcgcggtttttttggtcggtgagtcggttcgggtcgtggtcggtgaggggattttgagttttatttgggttagcgcggggagtgataggtgcgcgaaggagcgcggtttcgttttttcgtcgattcgtttttttcgggtttcgttttcggggttcgggatgagtcgcgggttttagttgagcggtttcggttttaggcgtttgtcgttgtttttgtcgtcgttatcgaagagcggtcgtcgtttttgag

SEQ ID NO: 36808 - DNA, 502 bp, Artificial Sequence
  chemically treated genomic DNA (Homo sapiens) CpG-island No: 36808
ctcaaaaacgacgaccgctcttcgataacgacgacaaaaacaacgacaaacgcctaaaaccgaaaccgctcaactaaaacccgcgactcatcccgaaccccgaaaacgaaacccgaaaaaaacgaatcgacgaaaaaacgaaaccgcgctccttcgcgcacctatcactccccgcgctaacccaaataaaactcaaaatcccctcaccgaccacgacccgaaccgactcaccgaccaaaaaaaccgcgctatccacacacttcctctaaacctcgaacaaccgctcctaacccaacccgaataacgcaaacaatacgcgctcgcactccccgcctaacctatcccttcccgactccgatacccgccacccccacaatcctccgccactcactacgcgcctctaaatccctacgaccgaaatatcgcgaaacttcgctcgaaacaactactactataataaaaaattcacttttttaccacaacgtacgtatcaacaaataaa

SEQ ID NO: 36809 - DNA, 529 bp, Artificial Sequence
  chemically treated genomic DNA (Homo sapiens) CpG-island No: 36809
gtcgattgttatttagggtgtagtcggggtggtggggggcggggggcgtggggagggggggcgggggggggcggcgaggtaaggagcgacgggacggatacggacggcgggggaattaaagggtaaaatataggaaaagagataaaggatagataagagaagagaggaaagagtaaaaaagggaatcgggacgcgcgagagaggatagggcgcggcggaacgcgtagtacgtagacgttagtcggggggagaaagtttgagggagaggtagagcggtggaggagaagggcgtagatgacgttcgaattaaaattgggcgaggtaagaggaagaagaaatagtataataggtgtggagagacgaatagacgggacggagagcgggaatagtacgttgaatagtaggatagtcgttcgttagttttagatataaagtttatagatgaggtagaaagtaaattaaatatacgttttaagtaatttattcgatttacggttaaaatattttgaaacgaggcgtgaaataagga

SEQ ID NO: 36810 - DNA, 529 bp, Artificial Sequence
  chemically treated genomic DNA (Homo sapiens) CpG-island No: 36810
tccttatttcacgcctcgtttcaaaatattttaaccgtaaatcgaataaattacttaaaacgtatatttaatttactttctacctcatctataaactttatatctaaaactaacgaacgactatcctactattcaacgtactattcccgctctccgtcccgtctattcgtctctccacacctattatactatttcttcttcctcttacctcgcccaattttaattcgaacgtcatctacgcccttctcctccaccgctctacctctccctcaaactttctccccccgactaacgtctacgtactacgcgttccgccgcgccctatcctctctcgcgcgtcccgattcccttttttactctttcctctcttctcttatctatcctttatctcttttcctatattttaccctttaattcccccgccgtccgtatccgtcccgtcgctccttacctcgccgcccccccccgccccccctccccacgccccccgccccccaccaccccgactacaccctaaataacaatcgac

SEQ ID NO: 36811 - DNA, 529 bp, Artificial Sequence
  chemically treated genomic DNA (Homo sapiens) CpG-island No: 36811
tttttgttttacgtttcgttttagggtgttttggtcgtaggtcgggtggattatttggggcgtgtgtttggtttgttttttgttttatttataagttttgtgtttggggttggcgggcggttgttttgttgtttaacgtgttgttttcgtttttcgtttcgtttgttcgtttttttatatttgttatattgtttttttttttttttgtttcgtttagttttaattcgggcgttatttgcgttttttttttttatcgttttgttttttttttaaatttttttttttcgattggcgtttgcgtattgcgcgtttcgtcgcgttttgttttttttcgcgcgtttcggtttttttttttgtttttttttttttttttttgtttgttttttgtttttttttttgtgttttgttttttagttttttcgtcgttcgtgttcgtttcgtcgttttttgtttcgtcgttttttttcgttttttttttttacgtttttcgttttttattatttcggttatattttggatgataatcgat

SEQ ID NO: 36812 - DNA, 529 bp, Artificial Sequence
  chemically treated genomic DNA (Homo sapiens) CpG-island No: 36812
atcgattatcatccaaaatataaccgaaataataaaaaacgaaaaacgtaaaaaaaaaaaacgaaaaaaaacgacgaaacaaaaaacgacgaaacgaacacgaacgacgaaaaaactaaaaaacaaaacacaaaaaaaaaaacaaaaaacaaacaaaaaaaaaaaaaaaaaaacaaaaaaaaaaaccgaaacgcgcgaaaaaaaacaaaacgcgacgaaacgcgcaatacgcaaacgccaatcgaaaaaaaaaaatttaaaaaaaaaacaaaacgataaaaaaaaaaaacgcaaataacgcccgaattaaaactaaacgaaacaaaaaaaaaaaaaaacaatataacaaatataaaaaaacgaacaaacgaaacgaaaaacgaaaacaacacgttaaacaacaaaacaaccgcccgccaaccccaaacacaaaacttataaataaaacaaaaaacaaaccaaacacacgccccaaataatccacccgacctacgaccaaaacaccctaaaacgaaacgtaaaacaaaaa

SEQ ID NO: 36813 - DNA, 700 bp, Artificial Sequence
  chemically treated genomic DNA (Homo sapiens) CpG-island No: 36813
agtaacgaggttatggtcgggtcgggtcgtgttcgattttttggatatcggaggcgttgtggattttagggagggggtcggagggatttgagaaatttcggttgatttcgggattcgatcgtttttgttggtttatttattgttcgttcgttttttttttttgtgtcgttcgttcgttcgtcggtagtttgttgtttgtttgttttttcgttcgttttttcggttttcgtcgtttacgtcggaaattgcgttatagttaatcgtcgagatttttgcgaggttgtgtacgtgcgttgcgtagtcgcgatgaggtatggttttggacgtttttagcggggtttatattgtcggggttaagtgtcgggtaggggtaaagtaaaaaggagagttgtggggaatggtgcgttgagaattgagttttcgagagattcggaaacggtgcggttttttttgttgtttcggaattcgtttttatcgaagggatttttttagtcgttgtattttcggggataacgtcgtcgcgttttagtgacgtaggttcggggaagtcggggattcgggtattgggttcgggggtgtagtttttgattttcgttgtttttgttcgtttgtcgaggtttaagtgtttaggttagagcgaaaaagataagcgtcgttgtattaagtttttttggtatatttttttgttaattgattttcg

SEQ ID NO: 36814 - DNA, 700 bp, Artificial Sequence
  chemically treated genomic DNA (Homo sapiens) CpG-island No: 36814
cgaaaatcaattaacaaaaaaatataccaaaaaaacttaatacaacgacgcttatctttttcgctctaacctaaacacttaaacctcgacaaacgaacaaaaacaacgaaaatcaaaaactacacccccgaacccaatacccgaatccccgacttccccgaacctacgtcactaaaacgcgacgacgttatccccgaaaatacaacgactaaaaaaatcccttcgataaaaacgaattccgaaacaacaaaaaaaaccgcaccgtttccgaatctctcgaaaactcaattctcaacgcaccattccccacaactctcctttttactttacccctacccgacacttaaccccgacaatataaaccccgctaaaaacgtccaaaaccatacctcatcgcgactacgcaacgcacgtacacaacctcgcaaaaatctcgacgattaactataacgcaatttccgacgtaaacgacgaaaaccgaaaaaacgaacgaaaaaacaaacaaacaacaaactaccgacgaacgaacgaacgacacaaaaaaaaaaaacgaacgaacaataaataaaccaacaaaaacgatcgaatcccgaaatcaaccgaaatttctcaaatccctccgaccccctccctaaaatccacaacgcctccgatatccaaaaaatcgaacacgacccgacccgaccataacctcgttact

SEQ ID NO: 36815 - DNA, 700 bp, Artificial Sequence
  chemically treated genomic DNA (Homo sapiens) CpG-island No: 36815
cgagaattagttggtagggaaatgtattaggaaagtttggtataacggcgtttgtttttttcgttttagtttaaatatttgagtttcggtaaacgggtagaggtagcgggaattagggattatattttcgaatttagtattcgggttttcgattttttcgagtttacgttattggggcgcgacggcgttgttttcgggagtgtagcggttgagaaggttttttcggtgaaggcgagtttcgggataatagagagggtcgtatcgttttcgagtttttcggaggtttagtttttagcgtattattttttatagtttttttttttattttatttttattcgatatttgatttcggtagtgtgaatttcgttgggagcgtttaaagttatgttttatcgcggttgcgtagcgtacgtgtatagtttcgtaggagtttcggcgattggttgtgacgtagttttcggcgtgagcggcgaaagtcgggagggcgagcgagagagtaagtaggtagtaggttgtcggcgggcgggcggacggtatagagggagggagcgagcgagtagtgagtaagttagtaagggcggtcgggtttcgaggttagtcgagattttttaggttttttcggttttttttttggagtttatagcgttttcggtgtttagaggatcggatacggttcggttcggttatggtttcgttgtt

SEQ ID NO: 36816 - DNA, 700 bp, Artificial Sequence
  chemically treated genomic DNA (Homo sapiens) CpG-island No: 36816
aacaacgaaaccataaccgaaccgaaccgtatccgatcctctaaacaccgaaaacgctataaactccaaaaaaaaaaccgaaaaaacctaaaaaatctcgactaacctcgaaacccgaccgcccttactaacttactcactactcgctcgctccctccctctataccgtccgcccgcccgccgacaacctactacctacttactctctcgctcgccctcccgactttcgccgctcacgccgaaaactacgtcacaaccaatcgccgaaactcctacgaaactatacacgtacgctacgcaaccgcgataaaacataactttaaacgctcccaacgaaattcacactaccgaaatcaaatatcgaataaaaataaaataaaaaaaaaaactataaaaaataatacgctaaaaactaaacctccgaaaaactcgaaaacgatacgaccctctctattatcccgaaactcgccttcaccgaaaaaaccttctcaaccgctacactcccgaaaacaacgccgtcgcgccccaataacgtaaactcgaaaaaatcgaaaacccgaatactaaattcgaaaatataatccctaattcccgctacctctacccgtttaccgaaactcaaatatttaaactaaaacgaaaaaaacaaacgccgttataccaaactttcctaatacatttccctaccaactaattctcg

SEQ ID NO: 36817 - DNA, 623 bp, Artificial Sequence
  chemically treated genomic DNA (Homo sapiens) CpG-island No: 36817
tttcgcgttaggcgggtgcgaggggtgcgtgggtttggggacgcgggagggtttgtggtaggcgagtcgaaggacgtggtcgtgcgcgtcgtcgagggtcgggcgattcggcggcgggtagcgggagtcgtcgcggaagtgggggagaggggggcgaggggtgcggggttcggtcgaggcgggcggcggggggcgcggggggggcggcgtgttcgagtttcggtcgtggcggcgggtcgcgacggtggtcgaggcgcggggcggcgcggtcgcgggagtcggcgtgggcggggtgcgttaggcgggggtgggcgtcgggggagggggcggtagagggggtggggcgggggcgggggcgttattcgtcgtcgcgtcggggtcgagggggtcggcgtgtttcggcggcggggggggggggcggggcggggtgggcgaggaggcgaaggcggtagggcggagtgtcggcggaggggcggggggcgtcgggcgtcggcggggtcgcgtgcgtgtcgggggtgtggggggtttattcgcgaatggcgtgtttatcgttgtggtagtggtgtcgtagtttttgcggttaattttattaattcggtattttaggttttagtatggtattt

SEQ ID NO: 36818 - DNA, 623 bp, Artificial Sequence
  chemically treated genomic DNA (Homo sapiens) CpG-island No: 36818
aaataccatactaaaacctaaaataccgaattaataaaattaaccgcaaaaactacgacaccactaccacaacgataaacacgccattcgcgaataaaccccccacacccccgacacgcacgcgaccccgccgacgcccgacgccccccgcccctccgccgacactccgccctaccgccttcgcctcctcgcccaccccgccccgccccccccccccgccgccgaaacacgccgaccccctcgaccccgacgcgacgacgaataacgcccccgcccccgccccaccccctctaccgccccctcccccgacgcccacccccgcctaacgcaccccgcccacgccgactcccgcgaccgcgccgccccgcgcctcgaccaccgtcgcgacccgccgccacgaccgaaactcgaacacgccgccccccccgcgccccccgccgcccgcctcgaccgaaccccgcacccctcgcccccctctcccccacttccgcgacgactcccgctacccgccgccgaatcgcccgaccctcgacgacgcgcacgaccacgtccttcgactcgcctaccacaaaccctcccgcgtccccaaacccacgcacccctcgcacccgcctaacgcgaaa

SEQ ID NO: 36819 - DNA, 623 bp, Artificial Sequence
  chemically treated genomic DNA (Homo sapiens) CpG-island No: 36819
ggatattatattaaaatttgaagtgtcgaattaatggaattgatcgtaggagttacgatattattattataacgatgggtacgttattcgcggataggttttttatattttcgatacgtacgcggtttcgtcgacgttcgacgtttttcgttttttcgtcggtatttcgttttgtcgttttcgttttttcgtttatttcgtttcgtttttttttttcgtcgtcggggtacgtcggttttttcggtttcggcgcggcggcgggtggcgttttcgttttcgttttattttttttgtcgttttttttttcggcgtttattttcgtttggcgtatttcgtttacgtcggttttcgcggtcgcgtcgtttcgcgtttcggttatcgtcgcgattcgtcgttacggtcggggttcgggtacgtcgtttttttcgcgtttttcgtcgttcgtttcggtcgggtttcgtatttttcgttttttttttttttattttcgcggcgattttcgttgttcgtcgtcgaatcgttcgattttcgacggcgcgtacggttacgtttttcggttcgtttgttatagattttttcgcgtttttaggtttacgtatttttcgtattcgtttagcgcgaga

SEQ ID NO: 36820 - DNA, 623 bp, Artificial Sequence
  chemically treated genomic DNA (Homo sapiens) CpG-island No: 36820
tctcgcgctaaacgaatacgaaaaatacgtaaacctaaaaacgcgaaaaaatctataacaaacgaaccgaaaaacgtaaccgtacgcgccgtcgaaaatcgaacgattcgacgacgaacaacgaaaatcgccgcgaaaataaaaaaaaaaaaaacgaaaaatacgaaacccgaccgaaacgaacgacgaaaaacgcgaaaaaaacgacgtacccgaaccccgaccgtaacgacgaatcgcgacgataaccgaaacgcgaaacgacgcgaccgcgaaaaccgacgtaaacgaaatacgccaaacgaaaataaacgccgaaaaaaaaaacgacaaaaaaaataaaacgaaaacgaaaacgccacccgccgccgcgccgaaaccgaaaaaaccgacgtaccccgacgacgaaaaaaaaaaacgaaacgaaataaacgaaaaaacgaaaacgacaaaacgaaataccgacgaaaaaacgaaaaacgtcgaacgtcgacgaaaccgcgtacgtatcgaaaatataaaaaacctatccgcgaataacgtacccatcgttataataataatatcgtaactcctacgatcaattccattaattcgacacttcaaattttaatataatatcc

SEQ ID NO: 36821 - DNA, 1049 bp, Artificial Sequence
  chemically treated genomic DNA (Homo sapiens) CpG-island No: 36821
  unsure (847, 910, 932..933, 1000)
gttcgcgttagagcgtagaatttcgggatttggttagttttcgagttttagggcgtagggtgtttaagtcgattattttattcggcgtggttgtttttcgcgtttatttttttagttcggtttttattttcgcgaagtcgtagtagatttgagacgttggcggatatttcgttgtcgtttcggttcgcggtttttttttttaggtttttggaagcggttagtttatagatcggttggtcgatggtttaaggattttttcgtaatgtcggtttcgttggtttttcgcgcgttcgttggcgtcgtttgttttcgtttttttcgttgagcgcggagttcgagttttagtttttcgggtttttcgtagttcgtttcgtagttgttttggtatcggtagatgacgttagtagagagttttcggcgttttttaacgcgttcgcgtttttttttttaaagagtcgttaatagtagatagcgggagcgcggttatcgatgtcgttgtgttttcgggcgtcgagttttttatggcgcgggcgagttcgtcgtttacgttttttttgttgaggatcgtttggatggagaaggacgttaaggtgttggcgtcgcgtatagttatttgcgtcgcgggtaggagcggtcggcgcggcgggtagttggggcgtcgagtagtttcgagcgggaaaaaaagcgtcggcgtcgtaacgtagtttatttgggtgttcgatgtcgcgtcgtttattgttgtcggtttagtagttttcgttttatttcgttttaggattagcgtcgattttttttagtattttataggcgtatttcgttcggagatatttttttttcgaatttagangtagacgtttttttttcgtagtttagttggattattttatcgtttttcgtttttaggggaggnttggggtttagtttttcgcganncgtgaaggaggaattgcgggggttttttcgtggtagtagttttttttcgagcgtcgtcgggtaatangttcgagttatttttttttttcgggtttgtttttttttcgttgtaggat

SEQ ID NO: 36822 - DNA, 1049 bp, Artificial Sequence
  chemically treated genomic DNA (Homo sapiens) CpG-island No: 36822
  unsure (50, 117..118, 140, 203)
atcctacaacgaaaaaaaaacaaacccgaaaaaaaaaaataactcgaacntattacccgacgacgctcgaaaaaaaactactaccacgaaaaaacccccgcaattcctccttcacgnntcgcgaaaaactaaaccccaancctcccctaaaaacgaaaaacgataaaataatccaactaaactacgaaaaaaaaacgtctacntctaaattcgaaaaaaaaatatctccgaacgaaatacgcctataaaatactaaaaaaaatcgacgctaatcctaaaacgaaataaaacgaaaactactaaaccgacaacaataaacgacgcgacatcgaacacccaaataaactacgttacgacgccgacgctttttttcccgctcgaaactactcgacgccccaactacccgccgcgccgaccgctcctacccgcgacgcaaataactatacgcgacgccaacaccttaacgtccttctccatccaaacgatcctcaacaaaaaaaacgtaaacgacgaactcgcccgcgccataaaaaactcgacgcccgaaaacacaacgacatcgataaccgcgctcccgctatctactattaacgactctttaaaaaaaaaaacgcgaacgcgttaaaaaacgccgaaaactctctactaacgtcatctaccgataccaaaacaactacgaaacgaactacgaaaaacccgaaaaactaaaactcgaactccgcgctcaacgaaaaaaacgaaaacaaacgacgccaacgaacgcgcgaaaaaccaacgaaaccgacattacgaaaaaatccttaaaccatcgaccaaccgatctataaactaaccgcttccaaaaacctaaaaaaaaaaaccgcgaaccgaaacgacaacgaaatatccgccaacgtctcaaatctactacgacttcgcgaaaataaaaaccgaactaaaaaaataaacgcgaaaaacaaccacgccgaataaaataatcgacttaaacaccctacgccctaaaactcgaaaactaaccaaatcccgaaattctacgctctaacgcgaac

SEQ ID NO: 36823 - DNA, 1049 bp, Artificial Sequence
  chemically treated genomic DNA (Homo sapiens) CpG-island No: 36823
  unsure (50, 117..118, 140, 203)
attttgtagcgaggaaggaatagattcgaaaagaaaaagtgattcgggtntgttgttcggcggcgttcgggagggaattgttgttacggaagggttttcgtaattttttttttacgnntcgcgagggattagattttagnttttttttaagggcgagaagcgatgagataatttagttgagttgcgaaaggagagcgtttgtntttggattcggggggagggtgttttcgggcggggtgcgtttataaggtgttagagagggtcggcgttgattttgagacggagtggggcgggagttgttgggtcggtagtagtgggcggcgcggtatcgaatatttagataaattgcgttgcggcgtcggcgttttttttttcgttcggagttgttcggcgttttagttgttcgtcgcgtcggtcgtttttgttcgcggcgtagatggttgtgcgcggcgttaatattttgacgtttttttttatttaggcgatttttaataagaaagacgtgagcggcgggttcgttcgcgttatggagggttcggcgttcgggggtatagcggtatcggtggtcgcgttttcgttgtttgttgttggcggttttttggggagagggacgcgggcgcgttggggggcgtcgaggattttttgttggcgttatttgtcggtattagaatagttgcggggcggattgcggagagttcggaaggttgggattcggatttcgcgtttagcgaggagaacgagagtaggcggcgttagcggacgcgcggggagttagcggggtcggtattgcggggggatttttgagttatcggttagtcggtttgtgagttggtcgtttttaaagatttagaggaggaagtcgcgggtcggagcgatagcgagatgttcgttagcgttttaggtttgttgcggtttcgcggggatgggggtcgggttgaggggatggacgcggagggtaattacgtcgagtggggtggtcggtttgagtattttgcgttttggggttcggaggttggttaaatttcgaagttttgcgttttggcgcgagt

SEQ ID NO: 36824 - DNA, 1049 bp, Artificial Sequence
  chemically treated genomic DNA (Homo sapiens) CpG-island No: 36824
  unsure (847, 910, 932..933, 1000)
actcgcgccaaaacgcaaaacttcgaaatttaaccaacctccgaaccccaaaacgcaaaatactcaaaccgaccaccccactcgacgtaattaccctccgcgtccatcccctcaacccgacccccatccccgcgaaaccgcaacaaacctaaaacgctaacgaacatctcgctatcgctccgacccgcgacttcctcctctaaatctttaaaaacgaccaactcacaaaccgactaaccgataactcaaaaatccccccgcaataccgaccccgctaactccccgcgcgtccgctaacgccgcctactctcgttctcctcgctaaacgcgaaatccgaatcccaaccttccgaactctccgcaatccgccccgcaactattctaataccgacaaataacgccaacaaaaaatcctcgacgccccccaacgcgcccgcgtccctctccccaaaaaaccgccaacaacaaacaacgaaaacgcgaccaccgataccgctatacccccgaacgccgaaccctccataacgcgaacgaacccgccgctcacgtctttcttattaaaaatcgcctaaataaaaaaaaacgtcaaaatattaacgccgcgcacaaccatctacgccgcgaacaaaaacgaccgacgcgacgaacaactaaaacgccgaacaactccgaacgaaaaaaaaaacgccgacgccgcaacgcaatttatctaaatattcgataccgcgccgcccactactaccgacccaacaactcccgccccactccgtctcaaaatcaacgccgaccctctctaacaccttataaacgcaccccgcccgaaaacaccctccccccgaatccaaanacaaacgctctcctttcgcaactcaactaaattatctcatcgcttctcgcccttaaaaaaaanctaaaatctaatccctcgcganncgtaaaaaaaaaattacgaaaacccttccgtaacaacaattccctcccgaacgccgccgaacaacanacccgaatcactttttcttttcgaatctattccttcctcgctacaaaat

SEQ ID NO: 36825 - DNA, 514 bp, Artificial Sequence
  chemically treated genomic DNA (Homo sapiens) CpG-island No: 36825
cgtttttcgcggtttagcgttcgtattatcgtttttttttttttgtcgtagtcgcgtcgtcgcgtagcgttttagttatacgtcggcgggtagaagtcgttcgtttttcgggtaaggcgcggcgttttttttttttttatttttcgttttcggttttttcggagacgttaaggtggcggcgcgaagttgcggggttcgtgttgttcggtcgtggcgtcgtcgttagggtttggcgcgttttcgttcgcgtttagttggtcgaggcgttattgtggtaacggttcggtcggttaggtttttttcggggttggtaggggtcgcgaggttttgttcgagtcgtggttgagtcgcggttcgaacgtgtttggtcgggttaaagtcgattttcgtcgtcgcgggattttttttttttcggggcgcggagtttgtttttagcgtcggtgtcggatttttagcgttttggggacggtgggttttcgttgtttggattgggtttcgggttcgggttggtatg

SEQ ID NO: 36826 - DNA, 514 bp, Artificial Sequence
  chemically treated genomic DNA (Homo sapiens) CpG-island No: 36826
cataccaacccgaacccgaaacccaatccaaacaacgaaaacccaccgtccccaaaacgctaaaaatccgacaccgacgctaaaaacaaactccgcgccccgaaaaaaaaaaaatcccgcgacgacgaaaatcgactttaacccgaccaaacacgttcgaaccgcgactcaaccacgactcgaacaaaacctcgcgacccctaccaaccccgaaaaaaacctaaccgaccgaaccgttaccacaataacgcctcgaccaactaaacgcgaacgaaaacgcgccaaaccctaacgacgacgccacgaccgaacaacacgaaccccgcaacttcgcgccgccaccttaacgtctccgaaaaaaccgaaaacgaaaaataaaaaaaaaaaaaacgccgcgccttacccgaaaaacgaacgacttctacccgccgacgtataactaaaacgctacgcgacgacgcgactacgacaaaaaaaaaaaaacgataatacgaacgctaaaccgcgaaaaacg

SEQ ID NO: 36827 - DNA, 514 bp, Artificial Sequence
  chemically treated genomic DNA (Homo sapiens) CpG-island No: 36827
tatgttagttcgggttcggggtttagtttaggtagcgggagtttatcgtttttagggcgttgggggttcgatatcggcgttgaaggtagatttcgcgtttcgaggaaaggagaatttcgcggcggcgaaggtcgattttggttcggttaggtacgttcgggtcgcggtttagttacgattcgggtagggtttcgcggtttttattagtttcgggaggagtttggtcggtcgggtcgttattatagtggcgtttcggttagttgggcgcgagcggaggcgcgttaagttttggcggcggcgttacggtcgggtagtacgggtttcgtaatttcgcgtcgttattttagcgttttcggaggaatcgggagcggggagtgggggaagggagggcgtcgcgttttattcggagagcgggcggtttttgttcgtcggcgtgtggttggggcgttgcgcggcggcgcggttgcgatagggagggagaagcggtggtgcgagcgttgggtcgcgggagacg

SEQ ID NO: 36828 - DNA, 514 bp, Artificial Sequence
  chemically treated genomic DNA (Homo sapiens) CpG-island No: 36828
cgtctcccgcgacccaacgctcgcaccaccgcttctccctccctatcgcaaccgcgccgccgcgcaacgccccaaccacacgccgacgaacaaaaaccgcccgctctccgaataaaacgcgacgccctcccttcccccactccccgctcccgattcctccgaaaacgctaaaataacgacgcgaaattacgaaacccgtactacccgaccgtaacgccgccgccaaaacttaacgcgcctccgctcgcgcccaactaaccgaaacgccactataataacgacccgaccgaccaaactcctcccgaaactaataaaaaccgcgaaaccctacccgaatcgtaactaaaccgcgacccgaacgtacctaaccgaaccaaaatcgaccttcgccgccgcgaaattctcctttcctcgaaacgcgaaatctaccttcaacgccgatatcgaacccccaacgccctaaaaacgataaactcccgctacctaaactaaaccccgaacccgaactaacata

SEQ ID NO: 36829 - DNA, 1162 bp, Artificial Sequence
  chemically treated genomic DNA (Homo sapiens) CpG-island No: 36829
tttttcgttggtttttcgtttcggcgcgtttacggttaatttcgcgtagtgaatgagcgggtttggttatttcgtttattgtataaaaagcgcgggtcgggaaggcgtattagtgttttggacgtcgtttgcgggtttttttgttcgggacggttggttaggggcgtttttttcgtcgcgtttttttttattagttcgtttggttgttaggggtttcgaggaattcgttttttttcggtcgtcgcgatttagtttgcgtagtcggataatgagggcgattcgggagagttttttttttatttatttttcgcgttcggttaatagtttcgttattttcgttcgcgtagtcggggtattaaaagtaattttcggcgtttcgtttcgggcgtcgttttcgttatttttagtattgttcgcgtagatggcgtttttgggtcgcgaagtttcgtaaaagttagaggcgaggttgggttttaattttaaagttcgaggaggttaaagtttaagtttgtaaagagcgggtagcgttcggtaggagcggcgtttttatttagtttttttcggtaagcgcgggagatttacgtggtcgagatatttatttcgaggtggattaggatgcgcgttcggattttagtagttttaacgcgacgggttttgttcgcggtcgttttcgttcgttcgtttgcgggggatagggattttaggattcgggtcgggtttatttttttgtcggtattgcgcggcgatatatagtagtaagattaggagtacgttttcgcgtatttcgttttcgtcgttattcggtgggtttggggagaaagtcgcgcgttcgtttggaacgttttacgggacgcgagttcgcgttgttttggtttcgtcgtttttggagttttgtcgtttttttttttagtcgttttcggatatatttttcggttgcgtttcgtttcgtttcgtttcgtttcggtttggtttcgttatttagatttttttttcgggggcgtttagtttggtttttgggtttcggcgtacgcggattttaagtcggggaggtcgggttgatcgcggtcgttttttcggtttcgggtaggaggtgggtagagaaggtgggttgaggggaggagaaattgggttgcgggggttcgggagggtggatttcgagaaa

SEQ ID NO: 36830 - DNA, 1162 bp, Artificial Sequence
  chemically treated genomic DNA (Homo sapiens) CpG-island No: 36830
tttctcgaaatccaccctcccgaacccccgcaacccaatttctcctcccctcaacccaccttctctacccacctcctacccgaaaccgaaaaaacgaccgcgatcaacccgacctccccgacttaaaatccgcgtacgccgaaacccaaaaaccaaactaaacgcccccgaaaaaaaaatctaaataacgaaaccaaaccgaaacgaaacgaaacgaaacgaaacgcaaccgaaaaatatatccgaaaacgactaaaaaaaaaaacgacaaaactccaaaaacgacgaaaccaaaacaacgcgaactcgcgtcccgtaaaacgttccaaacgaacgcgcgactttctccccaaacccaccgaataacgacgaaaacgaaatacgcgaaaacgtactcctaatcttactactatatatcgccgcgcaataccgacaaaaaaataaacccgacccgaatcctaaaatccctatcccccgcaaacgaacgaacgaaaacgaccgcgaacaaaacccgtcgcgttaaaactactaaaatccgaacgcgcatcctaatccacctcgaaataaatatctcgaccacgtaaatctcccgcgcttaccgaaaaaaactaaataaaaacgccgctcctaccgaacgctacccgctctttacaaacttaaactttaacctcctcgaactttaaaattaaaacccaacctcgcctctaacttttacgaaacttcgcgacccaaaaacgccatctacgcgaacaatactaaaaataacgaaaacgacgcccgaaacgaaacgccgaaaattacttttaataccccgactacgcgaacgaaaataacgaaactattaaccgaacgcgaaaaataaataaaaaaaaaactctcccgaatcgccctcattatccgactacgcaaactaaatcgcgacgaccgaaaaaaaacgaattcctcgaaacccctaacaaccaaacgaactaataaaaaaaaacgcgacgaaaaaaacgcccctaaccaaccgtcccgaacaaaaaaacccgcaaacgacgtccaaaacactaatacgccttcccgacccgcgctttttatacaataaacgaaataaccaaacccgctcattcactacgcgaaattaaccgtaaacgcgccgaaacgaaaaaccaacgaaaaa

SEQ ID NO: 36831 - DNA, 1162 bp, Artificial Sequence
  chemically treated genomic DNA (Homo sapiens) CpG-island No: 36831
tttttcggaatttattttttcggattttcgtagtttagttttttttttttttagtttattttttttgtttattttttattcggagtcggggaggcggtcgcggttagttcggttttttcgatttggggttcgcgtgcgtcgggatttagaggttaagttgggcgttttcgggggaggggtttgggtggcggggttaagtcggggcgggacggggcggggcggggcgtagtcgaggggtgtgttcgagggcggttggagggaggggcggtaggattttaggagcggcggggttagggtagcgcggattcgcgtttcgtggagcgttttaggcgggcgcgcggttttttttttagatttatcgagtggcggcggaggcgagatgcgcgggggcgtgtttttggttttgttgttgtgtgtcgtcgcgtagtgtcggtagagaggtgagttcggttcgggttttagggtttttgtttttcgtaggcgggcgggcgggggcggtcgcggataaagttcgtcgcgttggggttgttggagttcgggcgcgtattttgatttatttcggagtgggtgtttcggttacgtgggtttttcgcgtttgtcggggagggttggatggggacgtcgtttttgtcggacgttgttcgttttttgtaggtttaggttttaattttttcgggttttggggttaaagtttagtttcgtttttggtttttgcgggatttcgcgatttaggagcgttatttacgcgagtagtgttgggggtggcgggagcggcgttcggagcggggcgtcgggggttgtttttagtgtttcggttgcgcgggcgggggtggcggggttgttggtcgggcgcgggggatgaatggagaaagagttttttcgagtcgtttttattgttcggttgcgtaagttgggtcgcggcggtcgggaaagggcggatttttcggggtttttggtagttaagcgggttagtggggagagacgcggcgagaagggcgtttttagttagtcgtttcgggtagggggattcgtaggcggcgtttagggtattgatgcgttttttcgattcgcgttttttgtgtaataggcgaagtggttaaattcgtttatttattgcgcgggattgatcgtgggcgcgtcggggcgagggattagcggagaa

SEQ ID NO: 36832 - DNA, 1162 bp, Artificial Sequence
  chemically treated genomic DNA (Homo sapiens) CpG-island No: 36832
ttctccgctaatccctcgccccgacgcgcccacgatcaatcccgcgcaataaataaacgaatttaaccacttcgcctattacacaaaaaacgcgaatcgaaaaaacgcatcaataccctaaacgccgcctacgaatccccctacccgaaacgactaactaaaaacgcccttctcgccgcgtctctccccactaacccgcttaactaccaaaaaccccgaaaaatccgccctttcccgaccgccgcgacccaacttacgcaaccgaacaataaaaacgactcgaaaaaactctttctccattcatcccccgcgcccgaccaacaaccccgccacccccgcccgcgcaaccgaaacactaaaaacaacccccgacgccccgctccgaacgccgctcccgccacccccaacactactcgcgtaaataacgctcctaaatcgcgaaatcccgcaaaaaccaaaaacgaaactaaactttaaccccaaaacccgaaaaaattaaaacctaaacctacaaaaaacgaacaacgtccgacaaaaacgacgtccccatccaaccctccccgacaaacgcgaaaaacccacgtaaccgaaacacccactccgaaataaatcaaaatacgcgcccgaactccaacaaccccaacgcgacgaactttatccgcgaccgcccccgcccgcccgcctacgaaaaacaaaaaccctaaaacccgaaccgaactcacctctctaccgacactacgcgacgacacacaacaacaaaaccaaaaacacgcccccgcgcatctcgcctccgccgccactcgataaatctaaaaaaaaaaccgcgcgcccgcctaaaacgctccacgaaacgcgaatccgcgctaccctaaccccgccgctcctaaaatcctaccgcccctccctccaaccgccctcgaacacacccctcgactacgccccgccccgccccgtcccgccccgacttaaccccgccacccaaacccctcccccgaaaacgcccaacttaacctctaaatcccgacgcacgcgaaccccaaatcgaaaaaaccgaactaaccgcgaccgcctccccgactccgaataaaaaataaacaaaaaaaataaactaaaaaaaaaaaaaactaaactacgaaaatccgaaaaaataaattccgaaaaa

SEQ ID NO: 36833 - DNA, 534 bp, Artificial Sequence
  chemically treated genomic DNA (Homo sapiens) CpG-island No: 36833
cgttgacgattatttttatgtcgtcgttggtagcggagttttggttgttcggtttcgggaggttgcgtttttcggattcgtttatttttttcgcgcgcgttttcgtagttttcgtttcgcgttttttgtagtcgtcgtcgtcgttgtcgttgggggttcggcgggtgttattcgtgcgttgatttcggggagagtttggtcggcgttcgtttgcggggaagggcggttatagcgggtagtagtttgcgggggcgcgtcgcgggggaggtatgtattcggcggcggggttcggggttggtattcgggcgttcgggcgagtcgcgggggttttggcggtcgtcggtttcgttcggggtatttatttcggttggttggcggcgcgtttcgtcgttttagttcggttttttgcgggagcggggttttttcgtgggcggttggtatcgtttttcgtttcggggcgcgtaggtagcggcggtaggtttcggagttggcggatttacgtcgttcgcgaggtgttcgaggtgtgtagagagt

SEQ ID NO: 36834 - DNA, 534 bp, Artificial Sequence
  chemically treated genomic DNA (Homo sapiens) CpG-island No: 36834
actctctacacacctcgaacacctcgcgaacgacgtaaatccgccaactccgaaacctaccgccgctacctacgcgccccgaaacgaaaaacgataccaaccgcccacgaaaaaaccccgctcccgcaaaaaaccgaactaaaacgacgaaacgcgccgccaaccaaccgaaataaataccccgaacgaaaccgacgaccgccaaaacccccgcgactcgcccgaacgcccgaataccaaccccgaaccccgccgccgaatacatacctcccccgcgacgcgcccccgcaaactactacccgctataaccgcccttccccgcaaacgaacgccgaccaaactctccccgaaatcaacgcacgaataacacccgccgaacccccaacgacaacgacgacgacgactacaaaaaacgcgaaacgaaaactacgaaaacgcgcgcgaaaaaaataaacgaatccgaaaaacgcaacctcccgaaaccgaacaaccaaaactccgctaccaacgacgacataaaaataatcgtcaacg

SEQ ID NO: 36835 - DNA, 534 bp, Artificial Sequence
  chemically treated genomic DNA (Homo sapiens) CpG-island No: 36835
gttttttgtatatttcgagtatttcgcggacggcgtgggttcgttagtttcgggatttgtcgtcgttgtttgcgcgtttcggggcggaggacggtgttagtcgtttacgaggagatttcgttttcgtaggaggtcgagttgaagcggcggagcgcgtcgttagttagtcggggtgagtgtttcgggcgaggtcggcggtcgttaaagttttcgcggttcgttcgggcgttcggatgttagtttcgagtttcgtcgtcgggtgtatgtttttttcgcggcgcgttttcgtaggttgttgttcgttgtgatcgttttttttcgtaggcgggcgtcggttaggtttttttcgagattagcgtacgggtggtattcgtcggatttttagcggtagcggcggcggcggttgtagggggcgcggggcggaggttgcgagggcgcgcgcggggaggatggacgggttcggggagcgtagtttttcggagtcgggtagttagagtttcgttgttagcgacgatatagagatagtcgttaacg

SEQ ID NO: 36836 - DNA, 534 bp, Artificial Sequence
  chemically treated genomic DNA (Homo sapiens) CpG-island No: 36836
cgttaacgactatctctatatcgtcgctaacaacgaaactctaactacccgactccgaaaaactacgctccccgaacccgtccatcctccccgcgcgcgccctcgcaacctccgccccgcgccccctacaaccgccgccgccgctaccgctaaaaatccgacgaataccacccgtacgctaatctcgaaaaaaacctaaccgacgcccgcctacgaaaaaaaacgatcacaacgaacaacaacctacgaaaacgcgccgcgaaaaaaacatacacccgacgacgaaactcgaaactaacatccgaacgcccgaacgaaccgcgaaaactttaacgaccgccgacctcgcccgaaacactcaccccgactaactaacgacgcgctccgccgcttcaactcgacctcctacgaaaacgaaatctcctcgtaaacgactaacaccgtcctccgccccgaaacgcgcaaacaacgacgacaaatcccgaaactaacgaacccacgccgtccgcgaaatactcgaaatatacaaaaaac

SEQ ID NO: 36837 - DNA, 572 bp, Artificial Sequence
  chemically treated genomic DNA (Homo sapiens) CpG-island No: 36837
  unsure (265, 483, 540)
tttcgtcgtcggtttcgttattttcgtttcgtcgtggtcgaaattgatataaagtagcgggtcgaggtttcgggggagcggggtcgtagttgggggggcgggagttcgtggggagtcgagtcgagcgtttttcgttttagttttcggtatgggtagtacggggtcgtcggggcgggcgtcgagcgttgagcgttgaggtgaggcgaggcgaggcgaagcgggggcgttcgggagcgcggggttaggagggtagagggagatgcgntcgtagtcgcggggttggaggggtcggggagcgggtgtagattggggagtatcgggggttaagatttgggagttgcggttagacggggcggggatggcggtcgattggagacgaggggttgtcgggttttcggggacggggtagagcgggggtttgcggataggatgggaggatggggcgtcgaaggggcgcgtggagagtaggagagcggcgcgagngttaaggagaagttcgtgtagttaaggttaggggagattcgtttagagagatgtggngtaaaaagagtattcgggattcgagggtttgg

SEQ ID NO: 36838 - DNA, 572 bp, Artificial Sequence
  chemically treated genomic DNA (Homo sapiens) CpG-island No: 36838
  unsure (33, 90, 308)
ccaaaccctcgaatcccgaatactctttttacnccacatctctctaaacgaatctcccctaaccttaactacacgaacttctccttaacnctcgcgccgctctcctactctccacgcgccccttcgacgccccatcctcccatcctatccgcaaacccccgctctaccccgtccccgaaaacccgacaacccctcgtctccaatcgaccgccatccccgccccgtctaaccgcaactcccaaatcttaacccccgatactccccaatctacacccgctccccgacccctccaaccccgcgactacgancgcatctccctctaccctcctaaccccgcgctcccgaacgcccccgcttcgcctcgcctcgcctcacctcaacgctcaacgctcgacgcccgccccgacgaccccgtactacccataccgaaaactaaaacgaaaaacgctcgactcgactccccacgaactcccgcccccccaactacgaccccgctcccccgaaacctcgacccgctactttatatcaatttcgaccacgacgaaacgaaaataacgaaaccgacgacgaaa

SEQ ID NO: 36839 - DNA, 572 bp, Artificial Sequence
  chemically treated genomic DNA (Homo sapiens) CpG-island No: 36839
  unsure (33, 90, 308)
ttaaattttcgggtttcggatattttttttgtnttatatttttttgggcgggttttttttggttttggttgtacgagtttttttttggtnttcgcgtcgtttttttgttttttacgcgttttttcggcgttttatttttttattttgttcgtagattttcgttttgtttcgttttcgggaattcgatagtttttcgtttttagtcggtcgttattttcgtttcgtttggtcgtagtttttaaattttggttttcggtgttttttagtttatattcgtttttcggtttttttagtttcgcggttgcggncgtatttttttttgtttttttggtttcgcgttttcgggcgttttcgtttcgtttcgtttcgttttattttagcgtttagcgttcggcgttcgtttcggcggtttcgtattgtttatgtcgggggttggggcggggggcgttcggttcggttttttacgggttttcgtttttttagttgcggtttcgttttttcggggtttcggttcgttattttgtgttagtttcggttacggcggggcggaagtgacggagtcggcggcgggg

SEQ ID NO: 36840 - DNA, 572 bp, Artificial Sequence
  chemically treated genomic DNA (Homo sapiens) CpG-island No: 36840
  unsure (265, 483, 540)
ccccgccgccgactccgtcacttccgccccgccgtaaccgaaactaacacaaaataacgaaccgaaaccccgaaaaaacgaaaccgcaactaaaaaaacgaaaacccgtaaaaaaccgaaccgaacgccccccgccccaacccccgacataaacaatacgaaaccgccgaaacgaacgccgaacgctaaacgctaaaataaaacgaaacgaaacgaaacgaaaacgcccgaaaacgcgaaaccaaaaaaacaaaaaaaaatacgnccgcaaccgcgaaactaaaaaaaccgaaaaacgaatataaactaaaaaacaccgaaaaccaaaatttaaaaactacgaccaaacgaaacgaaaataacgaccgactaaaaacgaaaaactatcgaattcccgaaaacgaaacaaaacgaaaatctacgaacaaaataaaaaaataaaacgccgaaaaaacgcgtaaaaaacaaaaaaacgacgcgaanaccaaaaaaaaactcgtacaaccaaaaccaaaaaaaacccgcccaaaaaaatataanacaaaaaaaatatccgaaacccgaaaatttaa

SEQ ID NO: 36841 - DNA, 725 bp, Artificial Sequence
  chemically treated genomic DNA (Homo sapiens) CpG-island No: 36841
ggttaaggcgagaattttgtcggtagttgtttattcgtattcggttttttttagcggttcgttttttttatcgtttgttcgtaaggtttcgtttattttatcgtttcgttttattttattttgcggaggcgatagagtgcgcgcgcgcgcgcggggtttcggttggtttttttttcgagcgttcgcgtttcgtatgcgtagtttgtttcggcggttttcgtttgtttgaataggaaggcggatatattagttttttttagtttttttcgttttattttttaggtattcgtcgtcgcgattcgtttttttttcggttgggatcgtagttttttttagaagtttttttattagtagtcgtcgggatttaattatcgttttttttttcgttcgttttttagttttttttttgttaagtttttatcgggtatcgatttcgttttgttttatcggatatcgtagtagtagttttagtagcgacgggataaaatgggagagtgaggttgttttgcgtggattagttcgtggtcgagattgatcggtgcgtcgggtcgggtcgagtagagtcggggacgcggggttagatcgtttatagcgtttttgagcggagcgggttcggttcgtggttcgagcggcggtcgtagttggtatagttttttattcgttttttgttttcgttttttttttttttttttttttgttgttcggagggagtttttattttgttt

SEQ ID NO: 36842 - DNA, 725 bp, Artificial Sequence
  chemically treated genomic DNA (Homo sapiens) CpG-island No: 36842
aaacaaaataaaaactccctccgaacaacaaaaaaaaaaaaaaaaaaaaaacgaaaacaaaaaacgaataaaaaactataccaactacgaccgccgctcgaaccacgaaccgaacccgctccgctcaaaaacgctataaacgatctaaccccgcgtccccgactctactcgacccgacccgacgcaccgatcaatctcgaccacgaactaatccacgcaaaacaacctcactctcccattttatcccgtcgctactaaaactactactacgatatccgataaaacaaaacgaaatcgatacccgataaaaacttaacaaaaaaaaaactaaaaaacgaacgaaaaaaaaaacgataattaaatcccgacgactactaataaaaaaacttctaaaaaaaactacgatcccaaccgaaaaaaaaacgaatcgcgacgacgaatacctaaaaaataaaacgaaaaaaactaaaaaaaactaatatatccgccttcctattcaaacaaacgaaaaccgccgaaacaaactacgcatacgaaacgcgaacgctcgaaaaaaaaaccaaccgaaaccccgcgcgcgcgcgcgcactctatcgcctccgcaaaataaaataaaacgaaacgataaaataaacgaaaccttacgaacaaacgataaaaaaaacgaaccgctaaaaaaaaccgaatacgaataaacaactaccgacaaaattctcgccttaacc

SEQ ID NO: 36843 - DNA, 725 bp, Artificial Sequence
  chemically treated genomic DNA (Homo sapiens) CpG-island No: 36843
aagtagggtggagatttttttcgggtaataagggagggagaagaggaaaggcgaaagtaaagggcgggtgaggagttgtgttagttgcggtcgtcgttcgggttacgggtcgggttcgtttcgtttagaggcgttgtagacggtttagtttcgcgttttcggttttattcggttcggttcgacgtatcgattagtttcggttacgagttggtttacgtaggatagttttatttttttattttgtttcgtcgttgttggggttgttgttacggtgttcggtggggtagggcgaggtcgatgttcgatggagatttagtagaggaaaggttggagagcgggcgaagaggaagacgatagttgggtttcggcggttgttgatgggggagtttttgggaggggttgcggttttagtcggggaaagggcgagtcgcggcggcgaatgtttggggggtggggcgaggggggttgagagggattaatatgttcgtttttttgtttaaataaacggagatcgtcggggtagattgcgtatgcggggcgcggacgttcggaaggggaattagtcgggatttcgcgcgcgcgcgcgtattttgtcgttttcgtagggtggggtggggcggggcggtgaggtgggcggggttttgcgggtaggcggtggagaaggcggatcgttgggaggagtcgagtgcgggtaagtagttgtcggtaaggttttcgttttggtt

SEQ ID NO: 36844 - DNA, 725 bp, Artificial Sequence
  chemically treated genomic DNA (Homo sapiens) CpG-island No: 36844
aaccaaaacgaaaaccttaccgacaactacttacccgcactcgactcctcccaacgatccgccttctccaccgcctacccgcaaaaccccgcccacctcaccgccccgccccaccccaccctacgaaaacgacaaaatacgcgcgcgcgcgcgaaatcccgactaattccccttccgaacgtccgcgccccgcatacgcaatctaccccgacgatctccgtttatttaaacaaaaaaacgaacatattaatccctctcaacccccctcgccccaccccccaaacattcgccgccgcgactcgccctttccccgactaaaaccgcaacccctcccaaaaactcccccatcaacaaccgccgaaacccaactatcgtcttcctcttcgcccgctctccaacctttcctctactaaatctccatcgaacatcgacctcgccctaccccaccgaacaccgtaacaacaaccccaacaacgacgaaacaaaataaaaaaataaaactatcctacgtaaaccaactcgtaaccgaaactaatcgatacgtcgaaccgaaccgaataaaaccgaaaacgcgaaactaaaccgtctacaacgcctctaaacgaaacgaacccgacccgtaacccgaacgacgaccgcaactaacacaactcctcacccgccctttactttcgcctttcctcttctccctcccttattacccgaaaaaaatctccaccctactt

SEQ ID NO: 36845 - DNA, 1065 bp, Artificial Sequence
  chemically treated genomic DNA (Homo sapiens) CpG-island No: 36845
ttcgcggacgtcgaggtagcgggaaggcgcgaggcggggcggggggagggggcgcgggggttttcgttgcggaggttagggcgggcgggaggggtagtatttgaggaattcgttttcggttgcggcggtcgtcgtttcgtttcgtttcggggaattgagcgcgcggatcgcgcgtttgttagagagacgttagtcgtcggcggcgttagtatttcggagtcgggcggtcggagtagcggagcgtagcgcggcgtagggaacggtattgggggtggggagattagttcggtcgagtcgagggttattttttggttttttgttttcgcgtttcgttagggttaggtgagcggtcgcggggatttcggggcgcgggtaggaggtgagaggtcgcgaatcgggcgcgggagttcgtttgtgatcggtaggagttgttttttggcgggttggacgttttggtcgcgcggggaagcgtcgtagcggattttttcggagggatgggaagtttagcgggggtgtgagcggagcgcgtgcgggtggcgagggagcgttagtgttaatttgggagtcgtgtttgttttttttgtcgtttcgcgtcgtttatcgaagggattcggtcgtgttgttcgcgtttagaggtcgaaggtttgttatcgggttttattcgttgtttttgtggcgggagcgagacggttcgggggtgggacgagggagttgcggcgcgtcgagtagcgcggggtttttcggcggaggcggcgagggggtatttggttcgttttttcgagtttaggggtagtgagggggtgtcgggtaggcgggcgggcgataggtagggcgtcgcggaggtggcggggagaggatggatggagtttagtttgggaaagttgagaacgtttagaggtggttgggcgttcgttcggcgtttgtgggtttttttttttaatattaaatgttatttcgttacgagcgggcgcgcgtgtttttcggttagtatgtttatttttttgtgtatggttgaggattatttttatttcgaatgagatataaagagttgtgttgatagttgat

SEQ ID NO: 36846 - DNA, 1065 bp, Artificial Sequence
  chemically treated genomic DNA (Homo sapiens) CpG-island No: 36846
atcaactatcaacacaactctttatatctcattcgaaataaaaataatcctcaaccatacacaaaaaaataaacatactaaccgaaaaacacgcgcgcccgctcgtaacgaaataacatttaatattaaaaaaaaaaacccacaaacgccgaacgaacgcccaaccacctctaaacgttctcaactttcccaaactaaactccatccatcctctccccgccacctccgcgacgccctacctatcgcccgcccgcctacccgacaccccctcactacccctaaactcgaaaaaacgaaccaaataccccctcgccgcctccgccgaaaaaccccgcgctactcgacgcgccgcaactccctcgtcccacccccgaaccgtctcgctcccgccacaaaaacaacgaataaaacccgataacaaaccttcgacctctaaacgcgaacaacacgaccgaatcccttcgataaacgacgcgaaacgacaaaaaaaacaaacacgactcccaaattaacactaacgctccctcgccacccgcacgcgctccgctcacacccccgctaaacttcccatccctccgaaaaaatccgctacgacgcttccccgcgcgaccaaaacgtccaacccgccaaaaaacaactcctaccgatcacaaacgaactcccgcgcccgattcgcgacctctcacctcctacccgcgccccgaaatccccgcgaccgctcacctaaccctaacgaaacgcgaaaacaaaaaaccaaaaaataaccctcgactcgaccgaactaatctccccacccccaataccgttccctacgccgcgctacgctccgctactccgaccgcccgactccgaaatactaacgccgccgacgactaacgtctctctaacaaacgcgcgatccgcgcgctcaattccccgaaacgaaacgaaacgacgaccgccgcaaccgaaaacgaattcctcaaatactacccctcccgcccgccctaacctccgcaacgaaaacccccgcgccccctccccccgccccgcctcgcgccttcccgctacctcgacgtccgcgaa

SEQ ID NO: 36847 - DNA, 1065 bp, Artificial Sequence
  chemically treated genomic DNA (Homo sapiens) CpG-island No: 36847
gttagttgttaatataattttttgtgttttattcggaataagagtggtttttagttatgtatagaaaaatggatatgttggtcggaagatacgcgcgttcgttcgtgacgaagtgatatttggtgttgaggaaaaaaatttatagacgtcgagcgagcgtttagttatttttggacgtttttaatttttttaggttgaattttatttatttttttttcgttattttcgcggcgttttatttgtcgttcgttcgtttgttcggtatttttttattgtttttgggttcggggagacgaattaggtgttttttcgtcgttttcgtcgggggatttcgcgttattcggcgcgtcgtagttttttcgttttattttcgggtcgtttcgttttcgttataaaggtagcgagtagagttcggtgataggttttcggtttttgggcgcggatagtacggtcgggttttttcggtgggcgacgcgaggcggtagggaaggtaggtacggtttttaggttggtattggcgttttttcgttattcgtacgcgtttcgtttatattttcgttgagttttttattttttcggaaaagttcgttgcggcgttttttcgcgcggttagggcgtttagttcgttaaagggtagtttttgtcggttataggcgagttttcgcgttcggttcgcgattttttattttttgttcgcgtttcggagttttcgcggtcgtttatttggttttagcggggcgcgagggtagaggattagggggtggttttcggttcggtcgggttggtttttttatttttagtgtcgttttttgcgtcgcgttgcgtttcgttgtttcggtcgttcgatttcgaggtgttagcgtcgtcggcggttggcgtttttttggtaggcgcgcggttcgcgcgtttagtttttcggggcggagcgaggcggcggtcgtcgtagtcggaggcggattttttaggtgttgtttttttcgttcgttttggttttcgtagcggggattttcgcgtttttttttttcgtttcgtttcgcgttttttcgttgtttcggcgttcgcgag

SEQ ID NO: 36848 - DNA, 1065 bp, Artificial Sequence
  chemically treated genomic DNA (Homo sapiens) CpG-island No: 36848
ctcgcgaacgccgaaacaacgaaaaaacgcgaaacgaaacgaaaaaaaaaaacgcgaaaatccccgctacgaaaaccaaaacgaacgaaaaaaacaacacctaaaaaatccgcctccgactacgacgaccgccgcctcgctccgccccgaaaaactaaacgcgcgaaccgcgcgcctaccaaaaaaacgccaaccgccgacgacgctaacacctcgaaatcgaacgaccgaaacaacgaaacgcaacgcgacgcaaaaaacgacactaaaaataaaaaaaccaacccgaccgaaccgaaaaccaccccctaatcctctaccctcgcgccccgctaaaaccaaataaacgaccgcgaaaactccgaaacgcgaacaaaaaataaaaaatcgcgaaccgaacgcgaaaactcgcctataaccgacaaaaactaccctttaacgaactaaacgccctaaccgcgcgaaaaaacgccgcaacgaacttttccgaaaaaataaaaaactcaacgaaaatataaacgaaacgcgtacgaataacgaaaaaacgccaataccaacctaaaaaccgtacctaccttccctaccgcctcgcgtcgcccaccgaaaaaacccgaccgtactatccgcgcccaaaaaccgaaaacctatcaccgaactctactcgctacctttataacgaaaacgaaacgacccgaaaataaaacgaaaaaactacgacgcgccgaataacgcgaaatcccccgacgaaaacgacgaaaaaacacctaattcgtctccccgaacccaaaaacaataaaaaaataccgaacaaacgaacgaacgacaaataaaacgccgcgaaaataacgaaaaaaaaataaataaaattcaacctaaaaaaattaaaaacgtccaaaaataactaaacgctcgctcgacgtctataaatttttttcctcaacaccaaatatcacttcgtcacgaacgaacgcgcgtatcttccgaccaacatatccatttttctatacataactaaaaaccactcttattccgaataaaacacaaaaaattatattaacaactaac

SEQ ID NO: 36849 - DNA, 821 bp, Artificial Sequence
  chemically treated genomic DNA (Homo sapiens) CpG-island No: 36849
cggcgtgaaaggtcgcgcgcggggtacggcgggaaaagacgttgcgcgtagaaatattcgtttcgcgtcgcgttttagtgggcggttttgtcgcgggcggttttgattggattgtcgaatttcgcgcgttgattggtcgcgtgggcgaggcggaggagagtcgtgcgtagcggcgtatgtggggtcgtgtgtagattcgcgtgtggcgtaggtaaggatttttaaaataaatagtttttattttgcgagtcgttttttttaggtttgcgttcgagttttcgtcgttgcgggttcgtttcgacgcggaaggtgagggttgggggaggggttcggcgttgacggagtcgtagtgcgggtcgggtttgtggcggatagagagggtagggagcggcgaggtggcgatggcggtcgtattttggtttgcgtttttgttgcgttaggcgggaagttcggttgttgtcgtcgtttcggattcgggtttttggcgtatcgttgtcggacgatatttttgtttttttttcgttttggaaagttgggtcgtcgagtatgcgggtttttcggcgttacggtcgtattttaggtcgtaggtttagggtagaggaggttcgttcgtgcgtttttggggtcgaggttttgacgtttcgagggtcgcggaatgagggatcgagggtggatttggcgggaatttattggaaggagttcgtgtggtggggaaaggttttcggttgcggatgaaggggggatggggtgggtatagtcgtgtaggttatgtgttggggtcgtgcgtttggcgggttatgtgttaagggttttgggggttt

SEQ ID NO: 36850 - DNA, 821 bp, Artificial Sequence
  chemically treated genomic DNA (Homo sapiens) CpG-island No: 36850
aaacccccaaaacccttaacacataacccgccaaacgcacgaccccaacacataacctacacgactatacccaccccatccccccttcatccgcaaccgaaaacctttccccaccacacgaactccttccaataaattcccgccaaatccaccctcgatccctcattccgcgaccctcgaaacgtcaaaacctcgaccccaaaaacgcacgaacgaacctcctctaccctaaacctacgacctaaaatacgaccgtaacgccgaaaaacccgcatactcgacgacccaactttccaaaacgaaaaaaaaacaaaaatatcgtccgacaacgatacgccaaaaacccgaatccgaaacgacgacaacaaccgaacttcccgcctaacgcaacaaaaacgcaaaccaaaatacgaccgccatcgccacctcgccgctccctaccctctctatccgccacaaacccgacccgcactacgactccgtcaacgccgaacccctcccccaaccctcaccttccgcgtcgaaacgaacccgcaacgacgaaaactcgaacgcaaacctaaaaaaaacgactcgcaaaataaaaactatttattttaaaaatccttacctacgccacacgcgaatctacacacgaccccacatacgccgctacgcacgactctcctccgcctcgcccacgcgaccaatcaacgcgcgaaattcgacaatccaatcaaaaccgcccgcgacaaaaccgcccactaaaacgcgacgcgaaacgaatatttctacgcgcaacgtcttttcccgccgtaccccgcgcgcgacctttcacgccg

SEQ ID NO: 36851 - DNA, 821 bp, Artificial Sequence
  chemically treated genomic DNA (Homo sapiens) CpG-island No: 36851
aggtttttaaaatttttggtatatggttcgttaggcgtacgattttagtatatggtttgtacgattatatttattttattttttttttattcgtagtcgggagtttttttttattatacggattttttttagtgagttttcgttaaatttattttcggttttttatttcgcgattttcgaagcgttagggtttcggttttaagggcgtacgggcgggttttttttgttttaagtttgcggtttggggtgcggtcgtggcgtcgaaagattcgtatgttcggcgatttagttttttaggacgaagaaaggatagaagtgtcgttcgatagcggtgcgttagaaattcgggttcgaggcggcggtagtagtcgagtttttcgtttgacgtagtagaggcgtaggttaaagtgcggtcgttatcgttatttcgtcgttttttattttttttgttcgttatagattcgattcgtattgcggtttcgttagcgtcgggttttttttttagtttttatttttcgcgtcggagcgggttcgtagcggcggagattcggacgtaggtttggggaagacggttcgtaaggtagaggttgtttattttgagggtttttgtttgcgttatacgcgggtttgtatacggttttatatacgtcgttgcgtacggttttttttcgtttcgtttacgcggttaattagcgcgcggggttcggtagtttaattagagtcgttcgcggtagggtcgtttattagagcgcggcgcggggcgggtgtttttgcgcgtagcgttttttttcgtcgtgtttcgcgcgcggttttttacgtcg

SEQ ID NO: 36852 - DNA, 821 bp, Artificial Sequence
  chemically treated genomic DNA (Homo sapiens) CpG-island No: 36852
cgacgtaaaaaaccgcgcgcgaaacacgacgaaaaaaaacgctacgcgcaaaaacacccgccccgcgccgcgctctaataaacgaccctaccgcgaacgactctaattaaactaccgaaccccgcgcgctaattaaccgcgtaaacgaaacgaaaaaaaaccgtacgcaacgacgtatataaaaccgtatacaaacccgcgtataacgcaaacaaaaaccctcaaaataaacaacctctaccttacgaaccgtcttccccaaacctacgtccgaatctccgccgctacgaacccgctccgacgcgaaaaataaaaactaaaaaaaaaacccgacgctaacgaaaccgcaatacgaatcgaatctataacgaacaaaaaaaataaaaaacgacgaaataacgataacgaccgcactttaacctacgcctctactacgtcaaacgaaaaactcgactactaccgccgcctcgaacccgaatttctaacgcaccgctatcgaacgacacttctatcctttcttcgtcctaaaaaactaaatcgccgaacatacgaatctttcgacgccacgaccgcaccccaaaccgcaaacttaaaacaaaaaaaacccgcccgtacgcccttaaaaccgaaaccctaacgcttcgaaaatcgcgaaataaaaaaccgaaaataaatttaacgaaaactcactaaaaaaaatccgtataataaaaaaaaactcccgactacgaataaaaaaaaaataaaataaatataatcgtacaaaccatatactaaaatcgtacgcctaacgaaccatataccaaaaattttaaaaacct

SEQ ID NO: 36853 - DNA, 885 bp, Artificial Sequence
  chemically treated genomic DNA (Homo sapiens) CpG-island No: 36853
cgcggtgtgggcgcgtcggggtgttgatggaggaggggtcgaggtgttgagggcggggtcgggttggggtcggggttgagggcggagtcgggtcgggcggagttagagttgaggtgagtttgagggcggagtcggggcgggttgaggtgggtttgtgggcggagtcggggcggtgtgttgaggtgggtttgagggcggagtcgaggtcgggttgaaggtcggagtcggggcgggttgaggtgggtttgaaggtagagtcgaggtcggagttggggacggagtcgagttcgggttgagggcggagtcggggcgggttgaggtggttttgtgggcggagtcgaggtcgggttgagggtagagtcgggtcggagtcggggcgcgttgaggtgggtttgggggcggagtcgaggtcggagttgagggcggagtcgggggcggggacgtaggcggaattcgggtcgggttgaggtgggttcgagggttgggttgggggcggagtgggtgttagtttgagggcggagtcgggggcgggcgggggcgggttggggcgggtttataggttagattggtgtggtacggagttgaggatcggtcggagttttgcggagggttcggtttggcgggttcgggggggagtcgaattcgcggggtatcgggttcgggcggggtcgagtcgggtcggggcgggagttagtcggggtggggcggggtcgaggtcgaggtaggcggtcggtagtgttgggggtttaggtgttgcggcggttttacgtagttaggcggttcgtgggttggagcgggcggagttcggttcgcggtttgcgtgagtttaggtcggttttagcgtttagagcgtcggtttttcggttttttataggttagggtagg

SEQ ID NO: 36854 - DNA, 885 bp, Artificial Sequence
  chemically treated genomic DNA (Homo sapiens) CpG-island No: 36854
cctaccctaacctataaaaaaccgaaaaaccgacgctctaaacgctaaaaccgacctaaactcacgcaaaccgcgaaccgaactccgcccgctccaacccacgaaccgcctaactacgtaaaaccgccgcaacacctaaacccccaacactaccgaccgcctacctcgacctcgaccccgccccaccccgactaactcccgccccgacccgactcgaccccgcccgaacccgataccccgcgaattcgactcccccccgaacccgccaaaccgaaccctccgcaaaactccgaccgatcctcaactccgtaccacaccaatctaacctataaacccgccccaacccgcccccgcccgcccccgactccgccctcaaactaacacccactccgcccccaacccaaccctcgaacccacctcaacccgacccgaattccgcctacgtccccgcccccgactccgccctcaactccgacctcgactccgcccccaaacccacctcaacgcgccccgactccgacccgactctaccctcaacccgacctcgactccgcccacaaaaccacctcaacccgccccgactccgccctcaacccgaactcgactccgtccccaactccgacctcgactctaccttcaaacccacctcaacccgccccgactccgaccttcaacccgacctcgactccgccctcaaacccacctcaacacaccgccccgactccgcccacaaacccacctcaacccgccccgactccgccctcaaactcacctcaactctaactccgcccgacccgactccgccctcaaccccgaccccaacccgaccccgccctcaacacctcgacccctcctccatcaacaccccgacgcgcccacaccgcg

SEQ ID NO: 36855 - DNA, 885 bp, Artificial Sequence
  chemically treated genomic DNA (Homo sapiens) CpG-island No: 36855
tttgttttggtttataagaagtcgaagggtcggcgttttggacgttgggatcggtttgagtttacgtaagtcgcgggtcgagtttcgttcgttttagtttacgggtcgtttggttacgtggagtcgtcgtaatatttgaatttttagtattgtcgatcgtttgtttcggtttcggtttcgttttatttcggttggttttcgtttcggttcggttcggtttcgttcggattcggtgtttcgcgggttcggttttttttcggattcgttaagtcgggtttttcgtaaagtttcggtcggtttttagtttcgtgttatattagtttggtttgtaggttcgttttagttcgttttcgttcgttttcggtttcgtttttaggttggtatttatttcgtttttagtttaattttcgggtttattttagttcgattcgggtttcgtttacgttttcgttttcgatttcgtttttagtttcgatttcgatttcgtttttaggtttattttagcgcgtttcgatttcgattcgattttgtttttagttcgatttcgatttcgtttataggattattttagttcgtttcgatttcgtttttagttcgaattcgatttcgtttttagtttcgatttcgattttgtttttaggtttattttagttcgtttcgatttcggtttttagttcgatttcgatttcgtttttaggtttattttagtatatcgtttcgatttcgtttataggtttattttagttcgtttcgatttcgtttttaggtttattttagttttgatttcgttcgattcgatttcgtttttagtttcgattttagttcgatttcgtttttagtatttcggttttttttttattaatatttcggcgcgtttatatcgcg

SEQ ID NO: 36856 - DNA, 885 bp, Artificial Sequence
  chemically treated genomic DNA (Homo sapiens) CpG-island No: 36856
cgcgatataaacgcgccgaaatattaataaaaaaaaaaccgaaatactaaaaacgaaatcgaactaaaatcgaaactaaaaacgaaatcgaatcgaacgaaatcaaaactaaaataaacctaaaaacgaaatcgaaacgaactaaaataaacctataaacgaaatcgaaacgatatactaaaataaacctaaaaacgaaatcgaaatcgaactaaaaaccgaaatcgaaacgaactaaaataaacctaaaaacaaaatcgaaatcgaaactaaaaacgaaatcgaattcgaactaaaaacgaaatcgaaacgaactaaaataatcctataaacgaaatcgaaatcgaactaaaaacaaaatcgaatcgaaatcgaaacgcgctaaaataaacctaaaaacgaaatcgaaatcgaaactaaaaacgaaatcgaaaacgaaaacgtaaacgaaacccgaatcgaactaaaataaacccgaaaattaaactaaaaacgaaataaataccaacctaaaaacgaaaccgaaaacgaacgaaaacgaactaaaacgaacctacaaaccaaactaatataacacgaaactaaaaaccgaccgaaactttacgaaaaacccgacttaacgaatccgaaaaaaaaccgaacccgcgaaacaccgaatccgaacgaaaccgaaccgaaccgaaacgaaaaccaaccgaaataaaacgaaaccgaaaccgaaacaaacgatcgacaatactaaaaattcaaatattacgacgactccacgtaaccaaacgacccgtaaactaaaacgaacgaaactcgacccgcgacttacgtaaactcaaaccgatcccaacgtccaaaacgccgacccttcgacttcttataaaccaaaacaaa

SEQ ID NO: 36857 - DNA, 589 bp, Artificial Sequence
  chemically treated genomic DNA (Homo sapiens) CpG-island No: 36857
tttcgttagtttttttttttttcgtcgtttgggttttaataagaggggtcggcggggtaggttgattaagtagttcgcgttttcgttgcggagttgcgtttcggtttcgcgtcgtcgtcgtttacgttcggatttatcggggtttttttcgtcgatacgcggtagtagtcggggtaggtgggtagtcgttacgtaggtggcgtttaagacgcggttgagttcgttttagggtgggtagtagtagtcggaggaagttatcgtcgtcggttcgtttcgcgtcggtattagcgtacgggttcggcggggcgcgggggtagttatttagttcggattatcgtagttcggattgttaatagagtggtgtatgatgattacgagagcgaggaggaggagtaagaggaggggggcggcgatgttcgaggagatttacgagtttgaggataattaggaggatgatatggaggaggacgacgatgatttcgattattcggagagttggaagatgacgacgaggacgttagttattttacggaaagtagttttagtagtattttaggtatttatttagcgtagttgttgtagatttatt

SEQ ID NO: 36858 - DNA, 589 bp, Artificial Sequence
  chemically treated genomic DNA (Homo sapiens) CpG-island No: 36858
aataaatctacaacaactacgctaaataaatacctaaaatactactaaaactactttccgtaaaataactaacgtcctcgtcgtcatcttccaactctccgaataatcgaaatcatcgtcgtcctcctccatatcatcctcctaattatcctcaaactcgtaaatctcctcgaacatcgccgcccccctcctcttactcctcctcctcgctctcgtaatcatcatacaccactctattaacaatccgaactacgataatccgaactaaataactacccccgcgccccgccgaacccgtacgctaataccgacgcgaaacgaaccgacgacgataacttcctccgactactactacccaccctaaaacgaactcaaccgcgtcttaaacgccacctacgtaacgactacccacctaccccgactactaccgcgtatcgacgaaaaaaaccccgataaatccgaacgtaaacgacgacgacgcgaaaccgaaacgcaactccgcaacgaaaacgcgaactacttaatcaacctaccccgccgacccctcttattaaaacccaaacgacgaaaaaaaaaaaaactaacgaaa

SEQ ID NO: 36859 - DNA, 589 bp, Artificial Sequence
  chemically treated genomic DNA (Homo sapiens) CpG-island No: 36859
aatgagtttgtagtaattgcgttgggtgggtatttggagtgttgttgaagttgtttttcgtggagtaattggcgttttcgtcgttattttttagtttttcggataatcggagttatcgtcgtttttttttatgttatttttttagttgtttttagattcgtgggttttttcgggtatcgtcgtttttttttttttatttttttttttcgttttcgtagttattatatattattttgttgatagttcgggttgcggtggttcgggttaggtggttgttttcgcgtttcgtcgggttcgtgcgttggtgtcggcgcggggcgggtcggcggcggtggtttttttcggttattgttgtttattttggggcgagtttagtcgcgttttgggcgttatttacgtggcggttgtttatttgtttcggttattatcgcgtatcggcgaggggagtttcgatgggttcggacgtgggcggcggcggcgcggggtcggggcgtagtttcgtagcgggagcgcgggttgtttggttagtttgtttcgtcggttttttttgttggagtttaggcggcgggagaagggaaagttgacgggg

SEQ ID NO: 36860 - DNA, 589 bp, Artificial Sequence
  chemically treated genomic DNA (Homo sapiens) CpG-island No: 36860
ccccgtcaactttcccttctcccgccgcctaaactccaacaaaaaaaaccgacgaaacaaactaaccaaacaacccgcgctcccgctacgaaactacgccccgaccccgcgccgccgccgcccacgtccgaacccatcgaaactcccctcgccgatacgcgataataaccgaaacaaataaacaaccgccacgtaaataacgcccaaaacgcgactaaactcgccccaaaataaacaacaataaccgaaaaaaaccaccgccgccgacccgccccgcgccgacaccaacgcacgaacccgacgaaacgcgaaaacaaccacctaacccgaaccaccgcaacccgaactatcaacaaaataatatataataactacgaaaacgaaaaaaaaaaataaaaaaaaaaaaacgacgatacccgaaaaaacccacgaatctaaaaacaactaaaaaaataacataaaaaaaaacgacgataactccgattatccgaaaaactaaaaaataacgacgaaaacgccaattactccacgaaaaacaacttcaacaacactccaaatacccacccaacgcaattactacaaactcatt

SEQ ID NO: 36861 - DNA, 569 bp, Artificial Sequence
  chemically treated genomic DNA (Homo sapiens) CpG-island No: 36861
cgtcggtgatgtacgggttgtttttgagggattcggggatttgttcgtaggtgtataggcggatgttacggggtattaggatcggttagtattggtagttgtttagttcgatgtaatgcgcgttttttagtagtttttgatgtatcgttttcggtcgtcgtcgtttttcggttcgggagtttttttaggtttcgttttttcggggagggggtttcgtcgttggcgttttcgtttcggagttcgcggacgttgcgcgaggttttatcgcgttgtcgttgttgtttagggttcggttttgcgtttatatcggttattgtcgttagcgtcgcggcggattcggtagcgtcgtagttttttttgacgttagcgcgtcgcggcggtttcgttttttagttttagttgggaggggtagggtgttggggcgcgttcgggtgtgttcgagcgtgcgttggcggcggttcgggttttcgggcgttttttacgttgtgttttggcggcgtttggggttttcgtttgtatatgagaagagtcgaaagtatagagttataggcgaatataagtggattttt

SEQ ID NO: 36862 - DNA, 569 bp, Artificial Sequence
  chemically treated genomic DNA (Homo sapiens) CpG-island No: 36862
aaaaatccacttatattcgcctataactctatactttcgactcttctcatatacaaacgaaaaccccaaacgccgccaaaacacaacgtaaaaaacgcccgaaaacccgaaccgccgccaacgcacgctcgaacacacccgaacgcgccccaacaccctacccctcccaactaaaactaaaaaacgaaaccgccgcgacgcgctaacgtcaaaaaaaactacgacgctaccgaatccgccgcgacgctaacgacaataaccgatataaacgcaaaaccgaaccctaaacaacaacgacaacgcgataaaacctcgcgcaacgtccgcgaactccgaaacgaaaacgccaacgacgaaaccccctccccgaaaaaacgaaacctaaaaaaactcccgaaccgaaaaacgacgacgaccgaaaacgatacatcaaaaactactaaaaaacgcgcattacatcgaactaaacaactaccaatactaaccgatcctaataccccgtaacatccgcctatacacctacgaacaaatccccgaatccctcaaaaacaacccgtacatcaccgacg

SEQ ID NO: 36863 - DNA, 569 bp, Artificial Sequence
  chemically treated genomic DNA (Homo sapiens) CpG-island No: 36863
aaaaatttatttgtattcgtttgtagttttgtgttttcggttttttttatatgtaaacgaagattttaggcgtcgttaaaatatagcgtgagagacgttcgggagttcgggtcgtcgttagcgtacgttcgagtatattcgggcgcgttttagtattttgttttttttagttagggttgaggggcggggtcgtcgcggcgcgttgacgttagaggaggttgcgacgttgtcgggttcgtcgcggcgttggcggtagtggtcggtgtgagcgtagagtcgggttttgggtagtagcggtagcgcggtaggatttcgcgtagcgttcgcgggtttcggggcgggggcgttagcggcgaagtttttttttcggggaggcgggatttgggggagttttcgagtcggggagcggcggcggtcgggaacgatgtattagaagttgttgaagagcgcgtattatatcgagttgggtagttattagtattggtcggttttggtgtttcgtggtattcgtttgtatatttacgagtagattttcgggttttttaaggataattcgtatattatcgacg

SEQ ID NO: 36864 - DNA, 569 bp, Artificial Sequence
  chemically treated genomic DNA (Homo sapiens) CpG-island No: 36864
cgtcgataatatacgaattatccttaaaaaacccgaaaatctactcgtaaatatacaaacgaataccacgaaacaccaaaaccgaccaatactaataactacccaactcgatataatacgcgctcttcaacaacttctaatacatcgttcccgaccgccgccgctccccgactcgaaaactcccccaaatcccgcctccccgaaaaaaaaacttcgccgctaacgcccccgccccgaaacccgcgaacgctacgcgaaatcctaccgcgctaccgctactacccaaaacccgactctacgctcacaccgaccactaccgccaacgccgcgacgaacccgacaacgtcgcaacctcctctaacgtcaacgcgccgcgacgaccccgcccctcaaccctaactaaaaaaaacaaaatactaaaacgcgcccgaatatactcgaacgtacgctaacgacgacccgaactcccgaacgtctctcacgctatattttaacgacgcctaaaatcttcgtttacatataaaaaaaaccgaaaacacaaaactacaaacgaatacaaataaattttt

SEQ ID NO: 36865 - DNA, 519 bp, Artificial Sequence
  chemically treated genomic DNA (Homo sapiens) CpG-island No: 36865
cggtggtaggagcggttgttggagtagtagtggcggcgggtattttgtgttcgcgttttcgaggtaatcgattgcgtcgtttttattttcgcgcggtcgggcgggacgtgtttttagattagggttttcggattttggtttcgcgtcgtcgtttttgttcgttgttgtcgttaggaggtcgttgggaggaggcgaagttggggtcgtattcggaagtttagcgtcgtaagggagaggcggcgtttgttttattaaaggtgcggagtttttgcgttttcggaggaggttttgcgtagggtcgttcggggtagcgtttttggggtttattttatcggggtgatcgcgggtttgatataatagacggttgggttttggtttacgattcgttttcggaggcgttttgtttcggtcgtgcggcgagtcgggcgaggggaattttaggttgtttttgagcgtcggggttacggggttaggttcgtggagaggacgtttttgttttagattcggtttcggtttagt

SEQ ID NO: 36866 - DNA, 519 bp, Artificial Sequence
  chemically treated genomic DNA (Homo sapiens) CpG-island No: 36866
actaaaccgaaaccgaatctaaaacaaaaacgtcctctccacgaacctaaccccgtaaccccgacgctcaaaaacaacctaaaattcccctcgcccgactcgccgcacgaccgaaacaaaacgcctccgaaaacgaatcgtaaaccaaaacccaaccgtctattatatcaaacccgcgatcaccccgataaaataaaccccaaaaacgctaccccgaacgaccctacgcaaaacctcctccgaaaacgcaaaaactccgcacctttaataaaacaaacgccgcctctcccttacgacgctaaacttccgaatacgaccccaacttcgcctcctcccaacgacctcctaacgacaacaacgaacaaaaacgacgacgcgaaaccaaaatccgaaaaccctaatctaaaaacacgtcccgcccgaccgcgcgaaaataaaaacgacgcaatcgattacctcgaaaacgcgaacacaaaatacccgccgccactactactccaacaaccgctcctaccaccg

SEQ ID NO: 36867 - DNA, 519 bp, Artificial Sequence
  chemically treated genomic DNA (Homo sapiens) CpG-island No: 36867
gttgggtcggggtcgggtttggggtaggggcgttttttttacgagtttagtttcgtggtttcggcgtttaggggtagtttggagtttttttcgttcggttcgtcgtacggtcggggtagggcgttttcgggagcggatcgtgggttagggtttagtcgtttgttgtgttaggttcgcggttatttcgatgaggtggattttagggacgttgtttcgggcggttttgcgtagagtttttttcggaggcgtaggaatttcgtatttttggtagggtaggcgtcgttttttttttacggcgttgggttttcgaatgcggttttagtttcgtttttttttagcggttttttggcggtagtagcgggtaagagcggcgacgcggggttagggttcggaggttttgatttggaggtacgtttcgttcggtcgcgcgagggtgggggcggcgtagtcggttgtttcggggacgcgggtatagggtattcgtcgttattgttgttttagtagtcgtttttgttatcg

SEQ ID NO: 36868 - DNA, 519 bp, Artificial Sequence
  chemically treated genomic DNA (Homo sapiens) CpG-island No: 36868
cgataacaaaaacgactactaaaacaacaataacgacgaataccctatacccgcgtccccgaaacaaccgactacgccgcccccaccctcgcgcgaccgaacgaaacgtacctccaaatcaaaacctccgaaccctaaccccgcgtcgccgctcttacccgctactaccgccaaaaaaccgctaaaaaaaaacgaaactaaaaccgcattcgaaaacccaacgccgtaaaaaaaaaacgacgcctaccctaccaaaaatacgaaattcctacgcctccgaaaaaaactctacgcaaaaccgcccgaaacaacgtccctaaaatccacctcatcgaaataaccgcgaacctaacacaacaaacgactaaaccctaacccacgatccgctcccgaaaacgccctaccccgaccgtacgacgaaccgaacgaaaaaaactccaaactacccctaaacgccgaaaccacgaaactaaactcgtaaaaaaaacgcccctaccccaaacccgaccccgacccaac

SEQ ID NO: 36869 - DNA, 515 bp, Artificial Sequence
  chemically treated genomic DNA (Homo sapiens) CpG-island No: 36869
gatttcgtttgagttttggtcgtttttcgatttttcgggttcgttttgcgttttagtttttttttcgtcgtggggttcggggttaggggcgcgcggttgtagttaggtttatattttttttatttttcgttattgttttgggtttttgtggtcgcgtttttatattcgttttcggtcgttttacggttttagggagtgatgatttattttttttttttcgttgatattatcgtgtttttagcgtggttcggtcgggcggcggtttcgtttttttaggtttttttttagtttttttcggcgagcgggcgtaggcgcggtgcgtttttttcggtcggtagggggcgtcggagtcgtcggggtttttagggtttttttagttacggttcgggtcggcgaagagggaggggtagagagtcgtcgcggtttcgttttttcggggagagtttggttgggagttagagtttttacggtaacggatagggaagttgagtttcgagttttgattaaggtagtat

SEQ ID NO: 36870 - DNA, 515 bp, Artificial Sequence
  chemically treated genomic DNA (Homo sapiens) CpG-island No: 36870
atactaccttaatcaaaactcgaaactcaacttccctatccgttaccgtaaaaactctaactcccaaccaaactctccccgaaaaaacgaaaccgcgacgactctctacccctccctcttcgccgacccgaaccgtaactaaaaaaaccctaaaaaccccgacgactccgacgccccctaccgaccgaaaaaaacgcaccgcgcctacgcccgctcgccgaaaaaaactaaaaaaaaacctaaaaaaacgaaaccgccgcccgaccgaaccacgctaaaaacacgataatatcaacgaaaaaaaaaaaataaatcatcactccctaaaaccgtaaaacgaccgaaaacgaatataaaaacgcgaccacaaaaacccaaaacaataacgaaaaataaaaaaaatataaacctaactacaaccgcgcgcccctaaccccgaaccccacgacgaaaaaaaaactaaaacgcaaaacgaacccgaaaaatcgaaaaacgaccaaaactcaaacgaaatc

SEQ ID NO: 36871 - DNA, 515 bp, Artificial Sequence
  chemically treated genomic DNA (Homo sapiens) CpG-island No: 36871
gtgttgttttggttaaggttcggaatttagtttttttattcgttatcgtgagagttttgatttttagttaggtttttttcgggagagcgggatcgcggcggttttttgttttttttttttcgtcggttcgggtcgtggttggggaggttttagaggtttcggcggtttcggcgttttttgtcggtcgagaagggcgtatcgcgtttgcgttcgttcgtcgagaggggttgggaggagatttgggagggcggagtcgtcgttcggtcgggttacgttgggggtacgatgatgttagcggaggaaaggaaatgagttattattttttgggatcgtggggcggtcgggagcgagtgtggagacgcggttataggaatttaggataatggcgggaagtaagaggaatgtgggtttgattgtagtcgcgcgtttttgatttcggattttacggcggggaggaggttggggcgtagggcgggttcgaggggtcggaaggcggttagaatttaggcggggtt

SEQ ID NO: 36872 - DNA, 515 bp, Artificial Sequence
  chemically treated genomic DNA (Homo sapiens) CpG-island No: 36872
aaccccgcctaaattctaaccgccttccgacccctcgaacccgccctacgccccaacctcctccccgccgtaaaatccgaaatcaaaaacgcgcgactacaatcaaacccacattcctcttacttcccgccattatcctaaattcctataaccgcgtctccacactcgctcccgaccgccccacgatcccaaaaaataataactcatttcctttcctccgctaacatcatcgtacccccaacgtaacccgaccgaacgacgactccgccctcccaaatctcctcccaacccctctcgacgaacgaacgcaaacgcgatacgcccttctcgaccgacaaaaaacgccgaaaccgccgaaacctctaaaacctccccaaccacgacccgaaccgacgaaaaaaaaaaaacaaaaaaccgccgcgatcccgctctcccgaaaaaaacctaactaaaaatcaaaactctcacgataacgaataaaaaaactaaattccgaaccttaaccaaaacaacac

SEQ ID NO: 36873 - DNA, 1229 bp, Artificial Sequence
  chemically treated genomic DNA (Homo sapiens) CpG-island No: 36873
  unsure (948)
gaggagttcgcggttttttagaggggcgggtttgcgttcgggtaatcgtgcgcgacgtttacgagtttttaggacgattagttttttagtttttaggtttcgacgtttgcgttatttaagttatatattcgttcgttcggtcgcggttaaggtcggcggtagttacgtagtcgtcgtcgttcggggttttatagtttacgggtcggatggatcgagcgtcggttgcggcgtttcggtgcgcgcgcgcgttttagttaatcgcgttttcgttcgtttttcgtcgcggcggcgaggttggcgttgggaagaggaagaagaatattcgttttttttttattagcgcgcgggcggcggcggcggcggtatcggggttacgaattttgattttttattgataaaaataataataaattttttttttttcgcgatttcggcggcgttttcgggttcgttttcgttatttcgtttttatttcggcgtttcgtttttcgttcgttgtttcgcgagttcgcggttttcgggttttcgttattcgtcgatatcgggagttcgggtttttcgcgttttgtttttcgcgtcgggggtcgttcgtcgtagatacgggattcgtttcgaggtcgttttggcgttaaattttgaggtaaaattgaaagagggtcgggcgggttcgggtcggcggcggagggggcgggtttggcgcgcggatatggaggcgtcgcggcggcggttgaattcgatttttttatttttgttacggggtggcggcggcggcgttcggcgttttgtatagtgggtcgggtcgtttttttttttttttcgttcgcggtcgggcgaagcgagcgggttttttttgatcggttcggtcggcgtaagggtgggggtggagggggaatggtcgcggtttcgttttatagttggtttttcgttagcgtcgatatttttattttnggggtgatggtttcggttgggcggtttttttttttttttatttttttttttttttcgtttgtcgtttttttttgtttttttgtcgggatttttattttttcgttttttgttcgtttttgtcggtcggtgtagttttttcgtcgttttttttgtttgtgagggtttttttttcggtcgtcggtcggttgtttcgtttttttttttgcgcgttgttgggttgttttatttttttttttttttttagtttcgttttttgttgtttttgtttttttttgttttgt

SEQ ID NO: 36874 - DNA, 1229 bp, Artificial Sequence
  chemically treated genomic DNA (Homo sapiens) CpG-island No: 36874
  unsure (282)
acaaaacaaaaaaaaacaaaaacaacaaaaaacgaaactaaaaaaaaaaaaaaaaataaaacaacccaacaacgcgcaaaaaaaaaaacgaaacaaccgaccgacgaccgaaaaaaaaaccctcacaaacaaaaaaaacgacgaaaaaactacaccgaccgacaaaaacgaacaaaaaacgaaaaaataaaaatcccgacaaaaaaacaaaaaaaaacgacaaacgaaaaaaaaaaaaaaataaaaaaaaaaaaaaaccgcccaaccgaaaccatcaccccnaaaataaaaatatcgacgctaacgaaaaaccaactataaaacgaaaccgcgaccattccccctccacccccacccttacgccgaccgaaccgatcaaaaaaaacccgctcgcttcgcccgaccgcgaacgaaaaaaaaaaaaaaacgacccgacccactatacaaaacgccgaacgccgccgccgccaccccgtaacaaaaataaaaaaatcgaattcaaccgccgccgcgacgcctccatatccgcgcgccaaacccgccccctccgccgccgacccgaacccgcccgaccctctttcaattttacctcaaaatttaacgccaaaacgacctcgaaacgaatcccgtatctacgacgaacgacccccgacgcgaaaaacaaaacgcgaaaaacccgaactcccgatatcgacgaataacgaaaacccgaaaaccgcgaactcgcgaaacaacgaacgaaaaacgaaacgccgaaataaaaacgaaataacgaaaacgaacccgaaaacgccgccgaaatcgcgaaaaaaaaaaaatttattattatttttatcaataaaaaatcaaaattcgtaaccccgataccgccgccgccgccgcccgcgcgctaataaaaaaaaaacgaatattcttcttcctcttcccaacgccaacctcgccgccgcgacgaaaaacgaacgaaaacgcgattaactaaaacgcgcgcgcgcaccgaaacgccgcaaccgacgctcgatccatccgacccgtaaactataaaaccccgaacgacgacgactacgtaactaccgccgaccttaaccgcgaccgaacgaacgaatatataacttaaataacgcaaacgtcgaaacctaaaaactaaaaaactaatcgtcctaaaaactcgtaaacgtcgcgcacgattacccgaacgcaaacccgcccctctaaaaaaccgcgaactcctc

SEQ ID NO: 36875 - DNA, 1229 bp, Artificial Sequence
  chemically treated genomic DNA (Homo sapiens) CpG-island No: 36875
  unsure (282)
gtaaagtagagaggaataaaaataataagagacgaaattaaggaagaggaagaaaatgagatagtttaatagcgcgtaagagggagagcggggtagtcggtcggcggtcggaaaaagaatttttataaatagaaaaaacggcggagaggttgtatcgatcgataaaggcggataaaaagcggagaggtaaaaatttcggtagagaagtaagaagggacggtaggcgggagaaggaggaggataagaaaaaagggagatcgtttagtcggagttattattttngaagtagaaatgtcggcgttggcggagggttaattataaggcggggtcgcggttattttttttttatttttatttttgcgtcggtcgggtcggttagggggaattcgttcgtttcgttcggtcgcgggcggggaggggaggggagcggttcggtttattatgtaaagcgtcgggcgtcgtcgtcgttatttcgtggtaaaggtaaaagggtcgggtttagtcgtcgtcgcggcgtttttatgttcgcgcgttaggttcgtttttttcgtcgtcggttcgagttcgttcgatttttttttaattttattttaggatttggcgttaaagcggtttcgaagcgggtttcgtgtttgcggcgggcggttttcggcgcggagggtagggcgcggggagttcgggttttcggtgtcggcggatggcgggagttcgggggtcgcgggttcgcggggtagcgggcgagagacgagacgtcgaggtgggagcggggtggcggggacgggttcgggggcgtcgtcggggtcgcggagaagggggggtttgttattgtttttgttagtgaaaggttagagttcgtgatttcggtgtcgtcgtcgtcgtcgttcgcgcgttggtaggaggagggcgaatgtttttttttttttttttagcgttagtttcgtcgtcgcggcggggggcgggcgagaacgcgattggttgaggcgcgcgcgcgtatcggaacgtcgtagtcggcgttcggtttattcggttcgtgggttgtggggtttcgggcggcggcggttacgtagttgtcgtcggttttggtcgcggtcgggcgggcggatatgtggtttaaatggcgtaggcgtcggggtttagaggttgaagggttggtcgttttaaaaattcgtggacgtcgcgtacggttattcggacgtaggttcgtttttttggggaatcgcgagtttttt

SEQ ID NO: 36876 - DNA, 1229 bp, Artificial Sequence
  chemically treated genomic DNA (Homo sapiens) CpG-island No: 36876
  unsure (948)
aaaaaactcgcgattccccaaaaaaacgaacctacgtccgaataaccgtacgcgacgtccacgaatttttaaaacgaccaacccttcaacctctaaaccccgacgcctacgccatttaaaccacatatccgcccgcccgaccgcgaccaaaaccgacgacaactacgtaaccgccgccgcccgaaaccccacaacccacgaaccgaataaaccgaacgccgactacgacgttccgatacgcgcgcgcgcctcaaccaatcgcgttctcgcccgccccccgccgcgacgacgaaactaacgctaaaaaaaaaaaaaaaaacattcgccctcctcctaccaacgcgcgaacgacgacgacgacgacaccgaaatcacgaactctaacctttcactaacaaaaacaataacaaacccccccttctccgcgaccccgacgacgcccccgaacccgtccccgccaccccgctcccacctcgacgtctcgtctctcgcccgctaccccgcgaacccgcgacccccgaactcccgccatccgccgacaccgaaaacccgaactccccgcgccctaccctccgcgccgaaaaccgcccgccgcaaacacgaaacccgcttcgaaaccgctttaacgccaaatcctaaaataaaattaaaaaaaaatcgaacgaactcgaaccgacgacgaaaaaaacgaacctaacgcgcgaacataaaaacgccgcgacgacgactaaacccgacccttttacctttaccacgaaataacgacgacgacgcccgacgctttacataataaaccgaaccgctcccctcccctccccgcccgcgaccgaacgaaacgaacgaattccccctaaccgacccgaccgacgcaaaaataaaaataaaaaaaaaataaccgcgaccccgccttataattaaccctccgccaacgccgacatttctacttcnaaaataataactccgactaaacgatctcccttttttcttatcctcctccttctcccgcctaccgtcccttcttacttctctaccgaaatttttacctctccgctttttatccgcctttatcgatcgatacaacctctccgccgttttttctatttataaaaattctttttccgaccgccgaccgactaccccgctctccctcttacgcgctattaaactatctcattttcttcctcttccttaatttcgtctcttattatttttattcctctctactttac

SEQ ID NO: 36877 - DNA, 535 bp, Artificial Sequence
  chemically treated genomic DNA (Homo sapiens) CpG-island No: 36877
  unsure (126..127, 137..138, 150..151, 153, 286..287, 289, 295..296)
  unsure (372..)
gtttcgttttcgtgttgcgtggttatttgtatgtagtttcgggattggttattcggttttcgcgaggggaaggggagggaagtagcgcgtattcgcgcgtgcgtgagttggcgcgcgagaaagggnncggtcgcgtnnnggttcgagcgnnnntcgttattttgtaaggttttttttgacgtgggagtcgtcgtcgttgtcgttattcggaggtgcgagggggtcgtgtgtgtgtgatgtggggagttcgggggcgggtcgggtcgggttttcggtagattgtatnnnncggatnnnggttttttattttgtagcgggaggtttgggaagataacgggaggaggcggggtcgggttttcggaaggaggcggnntaggggtcgggtcgagtttttgttggggcgaagaagttggagggtgggtcgttgggggcgaggtggttggttttcggtttgggggaaaggggatttttttttttttagagtattttgaaaggcgttagtgcgcgtaggagaggtatatagatttttttttaa

SEQ ID NO: 36878 - DNA, 535 bp, Artificial Sequence
  chemically treated genomic DNA (Homo sapiens) CpG-island No: 36878
  unsure (163..164, 239..240, 247..248, 250, 383..384, 386, 397..398)
  unsure (409..)
ttaaaaaaaaatctatatacctctcctacgcgcactaacgcctttcaaaatactctaaaaaaaaaaaaatcccctttcccccaaaccgaaaaccaaccacctcgcccccaacgacccaccctccaacttcttcgccccaacaaaaactcgacccgacccctannccgcctccttccgaaaacccgaccccgcctcctcccgttatcttcccaaacctcccgctacaaaataaaaaaccnnnatccgnnnnatacaatctaccgaaaacccgacccgacccgcccccgaactccccacatcacacacacacgaccccctcgcacctccgaataacgacaacgacgacgactcccacgtcaaaaaaaaccttacaaaataacgannnncgctcgaaccnnnacgcgaccgnnccctttctcgcgcgccaactcacgcacgcgcgaatacgcgctacttccctccccttcccctcgcgaaaaccgaataaccaatcccgaaactacatacaaataaccacgcaacacgaaaacgaaac

SEQ ID NO: 36879 - DNA, 535 bp, Artificial Sequence
  chemically treated genomic DNA (Homo sapiens) CpG-island No: 36879
  unsure (163..164, 239..240, 247..248, 250, 383..384, 386, 397..398)
  unsure (409..)
ttggagggaaatttgtgtattttttttgcgcgtattagcgttttttaagatattttaaaaagaaaaaagtttttttttttttaaatcggggattaattatttcgtttttagcggtttattttttagttttttcgttttaataaagattcgattcgatttttgnntcgttttttttcggagattcggtttcgttttttttcgttgtttttttagatttttcgttgtaaaatgagaaattnnnattcgnnnngtgtagtttgtcggaggttcggttcgattcgttttcgagttttttatattatatatatacgattttttcgtattttcgggtggcggtagcgacggcggtttttacgttagagagaattttataaaatggcgannnncgttcgagttnnnacgcgatcgnnttttttttcgcgcgttagtttacgtacgcgcgagtgcgcgttgttttttttttttttttttcgcgggagtcgagtgattaatttcgaggttgtatataaatgattacgtagtacgggggcggggt

SEQ ID NO: 36880 - DNA, 535 bp, Artificial Sequence
  chemically treated genomic DNA (Homo sapiens) CpG-island No: 36880
  unsure (126..127, 137..138, 150..151, 153, 286..287, 289, 295..296)
  unsure (372..)
accccgcccccgtactacgtaatcatttatatacaacctcgaaattaatcactcgactcccgcgaaaaaaaaaaaaaaaaaacaacgcgcactcgcgcgtacgtaaactaacgcgcgaaaaaaaanncgatcgcgtnnnaactcgaacgnnnntcgccattttataaaattctctctaacgtaaaaaccgccgtcgctaccgccacccgaaaatacgaaaaaatcgtatatatataatataaaaaactcgaaaacgaatcgaaccgaacctccgacaaactacacnnnncgaatnnnaatttctcattttacaacgaaaaatctaaaaaaacaacgaaaaaaaacgaaaccgaatctccgaaaaaaaacganncaaaaatcgaatcgaatctttattaaaacgaaaaaactaaaaaataaaccgctaaaaacgaaataattaatccccgatttaaaaaaaaaaaaacttttttctttttaaaatatcttaaaaaacgctaatacgcgcaaaaaaaatacacaaatttccctccaa

SEQ ID NO: 36881 - DNA, 623 bp, Artificial Sequence
  chemically treated genomic DNA (Homo sapiens) CpG-island No: 36881
cgtttcgggcggggcgggtcgcggagtatgtcggggtttgtggttttttcggagttcgggttcgtgttttgcgaggtcgtttttcgtcggtggtttttttgtgggcgggagagggcggtcgggagtttaatgagggagtaataacgtggtaattatttacgagttcgcgtcggtgttcgtttcgtagggggatttattattcggcgtcgagtcggaggggggaaacggcgttcgtcgttcgttcggagttcgcgagtaattttagttttttttattcgcgcgtggcggcgtcggttttttagttatcgcggttttattttttttcggttttagttgttcgggttgttttcgttttcgtttgtggatgttgcgttttttcgaacgtaatatgaaggtgttttttgtcgtcgtttttatcgcggggttcgttttttttttgttgttgtcgggattttttgcggtcgatgagaagaagaaggggtttaaagttatcgttaaggttcggtggagttcgcggtatttacggtgtcggagttcgggttcgggcggttttggtttggttttggtttagttttttttttttcggtttttgtttgtggtttcgtggcgtttgggtcgttttg

SEQ ID NO: 36882 - DNA, 623 bp, Artificial Sequence
  chemically treated genomic DNA (Homo sapiens) CpG-island No: 36882
caaaacgacccaaacgccacgaaaccacaaacaaaaaccgaaaaaaaaaaaactaaaccaaaaccaaaccaaaaccgcccgaacccgaactccgacaccgtaaataccgcgaactccaccgaaccttaacgataactttaaaccccttcttcttctcatcgaccgcaaaaaatcccgacaacaacaaaaaaaaaacgaaccccgcgataaaaacgacgacaaaaaacaccttcatattacgttcgaaaaaacgcaacatccacaaacgaaaacgaaaacaacccgaacaactaaaaccgaaaaaaaataaaaccgcgataactaaaaaaccgacgccgccacgcgcgaataaaaaaaactaaaattactcgcgaactccgaacgaacgacgaacgccgtttcccccctccgactcgacgccgaataataaatccccctacgaaacgaacaccgacgcgaactcgtaaataattaccacgttattactccctcattaaactcccgaccgccctctcccgcccacaaaaaaaccaccgacgaaaaacgacctcgcaaaacacgaacccgaactccgaaaaaaccacaaaccccgacatactccgcgacccgccccgcccgaaacg

SEQ ID NO: 36883 - DNA, 623 bp, Artificial Sequence
  chemically treated genomic DNA (Homo sapiens) CpG-island No: 36883
taggacggtttagacgttacgaggttatagatagaagtcgagggaggaggggttgagttaaggttaagttaaggtcgttcgggttcgagtttcggtatcgtaaatgtcgcggattttatcggattttgacggtgattttgggtttttttttttttttatcggtcgtagaaggtttcggtagtagtaggaagaagacggatttcgcgatgagggcggcggtaaggagtatttttatgttgcgttcggagaggcgtagtatttataggcggaggcgaaagtagttcggatagttgaggtcggaagagggtggggtcgcggtggttagggagtcggcgtcgttacgcgcgggtgggggggattggggttgttcgcgggtttcgggcgggcggcgggcgtcgtttttttttttcggttcggcgtcggatagtaggtttttttgcggggcgggtatcgacgcgggttcgtgggtggttgttacgttattgtttttttattgggttttcggtcgttttttttcgtttataggaaggttatcggcggaaggcggtttcgtagagtacgggttcgggtttcgagaagattataagtttcggtatgtttcgcggttcgtttcgttcggagcg

SEQ ID NO: 36884 - DNA, 623 bp, Artificial Sequence
  chemically treated genomic DNA (Homo sapiens) CpG-island No: 36884
cgctccgaacgaaacgaaccgcgaaacataccgaaacttataatcttctcgaaacccgaacccgtactctacgaaaccgccttccgccgataaccttcctataaacgaaaaaaaacgaccgaaaacccaataaaaaaacaataacgtaacaaccacccacgaacccgcgtcgatacccgccccgcaaaaaaacctactatccgacgccgaaccgaaaaaaaaaaacgacgcccgccgcccgcccgaaacccgcgaacaaccccaatcccccccacccgcgcgtaacgacgccgactccctaaccaccgcgaccccaccctcttccgacctcaactatccgaactactttcgcctccgcctataaatactacgcctctccgaacgcaacataaaaatactccttaccgccgccctcatcgcgaaatccgtcttcttcctactactaccgaaaccttctacgaccgataaaaaaaaaaaaaaacccaaaatcaccgtcaaaatccgataaaatccgcgacatttacgataccgaaactcgaacccgaacgaccttaacttaaccttaactcaacccctcctccctcgacttctatctataacctcgtaacgtctaaaccgtccta

SEQ ID NO: 36885 - DNA, 519 bp, Artificial Sequence
  chemically treated genomic DNA (Homo sapiens) CpG-island No: 36885
tttttcgattttcgtttagttttttttttttttcggggtgttttttcgtttgttatttcgaggggtgtaaatttacgattatcgcggcgtcggtgaaaatgttttttttttcggtgtcgttgtttttagtttcgggttttgatttttcggtcgttttttcggatttcggttttaggtcggggaagggcggaggtagttttttcgaagcgttatagttattattattcgacgttatttttttttattcgcggcggaagtcgtaataataattttatcgagagatagcgtcgtgagtaaagcgatttaacggtgcgaggagtgggagggtcgtaagggatttcgtgggattcgaggggcggagatttaggggcggggtttaggcgttgggggcgggggggtattcggttagttgaggttgcgtagtaaattcgaggtttggttcgcgatgttgagatattaacgagtggggttaaaggggtagaaaagtaggagttaggggttgtttaggtttttagggtt

SEQ ID NO: 36886 - DNA, 519 bp, Artificial Sequence
  chemically treated genomic DNA (Homo sapiens) CpG-island No: 36886
aaccctaaaaacctaaacaacccctaactcctacttttctacccctttaaccccactcgttaatatctcaacatcgcgaaccaaacctcgaatttactacgcaacctcaactaaccgaatacccccccgcccccaacgcctaaaccccgcccctaaatctccgcccctcgaatcccacgaaatcccttacgaccctcccactcctcgcaccgttaaatcgctttactcacgacgctatctctcgataaaattattattacgacttccgccgcgaataaaaaaaaataacgtcgaataataataactataacgcttcgaaaaaactacctccgcccttccccgacctaaaaccgaaatccgaaaaaacgaccgaaaaatcaaaacccgaaactaaaaacaacgacaccgaaaaaaaaaacattttcaccgacgccgcgataatcgtaaatttacacccctcgaaataacaaacgaaaaaacaccccgaaaaaaaaaaaaaactaaacgaaaatcgaaaaa

SEQ ID NO: 36887 - DNA, 519 bp, Artificial Sequence
  chemically treated genomic DNA (Homo sapiens) CpG-island No: 36887
ggttttagaaatttgagtagtttttaatttttatttttttgtttttttggttttattcgttaatattttagtatcgcgaattaggtttcggatttgttgcgtagttttagttggtcgggtgttttttcgtttttagcgtttaagtttcgtttttaggttttcgtttttcggattttacggggttttttgcggtttttttatttttcgtatcgttggatcgttttgtttacggcgttatttttcgataaagttgttgttgcggttttcgtcgcgggtggaagaagatggcgtcgggtggtggtggttgtagcgtttcggagagattgttttcgttttttttcggtttggagtcggagttcgagggggcggtcgggggattagaattcgaggttggggatagcgatatcgagggggaggatatttttatcggcgtcgcggtggtcgtgagtttgtatttttcggggtagtaggcgggagggtatttcgaaagggaagagaggttaagcgagaatcggggag

SEQ ID NO: 36888 - DNA, 519 bp, Artificial Sequence
  chemically treated genomic DNA (Homo sapiens) CpG-island No: 36888
ctccccgattctcgcttaacctctcttccctttcgaaataccctcccgcctactaccccgaaaaatacaaactcacgaccaccgcgacgccgataaaaatatcctccccctcgatatcgctatccccaacctcgaattctaatcccccgaccgccccctcgaactccgactccaaaccgaaaaaaaacgaaaacaatctctccgaaacgctacaaccaccaccacccgacgccatcttcttccacccgcgacgaaaaccgcaacaacaactttatcgaaaaataacgccgtaaacaaaacgatccaacgatacgaaaaataaaaaaaccgcaaaaaaccccgtaaaatccgaaaaacgaaaacctaaaaacgaaacttaaacgctaaaaacgaaaaaacacccgaccaactaaaactacgcaacaaatccgaaacctaattcgcgatactaaaatattaacgaataaaaccaaaaaaacaaaaaaataaaaattaaaaactactcaaatttctaaaacc

SEQ ID NO: 36889 - DNA, 640 bp, Artificial Sequence
  chemically treated genomic DNA (Homo sapiens) CpG-island No: 36889
taaattttcgataaggtttttttcgacggtttagttcgtagcgttcgtttatttaggttcgggtttcgggtttttattgagcgtagcgcggggaaattttgcgggtttcggcgtttttttttatttaggggtcgcgtttattatgtggttttttttcgggttttgtttgggtttttcggtttcgggttttatcgacgggatgtgaatttttagtattcgcgtttcggttttagttgtttcgcgcgttcggttcggagttttaattttttcggagcggattgaggatttcggggcggtcggtttcgttttttcggttcgtaggttttattttaggtttcgtttttaggcgatttcgtttcgggcgtttttttgcgtcgcgggttttgagtttagaagattaggcgggatttggacgtcgttttcgaagtttagtgcgtttatagcgcggggtagtggagttaatcgtttgttaaatattgacggagtatttattgatgttaggaattggcgagcgaaaatgttatttaatttgagttaagcgtttattaaggacggtttgtggttttaggcgcggacggaggcggggttcgggttttagcgtcggttttggggttaattagggatttgttttgggtttttt

SEQ ID NO: 36890 - DNA, 640 bp, Artificial Sequence
  chemically treated genomic DNA (Homo sapiens) CpG-island No: 36890
aaaaaacccaaaacaaatccctaattaaccccaaaaccgacgctaaaacccgaaccccgcctccgtccgcgcctaaaaccacaaaccgtccttaataaacgcttaactcaaattaaataacattttcgctcgccaattcctaacatcaataaatactccgtcaatatttaacaaacgattaactccactaccccgcgctataaacgcactaaacttcgaaaacgacgtccaaatcccgcctaatcttctaaactcaaaacccgcgacgcaaaaaaacgcccgaaacgaaatcgcctaaaaacgaaacctaaaataaaacctacgaaccgaaaaaacgaaaccgaccgccccgaaatcctcaatccgctccgaaaaaattaaaactccgaaccgaacgcgcgaaacaactaaaaccgaaacgcgaatactaaaaattcacatcccgtcgataaaacccgaaaccgaaaaacccaaacaaaacccgaaaaaaaaccacataataaacgcgacccctaaataaaaaaaaacgccgaaacccgcaaaatttccccgcgctacgctcaataaaaacccgaaacccgaacctaaataaacgaacgctacgaactaaaccgtcgaaaaaaaccttatcgaaaattta

SEQ ID NO: 36891 - DNA, 640 bp, Artificial Sequence
  chemically treated genomic DNA (Homo sapiens) CpG-island No: 36891
gaggaatttaagataggtttttggttggttttaggatcggcgttgaggttcgggtttcgttttcgttcgcgtttggagttataggtcgtttttggtaggcgtttaatttaggttgggtgatattttcgttcgttagtttttggtattagtgagtgtttcgttaatgtttgataaacggttgattttattgtttcgcgttgtgggcgtattagatttcgggggcggcgtttaggtttcgtttaattttttaggtttaggattcgcggcgtaagggaacgttcggggcggggtcgtttgggggcggggtttggggtggggtttgcggatcgagggggcggagtcggtcgtttcggggtttttagttcgtttcgggagagttagggtttcgagtcgagcgcgcggagtagttggggtcggggcgcggatgttggaagtttatatttcgtcggtggggttcgaggtcgaggggtttaggtagagttcggagaaaagttatatggtgagcgcggtttttggatggggaggggcgtcgggattcgtaggattttttcgcgttgcgtttagtggggattcggggttcgggtttgggtgaacgagcgttgcgggttggatcgtcgggggaaattttgtcgagggtttg

SEQ ID NO: 36892 - DNA, 640 bp, Artificial Sequence
  chemically treated genomic DNA (Homo sapiens) CpG-island No: 36892
caaaccctcgacaaaatttcccccgacgatccaacccgcaacgctcgttcacccaaacccgaaccccgaatccccactaaacgcaacgcgaaaaaatcctacgaatcccgacgcccctccccatccaaaaaccgcgctcaccatataacttttctccgaactctacctaaacccctcgacctcgaaccccaccgacgaaatataaacttccaacatccgcgccccgaccccaactactccgcgcgctcgactcgaaaccctaactctcccgaaacgaactaaaaaccccgaaacgaccgactccgccccctcgatccgcaaaccccaccccaaaccccgcccccaaacgaccccgccccgaacgttcccttacgccgcgaatcctaaacctaaaaaattaaacgaaacctaaacgccgcccccgaaatctaatacgcccacaacgcgaaacaataaaatcaaccgtttatcaaacattaacgaaacactcactaataccaaaaactaacgaacgaaaatatcacccaacctaaattaaacgcctaccaaaaacgacctataactccaaacgcgaacgaaaacgaaacccgaacctcaacgccgatcctaaaaccaaccaaaaacctatcttaaattcctc

SEQ ID NO: 36893 - DNA, 523 bp, Artificial Sequence
  chemically treated genomic DNA (Homo sapiens) CpG-island No: 36893
  unsure (340..)
tggaatttatcgttgagttgcgtaagttggaagcggcgggcgattatattgcgcgtttggtattgttggaagagtagaaatcgttgtcgtggtaggcggtttgggaaatgtattgttaacgttacgatacgttagtaggtagcgaatggttggagagcgtgcgggtttatgagaaagaaattttgagtcgtcgcgggtaaatattgtcggatgcggcgcgagcgttttattcggtttacgggtcggtaatagttgtaggtttgataagacgcgatagcgtcgtattaggtattgattgtcggatgcggtataagtgttttattcggtttatagggtcgtnnatagtgtaggtttgataagacgcgatagcgtcgtattaggtattgattgtcggatgcggtataagtgttttattcggtttataggtcgtaatagttgtaggttttgatagaattaatagcgtcgtattaagtattgattggcggatggcggataagtgttttatttagttttataggtcgcg

SEQ ID NO: 36894 - DNA, 523 bp, Artificial Sequence
  chemically treated genomic DNA (Homo sapiens) CpG-island No: 36894
  unsure (183..)
cgcgacctataaaactaaataaaacacttatccgccatccgccaatcaatacttaatacgacgctattaattctatcaaaacctacaactattacgacctataaaccgaataaaacacttataccgcatccgacaatcaatacctaatacgacgctatcgcgtcttatcaaacctacactatnnacgaccctataaaccgaataaaacacttataccgcatccgacaatcaatacctaatacgacgctatcgcgtcttatcaaacctacaactattaccgacccgtaaaccgaataaaacgctcgcgccgcatccgacaatatttacccgcgacgactcaaaatttctttctcataaacccgcacgctctccaaccattcgctacctactaacgtatcgtaacgttaacaatacatttcccaaaccgcctaccacgacaacgatttctactcttccaacaataccaaacgcgcaatataatcgcccgccgcttccaacttacgcaactcaacgataaattcca

SEQ ID NO: 36895 - DNA, 523 bp, Artificial Sequence
  chemically treated genomic DNA (Homo sapiens) CpG-island No: 36895
  unsure (183..)
cgcgatttgtaaggttgaataaggtatttgttcgttattcgttaattaatgtttaatgcgacgttgttggttttattaaggtttataattgttgcgatttgtaggtcggataaggtatttgtgtcgtattcggtaattaatgtttgatgcgacgttgtcgcgttttattaggtttatattatnngcgattttgtaggtcggataaggtatttgtgtcgtattcggtaattaatgtttgatgcgacgttgtcgcgttttattaggtttataattgttgtcgattcgtaggtcggataaggcgttcgcgtcgtattcggtagtgtttattcgcggcgatttaaaattttttttttataagttcgtacgttttttagttattcgttatttgttggcgtatcgtgacgttggtaatatattttttagatcgtttgttacggtaacgatttttgtttttttagtagtgttagacgcgtagtgtaatcgttcgtcgtttttagtttgcgtagtttagcggtaggtttta

SEQ ID NO: 36896 - DNA, 523 bp, Artificial Sequence
  chemically treated genomic DNA (Homo sapiens) CpG-island No: 36896
  unsure (340..)
taaaacctaccgctaaactacgcaaactaaaaacgacgaacgattacactacgcgtctaacactactaaaaaaacaaaaatcgttaccgtaacaaacgatctaaaaaatatattaccaacgtcacgatacgccaacaaataacgaataactaaaaaacgtacgaacttataaaaaaaaaattttaaatcgccgcgaataaacactaccgaatacgacgcgaacgccttatccgacctacgaatcgacaacaattataaacctaataaaacgcgacaacgtcgcatcaaacattaattaccgaatacgacacaaataccttatccgacctacaaaatcgcnnataatataaacctaataaaacgcgacaacgtcgcatcaaacattaattaccgaatacgacacaaataccttatccgacctacaaatcgcaacaattataaaccttaataaaaccaacaacgtcgcattaaacattaattaacgaataacgaacaaataccttattcaaccttacaaatcgcg

SEQ ID NO: 36897 - DNA, 983 bp, Artificial Sequence
  chemically treated genomic DNA (Homo sapiens) CpG-island No: 36897
tttttttcgcgttcggtttttgggcgtcggtgttttgtgttttcggttttttgtttggagtttcgtcgtttcgagttttaggtgtttttagtttcgcgttcgtttcgtcgcggttggttttttttcgtttttcggtttttaacgtttttattacgcgtcgcgttcgtcgtttcgatttttcggttggggggcgcggatttttttcggtttcgttacgtttcgattgtcgtttggtttttgcgtcggtattttggttttggtgacgaggtgcgtggttcgtttgattatcgcgaagttgtttttgtcgatggtgcggtcgatttcgtagtagtcgatacgggcgggtatgggttcgcgggaggtcggggttgggggacgcggttggtcggtcgtaggggatacggtagcgggggcggttggggatttcggcgcgggcggaggtagtaggcggttcgcgggttcggtttttttagtttcggtttcggtagtttcgttagtttcgttcgtcgtcgtcgtcgttattttgttgtgtagtgaaattttcggggtcgcggggagtcggttcgggggagggggtaagggggggcgggaaagggggggtcgcggacgttattcggggaggcggggcgttttcgtcgatcggcgttcggttttatggtaatcgcgggttacgtgtcgacgcgcgttattgttcggagttatggtaatcgtgattttatcggcgggttcgattttttcgcgtgggtttcggtttttgaggcgttggttttcgggtgttttttttcgggagttggcggtgggaattttcgatgggtttttaatttcgaagttttcgttatttttttcgagtggggggcgtaggatgttcgatttaaagttaattttttatcgtcgttcgaatcgttaatgtgatttttgttgtgatttttgttttagtttaacgattatttaattttttttaataaaaaaaaagtgttttttta

SEQ ID NO: 36898 - DNA, 983 bp, Artificial Sequence
  chemically treated genomic DNA (Homo sapiens) CpG-island No: 36898
taaaaaaacactttttttttattaaaaaaaattaaataatcgttaaactaaaacaaaaatcacaacaaaaatcacattaacgattcgaacgacgataaaaaattaactttaaatcgaacatcctacgccccccactcgaaaaaaataacgaaaacttcgaaattaaaaacccatcgaaaattcccaccgccaactcccgaaaaaaaacacccgaaaaccaacgcctcaaaaaccgaaacccacgcgaaaaaatcgaacccgccgataaaatcacgattaccataactccgaacaataacgcgcgtcgacacgtaacccgcgattaccataaaaccgaacgccgatcgacgaaaacgccccgcctccccgaataacgtccgcgaccccccctttcccgcccccccttaccccctcccccgaaccgactccccgcgaccccgaaaatttcactacacaacaaaataacgacgacgacgacgaacgaaactaacgaaactaccgaaaccgaaactaaaaaaaccgaacccgcgaaccgcctactacctccgcccgcgccgaaatccccaaccgcccccgctaccgtatcccctacgaccgaccaaccgcgtcccccaaccccgacctcccgcgaacccatacccgcccgtatcgactactacgaaatcgaccgcaccatcgacaaaaacaacttcgcgataatcaaacgaaccacgcacctcgtcaccaaaaccaaaataccgacgcaaaaaccaaacgacaatcgaaacgtaacgaaaccgaaaaaaatccgcgccccccaaccgaaaaatcgaaacgacgaacgcgacgcgtaataaaaacgttaaaaaccgaaaaacgaaaaaaaaccaaccgcgacgaaacgaacgcgaaactaaaaacacctaaaactcgaaacgacgaaactccaaacaaaaaaccgaaaacacaaaacaccgacgcccaaaaaccgaacgcgaaaaaaa

SEQ ID NO: 36899 - DNA, 983 bp, Artificial Sequence
  chemically treated genomic DNA (Homo sapiens) CpG-island No: 36899
tgaggaaatattttttttttgttaagggaggttgggtgatcgttgaattgggatagaggttatagtagaggttatattggcgattcgagcggcggtggggggttggttttgggtcgggtattttgcgttttttattcgggaaaggtggcggagatttcgaggttgggggtttatcgaaggtttttatcgttagttttcggaggggggtattcgggagttagcgttttaggaatcggggtttacgcgggaaggtcgagttcgtcggtgaggttacggttgttatggtttcgggtagtgacgcgcgtcggtacgtgattcgcggttgttatggagtcgggcgtcggtcggcgaaagcgtttcgttttttcgagtgacgttcgcggttttttttttttcgtttttttttgttttttttttcgagtcggtttttcgcggtttcggaggttttattgtataataagatggcggcggcggcggcgagcggagttggcggggttgtcggggtcgggattgggggagtcgggttcgcgggtcgtttgttgttttcgttcgcgtcggggtttttagtcgttttcgttgtcgtgttttttgcggtcggttagtcgcgttttttagtttcggtttttcgcggatttatgttcgttcgtatcggttattacgagatcgatcgtattatcggtaagggtaatttcgcggtggttaagcgggttacgtatttcgttattaaggttaaggtatcggcgtaggggttaggcggtagtcggagcgtggcggggtcgggagaggttcgcgttttttagtcggggggtcggggcggcgagcgcggcgcgtggtgggagcgttgggggtcgggaggcgggagggagttagtcgcggcggggcgggcgcggagttagggatatttgggattcgagacggcggaattttaagtagggggtcgagggtatagagtatcggcgtttaggagtcgggcgcggggaggg

SEQ ID NO: 36900 - DNA, 983 bp, Artificial Sequence
  chemically treated genomic DNA (Homo sapiens) CpG-island No: 36900
ccctccccgcgcccgactcctaaacgccgatactctataccctcgaccccctacttaaaattccgccgtctcgaatcccaaatatccctaactccgcgcccgccccgccgcgactaactccctcccgcctcccgacccccaacgctcccaccacgcgccgcgctcgccgccccgaccccccgactaaaaaacgcgaacctctcccgaccccgccacgctccgactaccgcctaacccctacgccgataccttaaccttaataacgaaatacgtaacccgcttaaccaccgcgaaattacccttaccgataatacgatcgatctcgtaataaccgatacgaacgaacataaatccgcgaaaaaccgaaactaaaaaacgcgactaaccgaccgcaaaaaacacgacaacgaaaacgactaaaaaccccgacgcgaacgaaaacaacaaacgacccgcgaacccgactcccccaatcccgaccccgacaaccccgccaactccgctcgccgccgccgccgccatcttattatacaataaaacctccgaaaccgcgaaaaaccgactcgaaaaaaaaaacaaaaaaaaacgaaaaaaaaaaaaccgcgaacgtcactcgaaaaaacgaaacgctttcgccgaccgacgcccgactccataacaaccgcgaatcacgtaccgacgcgcgtcactacccgaaaccataacaaccgtaacctcaccgacgaactcgaccttcccgcgtaaaccccgattcctaaaacgctaactcccgaatacccccctccgaaaactaacgataaaaaccttcgataaacccccaacctcgaaatctccgccacctttcccgaataaaaaacgcaaaatacccgacccaaaaccaaccccccaccgccgctcgaatcgccaatataacctctactataacctctatcccaattcaacgatcacccaacctcccttaacaaaaaaaaaatatttcctca

SEQ ID NO: 36901 - DNA, 704 bp, Artificial Sequence
  chemically treated genomic DNA (Homo sapiens) CpG-island No: 36901
attttttcgaattgttcgttagaggttttggcgtcgcgagtttttagtagttttcggaattgttttagagtgatagatttttcgtcgcggtttagcgttttttagttagcgaaataacgcgtcgcgatgtttcgatattagcgattcgtaggggggtgtgggtagtaacgttgtagtagtttttcgtagtttggtcggttttagtagcgtcgcggcgggtggtagcgttggagtcgcgacgttcgggtcggggtcgtgttcgagatcgcggtttagttttggtgtgggttttagttttcgttatcggagttgtcgtttcgtttttattgttgtgattcggagcgttttttatggggttttcgttttgggcgtttggttttgtagtcgtcgtcgtcgttttttcgtttcgatttgttaattttcgatagtagttggcgggcggggacgcggaggagacgacggcggtttttgcggttttcggttttttggtcgttaagcgacgatcgttgtcgtaaaggcgtcgttacgtagataggcggtttttattaatttacgatagttaggcggggagcgtcgttttaaagggtgtaattttgattttttagaggacgagtttgttttagtatttacgttatttcgtagttttcgttgtcgttatttttgttggggttgataatttgtaagttaagaagtacgagaagggt

SEQ ID NO: 36902 - DNA, 704 bp, Artificial Sequence
  chemically treated genomic DNA (Homo sapiens) CpG-island No: 36902
acccttctcgtacttcttaacttacaaattatcaaccccaacaaaaataacgacaacgaaaactacgaaataacgtaaatactaaaacaaactcgtcctctaaaaaatcaaaattacaccctttaaaacgacgctccccgcctaactatcgtaaattaataaaaaccgcctatctacgtaacgacgcctttacgacaacgatcgtcgcttaacgaccaaaaaaccgaaaaccgcaaaaaccgccgtcgtctcctccgcgtccccgcccgccaactactatcgaaaattaacaaatcgaaacgaaaaaacgacgacgacgactacaaaaccaaacgcccaaaacgaaaaccccataaaaaacgctccgaatcacaacaataaaaacgaaacgacaactccgataacgaaaactaaaacccacaccaaaactaaaccgcgatctcgaacacgaccccgacccgaacgtcgcgactccaacgctaccacccgccgcgacgctactaaaaccgaccaaactacgaaaaactactacaacgttactacccacacccccctacgaatcgctaatatcgaaacatcgcgacgcgttatttcgctaactaaaaaacgctaaaccgcgacgaaaaatctatcactctaaaacaattccgaaaactactaaaaactcgcgacgccaaaacctctaacgaacaattcgaaaaaat

SEQ ID NO: 36903 - DNA, 704 bp, Artificial Sequence
  chemically treated genomic DNA (Homo sapiens) CpG-island No: 36903
gtttttttcgtattttttggtttgtaggttgttagttttaataaagatggcggtagcggaggttacggaatgacgtagatattgagatagattcgttttttgggaaattaaggttgtattttttgaggcggcgtttttcgtttagttgtcgtgagttggtagaggtcgtttatttacgtgacggcgtttttgcgatagcggtcgtcgtttgacggttaggaagtcggaagtcgtaggggtcgtcgtcgtttttttcgcgttttcgttcgttagttgttgtcggaggttgataggtcgaggcggggaggcggcggcggcggttgtagagttaggcgtttaagacggagattttatggggaacgtttcgagttatagtagtgaagacgaagcggtagtttcggtggcgagggttggggtttatattaggattgggtcgcggtttcgggtacgatttcggttcgggcgtcgcggttttagcgttattattcgtcgcggcgttgttggagtcggttaggttgcgagaggttgttgtagcgttgttgtttatatttttttgcgagtcgttggtgtcgaggtatcgcggcgcgttgtttcgttggttggaagacgttgggtcgcggcgaagagtttgttattttggagtagtttcgggagttgttggaggttcgcggcgttagggtttttagcgagtagttcgaggaggt

SEQ ID NO: 36904 - DNA, 704 bp, Artificial Sequence
  chemically treated genomic DNA (Homo sapiens) CpG-island No: 36904
acctcctcgaactactcgctaaaaaccctaacgccgcgaacctccaacaactcccgaaactactccaaaataacaaactcttcgccgcgacccaacgtcttccaaccaacgaaacaacgcgccgcgatacctcgacaccaacgactcgcaaaaaaatataaacaacaacgctacaacaacctctcgcaacctaaccgactccaacaacgccgcgacgaataataacgctaaaaccgcgacgcccgaaccgaaatcgtacccgaaaccgcgacccaatcctaatataaaccccaaccctcgccaccgaaactaccgcttcgtcttcactactataactcgaaacgttccccataaaatctccgtcttaaacgcctaactctacaaccgccgccgccgcctccccgcctcgacctatcaacctccgacaacaactaacgaacgaaaacgcgaaaaaaacgacgacgacccctacgacttccgacttcctaaccgtcaaacgacgaccgctatcgcaaaaacgccgtcacgtaaataaacgacctctaccaactcacgacaactaaacgaaaaacgccgcctcaaaaaatacaaccttaatttcccaaaaaacgaatctatctcaatatctacgtcattccgtaacctccgctaccgccatctttattaaaactaacaacctacaaaccaaaaaatacgaaaaaaac

SEQ ID NO: 36905 - DNA, 779 bp, Artificial Sequence
  chemically treated genomic DNA (Homo sapiens) CpG-island No: 36905
  unsure (601)
gaggtgagcggttttatgattgcggcggggcgggggacggggtttcgggatattttggggacgttttggttttatcgtttttagcggttacgtagacgcgcggggggaggggcgggatcggtcgtgtttattgtttttttttttaagttacgattatttgacggacgaggaggagcgtatagcgtcgagagtagtacgagcgaggataattcgttcgagtattcgtatttttcgttcgttatcgatgaggatagttggtatagtaagtggtataagatggagtagaagtttcgtatcgtttacgcgtagaaggtgcgcgacgtcggcgggtttcgggggcgggcgggtcgggcgggggattcgggtatttcggggcggggcggggatgggggtcgcgtcgggacgtttttttagtcgttcgggttgagtcggcgtttcgtagggttatttggaggagttggtgcgtttgcgcgagtcgtagttgaaggatttggaggcggagaatcggcggttttagttgtagttggaggaggcggcggcgtagaattagcgcgagaaacgggagttggaaggcgtgattttggagttgtaggagtagtgnttgagcgtacggtttgttttaatttttgattttcgtcgtttcgattatattatcgggtgaattttatttttatttttatcgattttaatattattcgatacgagtatttatttttttagtattaattttttgatttagttagttttatttcgagatgtttataatgattttttaatat

SEQ ID NO: 36906 - DNA, 779 bp, Artificial Sequence
  chemically treated genomic DNA (Homo sapiens) CpG-island No: 36906
  unsure (179)
atattaaaaaatcattataaacatctcgaaataaaactaactaaatcaaaaaattaatactaaaaaaataaatactcgtatcgaataatattaaaatcgataaaaataaaaataaaattcacccgataatataatcgaaacgacgaaaatcaaaaattaaaacaaaccgtacgctcaancactactcctacaactccaaaatcacgccttccaactcccgtttctcgcgctaattctacgccgccgcctcctccaactacaactaaaaccgccgattctccgcctccaaatccttcaactacgactcgcgcaaacgcaccaactcctccaaataaccctacgaaacgccgactcaacccgaacgactaaaaaaacgtcccgacgcgacccccatccccgccccgccccgaaatacccgaatcccccgcccgacccgcccgcccccgaaacccgccgacgtcgcgcaccttctacgcgtaaacgatacgaaacttctactccatcttataccacttactataccaactatcctcatcgataacgaacgaaaaatacgaatactcgaacgaattatcctcgctcgtactactctcgacgctatacgctcctcctcgtccgtcaaataatcgtaacttaaaaaaaaaaacaataaacacgaccgatcccgcccctccccccgcgcgtctacgtaaccgctaaaaacgataaaaccaaaacgtccccaaaatatcccgaaaccccgtcccccgccccgccgcaatcataaaaccgctcacctc

SEQ ID NO: 36907 - DNA, 779 bp, Artificial Sequence
  chemically treated genomic DNA (Homo sapiens) CpG-island No: 36907
  unsure (179)
atgttagaagattattgtgggtatttcggggtggggttggttggattagagggttgatgttggagaggtgggtgttcgtgtcgggtgatgttagagtcgatggaagtgaagatggggtttattcggtgatgtggtcggggcggcgggggttaggggttagggtaggtcgtgcgtttaantattgtttttgtagttttaggattacgttttttagttttcgtttttcgcgttggttttgcgtcgtcgttttttttagttgtagttgaagtcgtcggtttttcgtttttaggttttttagttgcgattcgcgtagacgtattagtttttttaggtagttttgcggggcgtcggtttagttcgggcggttgggaggacgtttcggcgcggtttttattttcgtttcgtttcgggatgttcggatttttcgttcggttcgttcgttttcggggttcgtcggcgtcgcgtattttttgcgcgtagacgatgcggaatttttgttttattttgtgttatttgttgtattagttgtttttatcggtgacgagcgggaggtacgggtgttcgggcgagttgttttcgttcgtgttgttttcggcgttgtgcgttttttttcgttcgttaggtagtcgtagtttgggagagggagtagtgggtacggtcggtttcgttttttttttcgcgcgtttgcgtggtcgttgagggcggtgggattaggacgtttttaggatgtttcgaggtttcgtttttcgtttcgtcgtagttatggagtcgtttatttt

SEQ ID NO: 36908 - DNA, 779 bp, Artificial Sequence
  chemically treated genomic DNA (Homo sapiens) CpG-island No: 36908
  unsure (601)
aaaataaacgactccataactacgacgaaacgaaaaacgaaacctcgaaacatcctaaaaacgtcctaatcccaccgccctcaacgaccacgcaaacgcgcgaaaaaaaaaacgaaaccgaccgtacccactactccctctcccaaactacgactacctaacgaacgaaaaaaaacgcacaacgccgaaaacaacacgaacgaaaacaactcgcccgaacacccgtacctcccgctcgtcaccgataaaaacaactaatacaacaaataacacaaaataaaacaaaaattccgcatcgtctacgcgcaaaaaatacgcgacgccgacgaaccccgaaaacgaacgaaccgaacgaaaaatccgaacatcccgaaacgaaacgaaaataaaaaccgcgccgaaacgtcctcccaaccgcccgaactaaaccgacgccccgcaaaactacctaaaaaaactaatacgtctacgcgaatcgcaactaaaaaacctaaaaacgaaaaaccgacgacttcaactacaactaaaaaaaacgacgacgcaaaaccaacgcgaaaaacgaaaactaaaaaacgtaatcctaaaactacaaaaacaatanttaaacgcacgacctaccctaacccctaacccccgccgccccgaccacatcaccgaataaaccccatcttcacttccatcgactctaacatcacccgacacgaacacccacctctccaacatcaaccctctaatccaaccaaccccaccccgaaatacccacaataatcttctaacat

SEQ ID NO: 36909 - DNA, 500 bp, Artificial Sequence
  chemically treated genomic DNA (Homo sapiens) CpG-island No: 36909
cggcgagggtgacgtattggttttttttttcggtgtttttaggtgcgtggcggcggtagtgagaatgagtttttcgagatcgtcgggagattatataataacgacgaagttatttgtcgggttattcgtcgagatttgaaaatttcgcggcgatttttttcgtcggttttagtatcgtttttattttttaggttataggataggtttgtaattgtaaaacgttttgtaaattatagggtttcgcgcgggtgtgcgttattgggttagttgagttgtagttcgggtcgggcgggttgggacgtgagtaagtcgggggagacgggagagttatggggagttagattttattttcgcgtgattttgggtaaattataatttcgtttaaggttcggaatgattttgcgcggagaggaagagtattgagtgcgggagggtatcgacgttttggtgttggttgttttcgtatcgtgattttttttgagttttaaaattttttgtag

SEQ ID NO: 36910 - DNA, 500 bp, Artificial Sequence
  chemically treated genomic DNA (Homo sapiens) CpG-island No: 36910
ctacaaaaaattttaaaactcaaaaaaaatcacgatacgaaaacaaccaacaccaaaacgtcgataccctcccgcactcaatactcttcctctccgcgcaaaatcattccgaaccttaaacgaaattataatttacccaaaatcacgcgaaaataaaatctaactccccataactctcccgtctcccccgacttactcacgtcccaacccgcccgacccgaactacaactcaactaacccaataacgcacacccgcgcgaaaccctataatttacaaaacgttttacaattacaaacctatcctataacctaaaaaataaaaacgatactaaaaccgacgaaaaaaatcgccgcgaaattttcaaatctcgacgaataacccgacaaataacttcgtcgttattatataatctcccgacgatctcgaaaaactcattctcactaccgccgccacgcacctaaaaacaccgaaaaaaaaaaccaatacgtcaccctcgccg

SEQ ID NO: 36911 - DNA, 500 bp, Artificial Sequence
  chemically treated genomic DNA (Homo sapiens) CpG-island No: 36911
ttgtaaagagttttgagatttagaagaaattacgatacgagagtaattaatattaaaacgtcgatgttttttcgtatttagtgtttttttttttcgcgtagagttatttcgggttttaggcgaggttgtgatttgtttaaggttacgcgaaggtgggatttggttttttatggttttttcgtttttttcggtttgtttacgttttagttcgttcggttcgggttgtagtttagttaatttagtggcgtatattcgcgcggggttttgtggtttataaagcgttttgtagttgtaggtttgttttgtaatttgaaaaatgggggcgatgttaaggtcggcgagagaagtcgtcgcgaagtttttaagtttcggcgggtagttcggtaagtaatttcgtcgttattgtgtggtttttcggcgatttcgaagaatttatttttattgtcgtcgttacgtatttgaggatatcgaggaagagggttagtgcgttattttcgtcg

SEQ ID NO: 36912 - DNA, 500 bp, Artificial Sequence
  chemically treated genomic DNA (Homo sapiens) CpG-island No: 36912
cgacgaaaataacgcactaaccctcttcctcgatatcctcaaatacgtaacgacgacaataaaaataaattcttcgaaatcgccgaaaaaccacacaataacgacgaaattacttaccgaactacccgccgaaacttaaaaacttcgcgacgacttctctcgccgaccttaacatcgcccccatttttcaaattacaaaacaaacctacaactacaaaacgctttataaaccacaaaaccccgcgcgaatatacgccactaaattaactaaactacaacccgaaccgaacgaactaaaacgtaaacaaaccgaaaaaaacgaaaaaaccataaaaaaccaaatcccaccttcgcgtaaccttaaacaaatcacaacctcgcctaaaacccgaaataactctacgcgaaaaaaaaaaacactaaatacgaaaaaacatcgacgttttaatattaattactctcgtatcgtaatttcttctaaatctcaaaactctttacaa

SEQ ID NO: 36913 - DNA, 725 bp, Artificial Sequence
  chemically treated genomic DNA (Homo sapiens) CpG-island No: 36913
ttatttattgtgtttttttaagattttcgtttcggacggttttttttttttcgtttttatttttttttagaagcgttaattttagatcgtttagttttttttattcgaatttagggaatagaatattatttaatttacgaacgtcgcgaagagggggttgacgggcgggattgattagggggcgtaggcgcgatcgcgtttttttcggttgagatttattttgcggttggggggtttcggcggcgatttgtcgggagttcgggaggcgttgtcgagtagtagttttagtagcggtaatagtcggcgaggacgttggggttattcgtcggcggtatcgcggggttaggcgggttttagcggtttatggttttcgtttggtttcgttcgttcggtttcgcgtagtttagttttgcgtcgcgtttcgtagtttcggttttcgttttcgttgcggcgttcgtttagcgcgattgttttcgatcggagtcgtcgtaagcgttttttgtaggcggcgcgttatatcgttggtttttcggtatcgttatttttcggtttcgtttcgttcgtcgtttttcggtattgtttatttttagtttatttcgtagttttcgcgttttgcgtttttagattttgcgttgtaaaggagtgtcgggattagggttttattattcgggtttttgggtttcgagagtttttaaaatttggtgtaaaatttgtgtgtgtgtagg

SEQ ID NO: 36914 - DNA, 725 bp, Artificial Sequence
  chemically treated genomic DNA (Homo sapiens) CpG-island No: 36914
cctacacacacacaaattttacaccaaattttaaaaactctcgaaacccaaaaacccgaataataaaaccctaatcccgacactcctttacaacgcaaaatctaaaaacgcaaaacgcgaaaactacgaaataaactaaaaataaacaataccgaaaaacgacgaacgaaacgaaaccgaaaaataacgataccgaaaaaccaacgatataacgcgccgcctacaaaaaacgcttacgacgactccgatcgaaaacaatcgcgctaaacgaacgccgcaacgaaaacgaaaaccgaaactacgaaacgcgacgcaaaactaaactacgcgaaaccgaacgaacgaaaccaaacgaaaaccataaaccgctaaaacccgcctaaccccgcgataccgccgacgaataaccccaacgtcctcgccgactattaccgctactaaaactactactcgacaacgcctcccgaactcccgacaaatcgccgccgaaaccccccaaccgcaaaataaatctcaaccgaaaaaaacgcgatcgcgcctacgccccctaatcaatcccgcccgtcaaccccctcttcgcgacgttcgtaaattaaataatattctattccctaaattcgaataaaaaaaactaaacgatctaaaattaacgcttctaaaaaaaaataaaaacgaaaaaaaaaaaaccgtccgaaacgaaaatcttaaaaaaacacaataaataa

SEQ ID NO: 36915 - DNA, 725 bp, Artificial Sequence
  chemically treated genomic DNA (Homo sapiens) CpG-island No: 36915
tttatatatatataaattttgtattaaattttggggattttcgaaatttaagaattcgggtgatgggattttaatttcgatatttttttgtagcgtagagtttgggagcgtagagcgcgggggttgcggggtgggttgaaggtgggtagtatcggggggcggcgggcggagcggggtcgggaggtggcggtgtcggagggttagcggtgtggcgcgtcgtttgtagggggcgtttgcggcggtttcggtcggagataatcgcgttgagcgggcgtcgtagcgggagcgggagtcggagttgcgaggcgcggcgtagagttgggttgcgcggggtcgggcgagcgggattaggcgggagttatggatcgttagggttcgtttagtttcgcgatgtcgtcggcgagtggttttagcgttttcgtcggttgttgtcgttgttggggttgttgttcggtagcgtttttcgggttttcggtaagtcgtcgtcggagttttttagtcgtagggtgagttttagtcgggaggggcgcgatcgcgtttgcgttttttgattagtttcgttcgttagtttttttttcgcggcgttcgtgaattgagtggtattttgttttttggattcgggtggggggagttaagcgatttggggttggcgtttttgggggaaagtggaggcggggagagggaggtcgttcggggcgggggttttggggagatataatgggtag

SEQ ID NO: 36916 - DNA, 725 bp, Artificial Sequence
  chemically treated genomic DNA (Homo sapiens) CpG-island No: 36916
ctacccattatatctccccaaaacccccgccccgaacgacctccctctccccgcctccactttcccccaaaaacgccaaccccaaatcgcttaactccccccacccgaatccaaaaaacaaaataccactcaattcacgaacgccgcgaaaaaaaaactaacgaacgaaactaatcaaaaaacgcaaacgcgatcgcgcccctcccgactaaaactcaccctacgactaaaaaactccgacgacgacttaccgaaaacccgaaaaacgctaccgaacaacaaccccaacaacgacaacaaccgacgaaaacgctaaaaccactcgccgacgacatcgcgaaactaaacgaaccctaacgatccataactcccgcctaatcccgctcgcccgaccccgcgcaacccaactctacgccgcgcctcgcaactccgactcccgctcccgctacgacgcccgctcaacgcgattatctccgaccgaaaccgccgcaaacgccccctacaaacgacgcgccacaccgctaaccctccgacaccgccacctcccgaccccgctccgcccgccgccccccgatactacccaccttcaacccaccccgcaacccccgcgctctacgctcccaaactctacgctacaaaaaaatatcgaaattaaaatcccatcacccgaattcttaaatttcgaaaatccccaaaatttaatacaaaatttatatatatataaa

SEQ ID NO: 36917 - DNA, 560 bp, Artificial Sequence
  chemically treated genomic DNA (Homo sapiens) CpG-island No: 36917
gtaaaatcgttagagtttgaatagtttgttgtcgtcgttacgtgaataattggacggttttcgtcgttaggtttaggatagtttcggtaaagaagtataagaacgttatattttgatttacgaaattcgtaatttttagtaatttaacgcgtaaatggtttaggaagcgattaatttgacgcgcgcgttgaaaggcgataataaaatttagggtaattggggcgaggtagtattgacgcgggtgttggaggttttcggtttgcgtgaagggtatgaatatgaaatttaggttagtatcgaaaatgacgttcgttcgcggatgtagtcggatgttatcgtgcgtttgtcgtagggaaaagatgtggtgatcgacgttaaatgacgttgtcgtttatgaacgttattttaacgttaagacgattatattcgcgaaagcgcgttaataggaatatatcgcgtcggtgcgtaattatattcgtttgttggacgtaaagattattaatagttgtcggggttgcgaattttggattacgtgttgatgtttattttcgttgaattcg

SEQ ID NO: 36918 - DNA, 560 bp, Artificial Sequence
  chemically treated genomic DNA (Homo sapiens) CpG-island No: 36918
cgaattcaacgaaaataaacatcaacacgtaatccaaaattcgcaaccccgacaactattaataatctttacgtccaacaaacgaatataattacgcaccgacgcgatatattcctattaacgcgctttcgcgaatataatcgtcttaacgttaaaataacgttcataaacgacaacgtcatttaacgtcgatcaccacatcttttccctacgacaaacgcacgataacatccgactacatccgcgaacgaacgtcattttcgatactaacctaaatttcatattcatacccttcacgcaaaccgaaaacctccaacacccgcgtcaatactacctcgccccaattaccctaaattttattatcgcctttcaacgcgcgcgtcaaattaatcgcttcctaaaccatttacgcgttaaattactaaaaattacgaatttcgtaaatcaaaatataacgttcttatacttctttaccgaaactatcctaaacctaacgacgaaaaccgtccaattattcacgtaacgacgacaacaaactattcaaactctaacgattttac

SEQ ID NO: 36919 - DNA, 560 bp, Artificial Sequence
  chemically treated genomic DNA (Homo sapiens) CpG-island No: 36919
cgggtttaacgggaataaatattagtacgtaatttagagttcgtagtttcggtagttgttgataatttttgcgtttagtaaacggatatggttacgtatcgacgcgatatgtttttgttagcgcgttttcgcgggtgtagtcgttttggcgttaaaatagcgtttataggcgatagcgttatttggcgtcgattattatattttttttttgcggtaggcgtacgatgatattcggttgtattcgcgagcgggcgttattttcgatgttgatttgggttttatatttatattttttacgtagatcggaagtttttagtattcgcgttaatattatttcgttttagttgttttgggttttattgtcgttttttagcgcgcgcgttaggttgatcgttttttgggttatttgcgcgttgagttgttggagattgcgaatttcgtgggttagggtatggcgtttttgtgtttttttatcgaagttgttttgaatttgacggcggaaatcgtttagttgtttacgtagcggcgataataggttgtttagattttgacggttttgt

SEQ ID NO: 36920 - DNA, 560 bp, Artificial Sequence
  chemically treated genomic DNA (Homo sapiens) CpG-island No: 36920
acaaaaccgtcaaaatctaaacaacctattatcgccgctacgtaaacaactaaacgatttccgccgtcaaattcaaaacaacttcgataaaaaaacacaaaaacgccataccctaacccacgaaattcgcaatctccaacaactcaacgcgcaaataacccaaaaaacgatcaacctaacgcgcgcgctaaaaaacgacaataaaacccaaaacaactaaaacgaaataatattaacgcgaatactaaaaacttccgatctacgtaaaaaatataaatataaaacccaaatcaacatcgaaaataacgcccgctcgcgaatacaaccgaatatcatcgtacgcctaccgcaaaaaaaaaatataataatcgacgccaaataacgctatcgcctataaacgctattttaacgccaaaacgactacacccgcgaaaacgcgctaacaaaaacatatcgcgtcgatacgtaaccatatccgtttactaaacgcaaaaattatcaacaactaccgaaactacgaactctaaattacgtactaatatttattcccgttaaacccg

SEQ ID NO: 36921 - DNA, 568 bp, Artificial Sequence
  chemically treated genomic DNA (Homo sapiens) CpG-island No: 36921
ttcgttcgttattttgcgggcggtatagtattaacgaggtatatcgtggtaaaagttttaaaacgcgtttttgtttgtaatgaatgcggggtcgattattcgcgttggtaggggtagtgtagtgtttgttatgtttggaatattattatcgaggtgcgttttgttgcgtcgttaatggtggcgcgtaacgagcgttttagcggttatgtcggtagcgtcggggtggtaaaagtttagaaatttttcgatattagttttgaagagttgtcgcgtttttttatcggatttaaagagttcgatcgcgtattaggcggcggcgtggtgttaggaagtgttattttgattggcggtaattttggtgcggggaaatttacgttgttattgtaaacgttgtgtaaattggtttagtagatgaaaacgttgtatgttatcggcgaagagtcgttgtaataggtggtaatgcgcgtttatcgttttggtttgtcgattgataattttaatatgttgtcggaaattagtatcgaatagatttgtttgattgtcgaagaagagtaatcgaagttgatgg

SEQ ID NO: 36922 - DNA, 568 bp, Artificial Sequence
  chemically treated genomic DNA (Homo sapiens) CpG-island No: 36922
ccatcaacttcgattactcttcttcgacaatcaaacaaatctattcgatactaatttccgacaacatattaaaattatcaatcgacaaaccaaaacgataaacgcgcattaccacctattacaacgactcttcgccgataacatacaacgttttcatctactaaaccaatttacacaacgtttacaataacaacgtaaatttccccgcaccaaaattaccgccaatcaaaataacacttcctaacaccacgccgccgcctaatacgcgatcgaactctttaaatccgataaaaaaacgcgacaactcttcaaaactaatatcgaaaaatttctaaacttttaccaccccgacgctaccgacataaccgctaaaacgctcgttacgcgccaccattaacgacgcaacaaaacgcacctcgataataatattccaaacataacaaacactacactacccctaccaacgcgaataatcgaccccgcattcattacaaacaaaaacgcgttttaaaacttttaccacgatatacctcgttaatactataccgcccgcaaaataacgaacgaa

SEQ ID NO: 36923 - DNA, 568 bp, Artificial Sequence
  chemically treated genomic DNA (Homo sapiens) CpG-island No: 36923
ttattagtttcggttgttttttttcggtaattaggtagatttgttcgatgttggttttcgataatatattgagattgttagtcggtaggttaaggcgatgagcgcgtattgttatttgttgtagcgatttttcgtcggtgatatatagcgtttttatttgttgggttagtttgtatagcgtttgtagtagtagcgtggattttttcgtattagggttatcgttaattagaatggtattttttggtattacgtcgtcgtttagtacgcggtcgaattttttaaattcggtggaaaaacgcggtagttttttaaggttgatatcggagagtttttggatttttgttatttcggcgttatcggtatagtcgttgagacgttcgttacgcgttattattggcgacgtagtaagacgtatttcggtgatggtgttttaggtatgataggtattgtattgtttttgttagcgcggataatcggtttcgtatttattataaataaaggcgcgttttggagtttttgttacggtgtatttcgttaatgttgtgtcgttcgtaggatggcgggcgag

SEQ ID NO: 36924 - DNA, 568 bp, Artificial Sequence
  chemically treated genomic DNA (Homo sapiens) CpG-island No: 36924
ctcgcccgccatcctacgaacgacacaacattaacgaaatacaccgtaacaaaaactccaaaacgcgcctttatttataataaatacgaaaccgattatccgcgctaacaaaaacaatacaatacctatcatacctaaaacaccatcaccgaaatacgtcttactacgtcgccaataataacgcgtaacgaacgtctcaacgactataccgataacgccgaaataacaaaaatccaaaaactctccgatatcaaccttaaaaaactaccgcgtttttccaccgaatttaaaaaattcgaccgcgtactaaacgacgacgtaataccaaaaaataccattctaattaacgataaccctaatacgaaaaaatccacgctactactacaaacgctatacaaactaacccaacaaataaaaacgctatatatcaccgacgaaaaatcgctacaacaaataacaatacgcgctcatcgccttaacctaccgactaacaatctcaatatattatcgaaaaccaacatcgaacaaatctacctaattaccgaaaaaaaacaaccgaaactaataa

SEQ ID NO: 36925 - DNA, 581 bp, Artificial Sequence
  chemically treated genomic DNA (Homo sapiens) CpG-island No: 36925
  unsure (543)
cgtgttgttgtttgaagcgggcggttcggattatcgttttgattttcgtatttagatgttcgttgttttggtattttcgttatagggtaaacgttataattgggtttatgaaacggaatttgaatcgtttatgaataatcgtcgtatggagtgcggacgcggtaaaggtttgggtggatcgtcgttgattaacggtatgtgttatattcgtggtaatgcgttggatttcgataattgggcgtaagaattcggtttggagaattggagttatttcgattgtttgttttattatcgtaaggtcgagattcgcgatatgggtgaaaacgattattacggcggtgatggttcggtgagcgttattatttttaaattcggcgttaattcgttgtttgaagcgatgattgaagcgggcgtgtaggcgggttattcgcgtacggacgattttaacggttattagtaggaaggttttggttcgatggatcgtatcgttacgtcgtagggtcgtcgcgttagtatcgcgcgtggttatttcgattaggttanatcgcgtttttaattgattattcgtatttacgttatga

SEQ ID NO: 36926 - DNA, 581 bp, Artificial Sequence
  chemically treated genomic DNA (Homo sapiens) CpG-island No: 36926
  unsure (39)
tcataacgtaaatacgaataatcaattaaaaacgcgatntaacctaatcgaaataaccacgcgcgatactaacgcgacgaccctacgacgtaacgatacgatccatcgaaccaaaaccttcctactaataaccgttaaaatcgtccgtacgcgaataacccgcctacacgcccgcttcaatcatcgcttcaaacaacgaattaacgccgaatttaaaaataataacgctcaccgaaccatcaccgccgtaataatcgttttcacccatatcgcgaatctcgaccttacgataataaaacaaacaatcgaaataactccaattctccaaaccgaattcttacgcccaattatcgaaatccaacgcattaccacgaatataacacataccgttaatcaacgacgatccacccaaacctttaccgcgtccgcactccatacgacgattattcataaacgattcaaattccgtttcataaacccaattataacgtttaccctataacgaaaataccaaaacaacgaacatctaaatacgaaaatcaaaacgataatccgaaccgcccgcttcaaacaacaacacg

SEQ ID NO: 36927 - DNA, 581 bp, Artificial Sequence
  chemically treated genomic DNA (Homo sapiens) CpG-island No: 36927
  unsure (39)
ttatagcgtgagtacgaatggttagttaggaacgcgatntggtttgatcgagatagttacgcgcggtgttggcgcgacggttttgcggcgtgacggtgcgatttatcggattaaaatttttttgttgataatcgttgagatcgttcgtgcgcgggtagttcgtttgtacgttcgttttaattatcgttttaaatagcggattgacgtcgggtttggaggtagtgacgtttatcgggttattatcgtcgtgatagtcgtttttatttatatcgcgagtttcggttttgcggtagtagggtaggtagtcgaggtagttttagttttttagatcgggtttttgcgtttagttatcgagatttagcgtattgttacggatgtagtatatgtcgttgattagcgacgatttatttagatttttatcgcgttcgtattttatgcggcggttatttataaacggtttaggtttcgttttataggtttagttgtagcgtttattttgtagcgggaatgttagggtagcgggtatttgggtgcggaagttaaagcgatagttcgggtcgttcgttttaagtagtagtacg

SEQ ID NO: 36928 - DNA, 581 bp, Artificial Sequence
  chemically treated genomic DNA (Homo sapiens) CpG-island No: 36928
  unsure (543)
cgtactactacttaaaacgaacgacccgaactatcgctttaacttccgcacccaaatacccgctaccctaacattcccgctacaaaataaacgctacaactaaacctataaaacgaaacctaaaccgtttataaataaccgccgcataaaatacgaacgcgataaaaatctaaataaatcgtcgctaatcaacgacatatactacatccgtaacaatacgctaaatctcgataactaaacgcaaaaacccgatctaaaaaactaaaactacctcgactacctaccctactaccgcaaaaccgaaactcgcgatataaataaaaacgactatcacgacgataataacccgataaacgtcactacctccaaacccgacgtcaatccgctatttaaaacgataattaaaacgaacgtacaaacgaactacccgcgcacgaacgatctcaacgattatcaacaaaaaaattttaatccgataaatcgcaccgtcacgccgcaaaaccgtcgcgccaacaccgcgcgtaactatctcgatcaaaccanatcgcgttcctaactaaccattcgtactcacgctataa

SEQ ID NO: 36929 - DNA, 503 bp, Artificial Sequence
  chemically treated genomic DNA (Homo sapiens) CpG-island No: 36929
  unsure (444, 447)
gttcgtacggtatcgtttttgttattattttggtaagaaatggttacgaggttgttttttggggttatgattttgaatatatcgtaacgtttgaacgcgatcgttgtaacgtcgcgttttttttcgatgtgttttttttcgatacgttttattttgaaagcgatttcgttattgcgttggtagttagtcgtaatattttcgtcgtcgtatttagttatgtttttggtgaagtgttgcgttagattaaattattgatgcgttttgatgcgcgtttggtgtgggcgattaaagggttggaagcggaaatcggacgtttgttataggacgtggcgcgtgaggttttaggcgattaaattcgttggcggttatttttggtttaacgtttgcgagagaattggcggtaggtttatcgatagttatttcgttgggttcgaacgattaganttntgtcgatgatttttagtagttgttgtattgcggtaaaagtttcgagtttatagtaa

SEQ ID NO: 36930 - DNA, 503 bp, Artificial Sequence
  chemically treated genomic DNA (Homo sapiens) CpG-island No: 36930
  unsure (57, 60)
ttactataaactcgaaacttttaccgcaatacaacaactactaaaaatcatcgacanaantctaatcgttcgaacccaacgaaataactatcgataaacctaccgccaattctctcgcaaacgttaaaccaaaaataaccgccaacgaatttaatcgcctaaaacctcacgcgccacgtcctataacaaacgtccgatttccgcttccaaccctttaatcgcccacaccaaacgcgcatcaaaacgcatcaataatttaatctaacgcaacacttcaccaaaaacataactaaatacgacgacgaaaatattacgactaactaccaacgcaataacgaaatcgctttcaaaataaaacgtatcgaaaaaaaacacatcgaaaaaaaacgcgacgttacaacgatcgcgttcaaacgttacgatatattcaaaatcataaccccaaaaaacaacctcgtaaccatttcttaccaaaataataacaaaaacgataccgtacgaac

SEQ ID NO: 36931 - DNA, 503 bp, Artificial Sequence
  chemically treated genomic DNA (Homo sapiens) CpG-island No: 36931
  unsure (57, 60)
ttgttgtaaattcgaaatttttgtcgtagtgtagtagttgttgagaattatcggtanagntttgatcgttcgagtttagcgaaatagttgtcggtaaatttgtcgttagttttttcgtaaacgttgggttagagataatcgttagcgaatttgatcgtttaaggttttacgcgttacgttttgtaatagacgttcggttttcgtttttagttttttggtcgtttatattagacgcgtattaggacgtattagtggtttaatttggcgtagtattttattaaagatatggttgggtacgacgacgagaatattacggttggttgttagcgtagtggcgagatcgtttttaagatggagcgtatcgggaaaaggtatatcggggagaaacgcggcgttatagcggtcgcgtttaagcgttgcgatatgtttagggttatggttttagaggataatttcgtggttattttttgttagggtgatggtaagagcggtgtcgtacgagt

SEQ ID NO: 36932 - DNA, 503 bp, Artificial Sequence
  chemically treated genomic DNA (Homo sapiens) CpG-island No: 36932
  unsure (444, 447)
actcgtacgacaccgctcttaccatcaccctaacaaaaaataaccacgaaattatcctctaaaaccataaccctaaacatatcgcaacgcttaaacgcgaccgctataacgccgcgtttctccccgatataccttttcccgatacgctccatcttaaaaacgatctcgccactacgctaacaaccaaccgtaatattctcgtcgtcgtacccaaccatatctttaataaaatactacgccaaattaaaccactaatacgtcctaatacgcgtctaatataaacgaccaaaaaactaaaaacgaaaaccgaacgtctattacaaaacgtaacgcgtaaaaccttaaacgatcaaattcgctaacgattatctctaacccaacgtttacgaaaaaactaacgacaaatttaccgacaactatttcgctaaactcgaacgatcaaanctntaccgataattctcaacaactactacactacgacaaaaatttcgaatttacaacaa

SEQ ID NO: 36933 - DNA, 629 bp, Artificial Sequence
  chemically treated genomic DNA (Homo sapiens) CpG-island No: 36933
ggttcggttcgtggcgtacgcggttcgcgggttggagttagttcgtggtgcgggcgagagggtaggggcggggagaagttatgtttttagttgtagaggttgtatatagttggtatgatcgcggttatttgcgcggcgtcggtgtttttgcgttcgcgttgttcggttcgcggtcgcggattttgcggcgggagcgcggcgcggtgaagtatcggcgcggagggcgttcggcgtaggcggcggcgggtgtgggtcgagtcggtatttatagtttcgtgatagtagtagcggtagcgacgtcgtcggttcgtttcgtcgcgttttttagcgaggtcgtcggcgcgtcgagggttgtgttcgatcgcgaatttcgtgtgtagtcgtttcgcgtttcgcgcgatttttcgggtgagtacgtggggttcgggcgttgggcgagtttttttagtcgttcggtttagtcgtagcggagttttttcggttttgtcgttcgtgtttcggttgttatttcgttattgttcgcgagtgcggaagtagtcgcggaatttcggttcggttttcgaatttttcggcgtttttgtttttgtttttttggggatggtagttaaagaggtagggtgaagtgttaa

SEQ ID NO: 36934 - DNA, 629 bp, Artificial Sequence
  chemically treated genomic DNA (Homo sapiens) CpG-island No: 36934
ttaacacttcaccctacctctttaactaccatccccaaaaaaacaaaaacaaaaacgccgaaaaattcgaaaaccgaaccgaaattccgcgactacttccgcactcgcgaacaataacgaaataacaaccgaaacacgaacgacaaaaccgaaaaaactccgctacgactaaaccgaacgactaaaaaaactcgcccaacgcccgaaccccacgtactcacccgaaaaatcgcgcgaaacgcgaaacgactacacacgaaattcgcgatcgaacacaaccctcgacgcgccgacgacctcgctaaaaaacgcgacgaaacgaaccgacgacgtcgctaccgctactactatcacgaaactataaataccgactcgacccacacccgccgccgcctacgccgaacgccctccgcgccgatacttcaccgcgccgcgctcccgccgcaaaatccgcgaccgcgaaccgaacaacgcgaacgcaaaaacaccgacgccgcgcaaataaccgcgatcataccaactatatacaacctctacaactaaaaacataacttctccccgcccctaccctctcgcccgcaccacgaactaactccaacccgcgaaccgcgtacgccacgaaccgaacc

SEQ ID NO: 36935 - DNA, 629 bp, Artificial Sequence
  chemically treated genomic DNA (Homo sapiens) CpG-island No: 36935
ttgatattttattttgtttttttggttgttatttttaggaaggtaggagtagaggcgtcggagaattcgggggtcgggtcggggtttcgcggttgttttcgtattcgcgggtagtgacgaggtggtagtcgggatacgggcggtagggtcgggagggtttcgttgcggttggatcgaacggttggggaggttcgtttaacgttcgggttttacgtatttattcgaagggtcgcgcggggcgcggggcgattgtatacgggattcgcggtcgagtatagttttcggcgcgtcggcggtttcgttgggaagcgcggcgagacgggtcggcggcgtcgttgtcgttgttgttgttacggagttataaatatcggttcggtttatattcgtcgtcgtttacgtcgggcgtttttcgcgtcggtgttttatcgcgtcgcgttttcgtcgtaaagttcgcggtcgcgggtcgggtaacgcgagcgtaagggtatcggcgtcgcgtaggtgatcgcgattatgttagttgtgtgtaatttttgtagttggaggtatggttttttttcgtttttgttttttcgttcgtattacgggttgattttagttcgcgggtcgcgtgcgttacgggtcgagtt

SEQ ID NO: 36936 - DNA, 629 bp, Artificial Sequence
  chemically treated genomic DNA (Homo sapiens) CpG-island No: 36936
aactcgacccgtaacgcacgcgacccgcgaactaaaatcaacccgtaatacgaacgaaaaaacaaaaacgaaaaaaaaccatacctccaactacaaaaattacacacaactaacataatcgcgatcacctacgcgacgccgatacccttacgctcgcgttacccgacccgcgaccgcgaactttacgacgaaaacgcgacgcgataaaacaccgacgcgaaaaacgcccgacgtaaacgacgacgaatataaaccgaaccgatatttataactccgtaacaacaacaacgacaacgacgccgccgacccgtctcgccgcgcttcccaacgaaaccgccgacgcgccgaaaactatactcgaccgcgaatcccgtatacaatcgccccgcgccccgcgcgacccttcgaataaatacgtaaaacccgaacgttaaacgaacctccccaaccgttcgatccaaccgcaacgaaaccctcccgaccctaccgcccgtatcccgactaccacctcgtcactacccgcgaatacgaaaacaaccgcgaaaccccgacccgacccccgaattctccgacgcctctactcctaccttcctaaaaataacaaccaaaaaaacaaaataaaatatcaa

SEQ ID NO: 36937 - DNA, 837 bp, Artificial Sequence
  chemically treated genomic DNA (Homo sapiens) CpG-island No: 36937
gggttcgaggcgtttgcgtaagcgcgtgtttcgttggttgaaagcggattcgggttggaggcggtgttacggtgtatgaatattgattacgcgtcgtagcgtttagggtttagcgtttagtttttagtgttcgtttttttcggtcgttcgacgttttttgttcgcgtttgggttcgcgatggggaagaagtttcgggcggtattcggtcgtaggtttattttgtaatttttttcgtcgggttttcggggtagtacgtcgggtcgggattcggagtcggaattcgatattgagtcggatttaatcgcggcggtttttagttagttcgtttcgtcggcggcgacgattattattatcgcggtgattgtcgtcgcggtttcggacgattcgtttttagaaggtaagggtgcgcggggggatttgaattcgagtttagggtttgcggtttaggttttttacggcgtttggttagattcggcgagggaggcgggcgaggtcggttttcgaggtttgtttgttgcgggtttgtaggcggggcggttttgggtttcgggtcgtagaagggttaggtcgagttttgcgttttcggttcgggttaagttcgaggcgttatttgtggtgtagggtttgtttcgggaacgtttgaaatatgatcgaagttcgggtattttgagttttttaaacgtttcgggtcggttttgggtaacgtagagggtggatgtgaggatgagttttcgcgtgcgcggtttgtgattgtgggttaggtttttttatacgttatttgttttttttcggttttgtcgaaacggggatagagacgtttagaaaaagtttttaat

SEQ ID NO: 36938 - DNA, 837 bp, Artificial Sequence
  chemically treated genomic DNA (Homo sapiens) CpG-island No: 36938
attaaaaactttttctaaacgtctctatccccgtttcgacaaaaccgaaaaaaaacaaataacgtataaaaaaacctaacccacaatcacaaaccgcgcacgcgaaaactcatcctcacatccaccctctacgttacccaaaaccgacccgaaacgtttaaaaaactcaaaatacccgaacttcgatcatatttcaaacgttcccgaaacaaaccctacaccacaaataacgcctcgaacttaacccgaaccgaaaacgcaaaactcgacctaacccttctacgacccgaaacccaaaaccgccccgcctacaaacccgcaacaaacaaacctcgaaaaccgacctcgcccgcctccctcgccgaatctaaccaaacgccgtaaaaaacctaaaccgcaaaccctaaactcgaattcaaatccccccgcgcacccttaccttctaaaaacgaatcgtccgaaaccgcgacgacaatcaccgcgataataataatcgtcgccgccgacgaaacgaactaactaaaaaccgccgcgattaaatccgactcaatatcgaattccgactccgaatcccgacccgacgtactaccccgaaaacccgacgaaaaaaattacaaaataaacctacgaccgaataccgcccgaaacttcttccccatcgcgaacccaaacgcgaacaaaaaacgtcgaacgaccgaaaaaaacgaacactaaaaactaaacgctaaaccctaaacgctacgacgcgtaatcaatattcatacaccgtaacaccgcctccaacccgaatccgctttcaaccaacgaaacacgcgcttacgcaaacgcctcgaaccc

SEQ ID NO: 36939 - DNA, 837 bp, Artificial Sequence
  chemically treated genomic DNA (Homo sapiens) CpG-island No: 36939
attaagagttttttttaaacgtttttattttcgtttcgataaaatcgaaaggaggtagatgacgtgtggaaaggtttggtttatagttataggtcgcgtacgcggaaatttatttttatatttattttttgcgttatttaaaatcgattcggggcgtttgggagatttaggatgttcgaatttcggttatattttaaacgttttcggggtaagttttgtattatagatggcgtttcgggtttggttcgggtcgagggcgtagaattcggtttggtttttttgcggttcggagtttagggtcgtttcgtttgtaggttcgtagtaggtaggtttcggaagtcgatttcgttcgtttttttcgtcgggtttggttaggcgtcgtgaggagtttaggtcgtaagttttgagttcgagtttaggttttttcgcgtatttttgttttttgaaggcgagtcgttcgaggtcgcggcggtagttatcgcggtggtggtggtcgtcgtcgtcgacggggcgggttggttggggatcgtcgcggttgagttcggtttagtgtcgggtttcggtttcgggtttcggttcggcgtgttgtttcgaggattcggcggagagagttgtaggatgggtttacggtcgggtatcgttcgggattttttttttatcgcgagtttaagcgcgagtagagagcgtcgggcggtcgagaggggcgggtattggaggttgggcgttgggttttgggcgttgcgacgcgtaattaatatttatatatcgtgatatcgtttttagttcggattcgtttttaattagcggagtacgcgtttgcgtaagcgtttcggattt

SEQ ID NO: 36940 - DNA, 837 bp, Artificial Sequence
  chemically treated genomic DNA (Homo sapiens) CpG-island No: 36940
aaatccgaaacgcttacgcaaacgcgtactccgctaattaaaaacgaatccgaactaaaaacgatatcacgatatataaatattaattacgcgtcgcaacgcccaaaacccaacgcccaacctccaatacccgcccctctcgaccgcccgacgctctctactcgcgcttaaactcgcgataaaaaaaaaatcccgaacgatacccgaccgtaaacccatcctacaactctctccgccgaatcctcgaaacaacacgccgaaccgaaacccgaaaccgaaacccgacactaaaccgaactcaaccgcgacgatccccaaccaacccgccccgtcgacgacgacgaccaccaccaccgcgataactaccgccgcgacctcgaacgactcgccttcaaaaaacaaaaatacgcgaaaaaacctaaactcgaactcaaaacttacgacctaaactcctcacgacgcctaaccaaacccgacgaaaaaaacgaacgaaatcgacttccgaaacctacctactacgaacctacaaacgaaacgaccctaaactccgaaccgcaaaaaaaccaaaccgaattctacgccctcgacccgaaccaaacccgaaacgccatctataatacaaaacttaccccgaaaacgtttaaaatataaccgaaattcgaacatcctaaatctcccaaacgccccgaatcgattttaaataacgcaaaaaataaatataaaaataaatttccgcgtacgcgacctataactataaaccaaacctttccacacgtcatctacctcctttcgattttatcgaaacgaaaataaaaacgtttaaaaaaaactcttaat

SEQ ID NO: 36941 - DNA, 596 bp, Artificial Sequence
  chemically treated genomic DNA (Homo sapiens) CpG-island No: 36941
tcgacgtttaaatcgagaagagacgacggcgtatcgcggcgacgttaagatagattcgacgaagagaaggacggacgagcggacggtttattaaaggcgattatagatttatcgtagtattcgaacggtagattaagagtagcggaaacgagagcggagagttaaagggaggataagtattattacgacgagagaaaacgcgacgaagacgaacgaaagagttatcgagagtaaggagaggacgtagatcgaagagaggagtatattatagggagtatagtaagcgataagtacggagaattgtcgagaataggttaagtaaggaacggaagcgttatatagagaataaagaagaggaggcgagagaaagaggagaaacgtaggcgcgaaagagataaattagaagagtagagagacgacgatagaagcgtcgggagtaggaaaagatagaaacgttagagaaaaggggagttattatatagcgaggcgtaagaagttcgatagcgtacgagtagaggtatattataagagagtataagaaaacgatagaggaaggtagaggcggtagtcgtagtaagtacggagcgagtataata

SEQ ID NO: 36942 - DNA, 596 bp, Artificial Sequence
  chemically treated genomic DNA (Homo sapiens) CpG-island No: 36942
tattatactcgctccgtacttactacgactaccgcctctaccttcctctatcgttttcttatactctcttataatatacctctactcgtacgctatcgaacttcttacgcctcgctatataataactccccttttctctaacgtttctatcttttcctactcccgacgcttctatcgtcgtctctctactcttctaatttatctctttcgcgcctacgtttctcctctttctctcgcctcctcttctttattctctatataacgcttccgttccttacttaacctattctcgacaattctccgtacttatcgcttactatactccctataatatactcctctcttcgatctacgtcctctccttactctcgataactctttcgttcgtcttcgtcgcgttttctctcgtcgtaataatacttatcctccctttaactctccgctctcgtttccgctactcttaatctaccgttcgaatactacgataaatctataatcgcctttaataaaccgtccgctcgtccgtccttctcttcgtcgaatctatcttaacgtcgccgcgatacgccgtcgtctcttctcgatttaaacgtcga

SEQ ID NO: 36943 - DNA, 596 bp, Artificial Sequence
  chemically treated genomic DNA (Homo sapiens) CpG-island No: 36943
tgttatgttcgtttcgtgtttgttgcggttgtcgtttttgtttttttttgtcgtttttttgtgtttttttgtggtgtgtttttgttcgtgcgttgtcgggttttttgcgtttcgttgtgtggtagttttttttttttttgacgtttttgtttttttttgttttcggcgtttttgtcgtcgtttttttgtttttttgatttgtttttttcgcgtttgcgttttttttttttttttcgtttttttttttttgttttttgtgtggcgttttcgttttttgtttagtttgttttcggtagtttttcgtgtttgtcgtttgttgtgttttttgtggtgtgttttttttttcggtttgcgttttttttttgttttcggtggttttttcgttcgttttcgtcgcgttttttttcgtcgtggtagtgtttgttttttttttggtttttcgttttcgttttcgttgtttttggtttgtcgttcgagtgttgcggtaggtttgtggtcgtttttggtgagtcgttcgttcgttcgttttttttttcgtcgggtttgttttggcgtcgtcgcgatgcgtcgtcgttttttttcggtttgggcgtcgg

SEQ ID NO: 36944 - DNA, 596 bp, Artificial Sequence
  chemically treated genomic DNA (Homo sapiens) CpG-island No: 36944
ccgacgcccaaaccgaaaaaaaacgacgacgcatcgcgacgacgccaaaacaaacccgacgaaaaaaaaaacgaacgaacgaacgactcaccaaaaacgaccacaaacctaccgcaacactcgaacgacaaaccaaaaacaacgaaaacgaaaacgaaaaaccaaaaaaaaaacaaacactaccacgacgaaaaaaaacgcgacgaaaacgaacgaaaaaaccaccgaaaacaaaaaaaaaacgcaaaccgaaaaaaaaaacacaccacaaaaaacacaacaaacgacaaacacgaaaaactaccgaaaacaaactaaacaaaaaacgaaaacgccacacaaaaaacaaaaaaaaaaaaacgaaaaaaaaaaaaaaaacgcaaacgcgaaaaaaacaaatcaaaaaaacaaaaaaacgacgacaaaaacgccgaaaacaaaaaaaaacaaaaacgtcaaaaaaaaaaaaaactaccacacaacgaaacgcaaaaaacccgacaacgcacgaacaaaaacacaccacaaaaaaacacaaaaaaacgacaaaaaaaaacaaaaacgacaaccgcaacaaacacgaaacgaacataaca

SEQ ID NO: 36945 - DNA, 893 bp, Artificial Sequence
  chemically treated genomic DNA (Homo sapiens) CpG-island No: 36945
atagttttttgttttcgtacgttgggcgttagtttcggtcgtgttgttcggttgtttgagagcgcgttcggttatggagttttcgtataaagacgtcgagacggcggcggcggcggcggcggtgtcggcggcggattttcggggggcgttttcgtttagcggggtggtggtgtaggttcgcgagaagaagggttttttgcgcgtcgtttattttttatatgttttttttcgtggtcgttatttgttttttttttaatattttcgtgtcgggattgggtaagatacggttgtcgcgatttttgcgatttttatttcgtcgcgggagggcgtggggggagagaagggcgcggtcggagattttttggcggggtcgcgcgttttaagtgttgcgattacgcgttatcgttcgtttttggcgttttcgggtaggtggtagaagcgcgtggagtgtgtattttagaggggagaggttgcgttggggttttcgattcgtaggcggggttttaaagagtcggaaattttgcggttaatgttggagttcgtagcggcggtcggaatggttttgtcggtttcggagtaggtttttcgtttcggcgtttcgatttttgtttttttttttcgtcgtgtgtattcgttcgcgagtttattttttcgagaggaatggggtcgggttagaatgagttttagggtttcggcggcgaggattaaattttcgggcgtcgaagttagttgagtcggggaaagaggacgagtcgggttagatatatttgtagttttttttggttcgcggagtgcggatcgcgtggggacgagaattttagttagagtttttttcgttttatttaggggtatttgtattttcgttagtatttcgtagggcgttagggggatgg

SEQ ID NO: 36946 - DNA, 893 bp, Artificial Sequence
  chemically treated genomic DNA (Homo sapiens) CpG-island No: 36946
ccatccccctaacgccctacgaaatactaacgaaaatacaaatacccctaaataaaacgaaaaaaactctaactaaaattctcgtccccacgcgatccgcactccgcgaaccaaaaaaaactacaaatatatctaacccgactcgtcctctttccccgactcaactaacttcgacgcccgaaaatttaatcctcgccgccgaaaccctaaaactcattctaacccgaccccattcctctcgaaaaaataaactcgcgaacgaatacacacgacgaaaaaaaaaaacaaaaatcgaaacgccgaaacgaaaaacctactccgaaaccgacaaaaccattccgaccgccgctacgaactccaacattaaccgcaaaatttccgactctttaaaaccccgcctacgaatcgaaaaccccaacgcaacctctcccctctaaaatacacactccacgcgcttctaccacctacccgaaaacgccaaaaacgaacgataacgcgtaatcgcaacacttaaaacgcgcgaccccgccaaaaaatctccgaccgcgcccttctctccccccacgccctcccgcgacgaaataaaaatcgcaaaaatcgcgacaaccgtatcttacccaatcccgacacgaaaatattaaaaaaaaaacaaataacgaccacgaaaaaaaacatataaaaaataaacgacgcgcaaaaaacccttcttctcgcgaacctacaccaccaccccgctaaacgaaaacgccccccgaaaatccgccgccgacaccgccgccgccgccgccgccgtctcgacgtctttatacgaaaactccataaccgaacgcgctctcaaacaaccgaacaacacgaccgaaactaacgcccaacgtacgaaaacaaaaaactat

SEQ ID NO: 36947 - DNA, 893 bp, Artificial Sequence
  chemically treated genomic DNA (Homo sapiens) CpG-island No: 36947
ttatttttttggcgttttgcggggtgttggcggaagtgtaggtatttttgaatgaggcggaggagattttggttagagttttcgtttttacgcggttcgtatttcgcgaattaaagggggttgtaggtatatttagttcggttcgtttttttttttcggtttagttgatttcgacgttcgggagtttgattttcgtcgtcgaggttttagagtttattttgattcgattttatttttttcggggaagtgggttcgcggacggatgtatacgacggagagaaggagtagaaatcggggcgtcgggacgggagatttatttcgaagtcggtagagttatttcggtcgtcgttgcgggttttaatattggtcgtaaagttttcggttttttggggtttcgtttgcgggtcggagattttagcgtagttttttttttttggggtgtatattttacgcgtttttgttatttgttcggggacgttaggagcgggcggtggcgcgtggtcgtagtatttggagcgcgcggtttcgttaggaggttttcggtcgcgtttttttttttttttacgttttttcgcggcggggtgggggtcgtaagggtcgcggtagtcgtgttttatttagtttcggtacgaaagtgttgaggaagaggtagatgacggttacggggaagggtatgtaggggatgggcggcgcgtagggggttttttttttcgcggatttgtattattatttcgttggacgaggacgtttttcgggggttcgtcgtcggtatcgtcgtcgtcgtcgtcgtcgtttcggcgtttttgtgcgagggttttatggtcgggcgcgtttttaggtagtcgggtagtacggtcggagttggcgtttagcgtacgggagtaggagattgt

SEQ ID NO: 36948 - DNA, 893 bp, Artificial Sequence
  chemically treated genomic DNA (Homo sapiens) CpG-island No: 36948
acaatctcctactcccgtacgctaaacgccaactccgaccgtactacccgactacctaaaaacgcgcccgaccataaaaccctcgcacaaaaacgccgaaacgacgacgacgacgacgacgataccgacgacgaacccccgaaaaacgtcctcgtccaacgaaataataatacaaatccgcgaaaaaaaaaaccccctacgcgccgcccatcccctacatacccttccccgtaaccgtcatctacctcttcctcaacactttcgtaccgaaactaaataaaacacgactaccgcgacccttacgacccccaccccgccgcgaaaaaacgtaaaaaaaaaaaaaaacgcgaccgaaaacctcctaacgaaaccgcgcgctccaaatactacgaccacgcgccaccgcccgctcctaacgtccccgaacaaataacaaaaacgcgtaaaatatacaccccaaaaaaaaaaaactacgctaaaatctccgacccgcaaacgaaaccccaaaaaaccgaaaactttacgaccaatattaaaacccgcaacgacgaccgaaataactctaccgacttcgaaataaatctcccgtcccgacgccccgatttctactccttctctccgtcgtatacatccgtccgcgaacccacttccccgaaaaaaataaaatcgaatcaaaataaactctaaaacctcgacgacgaaaatcaaactcccgaacgtcgaaatcaactaaaccgaaaaaaaaaaacgaaccgaactaaatatacctacaaccccctttaattcgcgaaatacgaaccgcgtaaaaacgaaaactctaaccaaaatctcctccgcctcattcaaaaatacctacacttccgccaacaccccgcaaaacgccaaaaaaataa

SEQ ID NO: 36949 - DNA, 636 bp, Artificial Sequence
  chemically treated genomic DNA (Homo sapiens) CpG-island No: 36949
gattttgttcgggttttttttttcgcgcggggtttcggggacgcgggtgggggcggtcggggatattcgttacgcggggcggggacgtcgttgttagttttttttttttttcgtcgttgcgtttcgggcgttttcggtatttgggataggtatttcgggcgtggagaggggcgtttggatcggatttgttaagttgttttttcgttcgtgtttattttttttttttttggattttttttagattcgggtcgggttattttcgagatttttttttgttttcgattttattcgggagtttcgtcgttcggagttcgtttttcgtttcgtcgcgcgtagtttttagtattttttaattttttattttttttgggttttttttttaattttttcgtagtttttttttttttcgtgtttaatttcgttttttattttcggcgttcgttattcgcgtcgattttttttttagtttttatcgggttttttcggttcggatagttttttgttaacgtatttcgtatttttagcgttttttaatttttttttggttattttagttaagttgcggatgtcggaaagaaatttagttttttgtaatacgtttatcgttagagtggtgattttagttgcgttttgaat

SEQ ID NO: 36950 - DNA, 636 bp, Artificial Sequence
  chemically treated genomic DNA (Homo sapiens) CpG-island No: 36950
attcaaaacgcaactaaaatcaccactctaacgataaacgtattacaaaaaactaaatttctttccgacatccgcaacttaactaaaataaccaaaaaaaaattaaaaaacgctaaaaatacgaaatacgttaacaaaaaactatccgaaccgaaaaaacccgataaaaactaaaaaaaaaatcgacgcgaataacgaacgccgaaaataaaaaacgaaattaaacacgaaaaaaaaaaaaactacgaaaaaattaaaaaaaaaacccaaaaaaaataaaaaattaaaaaatactaaaaactacgcgcgacgaaacgaaaaacgaactccgaacgacgaaactcccgaataaaatcgaaaacaaaaaaaaatctcgaaaataacccgacccgaatctaaaaaaaatccaaaaaaaaaaaaaataaacacgaacgaaaaaacaacttaacaaatccgatccaaacgcccctctccacgcccgaaatacctatcccaaataccgaaaacgcccgaaacgcaacgacgaaaaaaaaaaaaaactaacaacgacgtccccgccccgcgtaacgaatatccccgaccgcccccacccgcgtccccgaaaccccgcgcgaaaaaaaaaacccgaacaaaatc

SEQ ID NO: 36951 - DNA, 636 bp, Artificial Sequence
  chemically treated genomic DNA (Homo sapiens) CpG-island No: 36951
gtttaagacgtagttaaagttattattttggcggtaagcgtgttatagagaattagattttttttcggtattcgtaatttggttggagtgattaaggaggagttgaagagcgttggagatgcgaggtgcgttggtagaaaattgttcgggtcgggaggattcggtggaaattaaaaggagggtcgacgcgggtggcgggcgtcgagagtaagaggcgaagttgggtacgggaaggaaaggagttgcgagaagattgagagggaagtttaggaggggtggggggttggggggtgttggagattgcgcgcggcggggcggggagcgaatttcgggcggcgaggttttcgggtggagtcgaggataagaaggggtttcgagggtaattcgattcgggtttagagagagtttaggagggaaaggaatgagtacgagcgagagagtagtttggtaagttcggtttaagcgtttttttttacgttcggggtatttattttaggtgtcgggaacgttcggggcgtagcgacgaggaagagagaaaattagtagcggcgttttcgtttcgcgtggcgggtgttttcggtcgtttttattcgcgttttcggggtttcgcgcggaggggaagattcgggtagggtt

SEQ ID NO: 36952 - DNA, 636 bp, Artificial Sequence
  chemically treated genomic DNA (Homo sapiens) CpG-island No: 36952
aaccctacccgaatcttcccctccgcgcgaaaccccgaaaacgcgaataaaaacgaccgaaaacacccgccacgcgaaacgaaaacgccgctactaattttctctcttcctcgtcgctacgccccgaacgttcccgacacctaaaataaataccccgaacgtaaaaaaaaacgcttaaaccgaacttaccaaactactctctcgctcgtactcattcctttccctcctaaactctctctaaacccgaatcgaattaccctcgaaaccccttcttatcctcgactccacccgaaaacctcgccgcccgaaattcgctccccgccccgccgcgcgcaatctccaacaccccccaaccccccacccctcctaaacttccctctcaatcttctcgcaactcctttccttcccgtacccaacttcgcctcttactctcgacgcccgccacccgcgtcgaccctccttttaatttccaccgaatcctcccgacccgaacaattttctaccaacgcacctcgcatctccaacgctcttcaactcctccttaatcactccaaccaaattacgaataccgaaaaaaaatctaattctctataacacgcttaccgccaaaataataactttaactacgtcttaaac

SEQ ID NO: 36953 - DNA, 631 bp, Artificial Sequence
  chemically treated genomic DNA (Homo sapiens) CpG-island No: 36953
gtttagtatcggtaaatagatttaatattatttttttttatttttagtttcgcggcgtagtagttgcgttttacgcgatacgttttagcggtaatcggaaagtgtgttattattacggattattcgatgatagggtattatgatagttagtttgttggcggtataggcgttggtaacggttcgtatcgttttcggtttgtcgatggcgttagttagttgttgataattgacggttttatcgtaaggtatcgtgcgtagtgtttgttagatttgttgttgaaaagtagtgtcgcgaatgtttagcggtaacgttagcggcgtatcgcgttgattgaggttggcgattattttacgtatatgttgttgaaatattagatcggtaggcgcgttgtcggtagcgggaaatatttgttgtaattcgttgattagtgtcgcgttattatcgtttagtaatatcgcgtaaatttttcgttcgttttttgttattaggtaacgatttagtttataattagttagcgcgtaacgtatcgttagattttacgtatcgtgacgtaattgtttagtcgttatgtttagcgtttcgttagtttttcgatagtaattgttgttgtcggggaatttggcgttaata

SEQ ID NO: 36954 - DNA, 631 bp, Artificial Sequence
  chemically treated genomic DNA (Homo sapiens) CpG-island No: 36954
tattaacgccaaattccccgacaacaacaattactatcgaaaaactaacgaaacgctaaacataacgactaaacaattacgtcacgatacgtaaaatctaacgatacgttacgcgctaactaattataaactaaatcgttacctaataacaaaaaacgaacgaaaaatttacgcgatattactaaacgataataacgcgacactaatcaacgaattacaacaaatatttcccgctaccgacaacgcgcctaccgatctaatatttcaacaacatatacgtaaaataatcgccaacctcaatcaacgcgatacgccgctaacgttaccgctaaacattcgcgacactacttttcaacaacaaatctaacaaacactacgcacgataccttacgataaaaccgtcaattatcaacaactaactaacgccatcgacaaaccgaaaacgatacgaaccgttaccaacgcctataccgccaacaaactaactatcataataccctatcatcgaataatccgtaataataacacactttccgattaccgctaaaacgtatcgcgtaaaacgcaactactacgccgcgaaactaaaaataaaaaaaaataatattaaatctatttaccgatactaaac

SEQ ID NO: 36955 - DNA, 631 bp, Artificial Sequence
  chemically treated genomic DNA (Homo sapiens) CpG-island No: 36955
tgttaacgttagatttttcgatagtagtagttattatcggaaagttgacgaaacgttgggtatgacggttaaataattgcgttacggtgcgtaaaatttggcggtgcgttacgcgttggttgattgtgagttgggtcgttgtttggtggtagaaagcgagcgggggatttgcgcgatattgttgggcgatgatgacgcgatattaattagcgagttgtagtagatgtttttcgttgtcgataacgcgtttgtcgatttgatgttttagtaatatgtgcgtgaagtgatcgttagttttaattaacgcgatacgtcgttgacgttatcgttggatattcgcggtattgttttttagtaataagtttggtaggtattgcgtacgatattttgcggtgaaatcgttagttattagtaattggttaacgttatcggtaaatcgaaagcggtacgggtcgttgttagcgtttgtgtcgttaataagttggttattataatattttgttatcgggtggttcgtggtgatggtatatttttcggttatcgttggggcgtgtcgcgtaaagcgtaattgttgcgtcgcgaagttgaaaatgaggagaggtaatgttggatttgtttgtcgatgttgaat

SEQ ID NO: 36956 - DNA, 631 bp, Artificial Sequence
  chemically treated genomic DNA (Homo sapiens) CpG-island No: 36956
attcaacatcgacaaacaaatccaacattacctctcctcattttcaacttcgcgacgcaacaattacgctttacgcgacacgccccaacgataaccgaaaaatataccatcaccacgaaccacccgataacaaaatattataataaccaacttattaacgacacaaacgctaacaacgacccgtaccgctttcgatttaccgataacgttaaccaattactaataactaacgatttcaccgcaaaatatcgtacgcaatacctaccaaacttattactaaaaaacaataccgcgaatatccaacgataacgtcaacgacgtatcgcgttaattaaaactaacgatcacttcacgcacatattactaaaacatcaaatcgacaaacgcgttatcgacaacgaaaaacatctactacaactcgctaattaatatcgcgtcatcatcgcccaacaatatcgcgcaaatcccccgctcgctttctaccaccaaacaacgacccaactcacaatcaaccaacgcgtaacgcaccgccaaattttacgcaccgtaacgcaattatttaaccgtcatacccaacgtttcgtcaactttccgataataactactactatcgaaaaatctaacgttaaca

SEQ ID NO: 36957 - DNA, 557 bp, Artificial Sequence
  chemically treated genomic DNA (Homo sapiens) CpG-island No: 36957
tcgttgtttattcgtcggtgatatttttgattttgtcgtgttgtattatttttagcgtttgcgttagcgtttgtttttcgtttttaattaacgcgtttgattggtttcgcggtattagcgagtcgttagtttgataatcgcgatcggtaaatattttttcgcgcgttgttagattatattgtttgtttgtacgaattagttcgtttttcgttagttcgacgagaattaatgttggatcgtaagcgtatatcgttttggcgatggcgtttgttagttgtgtttttttcgtcgtttggttgtataatatgtcgtgcggtttgatatgacgtattacgtcgttttgcgtacgggtaatcgttgttagcgcgttaatttgatatagcgtttgggcgtaaacggtttttggcggtagttgtatggcgttgcgattaaaattttttttgtcgggaaaattcgggtgagcgttaatcgcgatattattttttattgttttacgtacgtaagtttgtatgatttgcgtatcgtttgtatgaaatttataggtaatattggtagag

SEQ ID NO: 36958 - DNA, 557 bp, Artificial Sequence
  chemically treated genomic DNA (Homo sapiens) CpG-island No: 36958
ctctaccaatattacctataaatttcatacaaacgatacgcaaatcatacaaacttacgtacgtaaaacaataaaaaataatatcgcgattaacgctcacccgaattttcccgacaaaaaaaattttaatcgcaacgccatacaactaccgccaaaaaccgtttacgcccaaacgctatatcaaattaacgcgctaacaacgattacccgtacgcaaaacgacgtaatacgtcatatcaaaccgcacgacatattatacaaccaaacgacgaaaaaaacacaactaacaaacgccatcgccaaaacgatatacgcttacgatccaacattaattctcgtcgaactaacgaaaaacgaactaattcgtacaaacaaacaatataatctaacaacgcgcgaaaaaatatttaccgatcgcgattatcaaactaacgactcgctaataccgcgaaaccaatcaaacgcgttaattaaaaacgaaaaacaaacgctaacgcaaacgctaaaaataatacaacacgacaaaatcaaaaatatcaccgacgaataaacaacga

SEQ ID NO: 36959 - DNA, 557 bp, Artificial Sequence
  chemically treated genomic DNA (Homo sapiens) CpG-island No: 36959
ttttgttaatattgtttgtggattttatgtaggcgatgcgtaaattatgtaggtttgcgtgcgtgaagtaataaaaaatggtgtcgcgattggcgtttattcgagttttttcgatagggaaaattttggtcgtagcgttatgtagttgtcgttagaaatcgtttacgtttagacgttgtattaaattggcgcgttggtaacgattgttcgtgcgtaaggcggcgtaatgcgttatgttaaatcgtacggtatgttgtataattaggcggcgaaagaagtataattggtagacgttatcgttagagcggtatacgtttgcgatttagtattgattttcgtcgggttggcgggaagcgagttgattcgtgtaggtaagtaatatggtttgataacgcgcgaggaagtgtttgtcgatcgcggttattaggttgacggttcgttggtgtcgcgaagttagttaggcgcgttgattgaaaacgaagaataggcgttggcgtaaacgttggagatggtgtaatacggtagagttaaaagtattatcggcgaatgggtaacgg

SEQ ID NO: 36960 - DNA, 557 bp, Artificial Sequence
  chemically treated genomic DNA (Homo sapiens) CpG-island No: 36960
ccgttacccattcgccgataatacttttaactctaccgtattacaccatctccaacgtttacgccaacgcctattcttcgttttcaatcaacgcgcctaactaacttcgcgacaccaacgaaccgtcaacctaataaccgcgatcgacaaacacttcctcgcgcgttatcaaaccatattacttacctacacgaatcaactcgcttcccgccaacccgacgaaaatcaatactaaatcgcaaacgtataccgctctaacgataacgtctaccaattatacttctttcgccgcctaattatacaacataccgtacgatttaacataacgcattacgccgccttacgcacgaacaatcgttaccaacgcgccaatttaatacaacgtctaaacgtaaacgatttctaacgacaactacataacgctacgaccaaaattttccctatcgaaaaaactcgaataaacgccaatcgcgacaccattttttattacttcacgcacgcaaacctacataatttacgcatcgcctacataaaatccacaaacaatattaacaaaa

SEQ ID NO: 36961 - DNA, 586 bp, Artificial Sequence
  chemically treated genomic DNA (Homo sapiens) CpG-island No: 36961
tatattcgcggatataagtatacgcgcgttggtaaagcgttcgcgtcgttagtcgtatcgagcgttcgtttttttgttcggatcgggggcgtttcgcgcgcgtggttaatttgtagcggaataggcgcgaggcgttcgcgacggcgacggcggtattacggaatagtcggcggtcgttaggacgtagatttttttcggagtgggtttaagggtgtcgggacgcgcggtacggagcgggaaggaagtgcgagtttatttagtttagtcgtttatcgagagtatacgttttcgcgtcgtagtagagagacgcgaatcggcggggcggggtcgcgcgtattttcgggattggagcggagtcgagtcgattttcgggggcgggtcgcgcgcgttttcgggattggggcggggtcgcgcgcgtttacgggattgggcggggtcgtaagtattttttggatgggcggagtcgagcggattttcgggattcggcggagtcgtaggaggaggcgggtggtttttgttaaagaagttagtttttttgaaaaaaagaaacgtgcggggaaacgtattcgatagtaaagaatttatt

SEQ ID NO: 36962 - DNA, 586 bp, Artificial Sequence
  chemically treated genomic DNA (Homo sapiens) CpG-island No: 36962
aataaattctttactatcgaatacgtttccccgcacgtttctttttttcaaaaaaactaacttctttaacaaaaaccacccgcctcctcctacgactccgccgaatcccgaaaatccgctcgactccgcccatccaaaaaatacttacgaccccgcccaatcccgtaaacgcgcgcgaccccgccccaatcccgaaaacgcgcgcgacccgcccccgaaaatcgactcgactccgctccaatcccgaaaatacgcgcgaccccgccccgccgattcgcgtctctctactacgacgcgaaaacgtatactctcgataaacgactaaactaaataaactcgcacttccttcccgctccgtaccgcgcgtcccgacacccttaaacccactccgaaaaaaatctacgtcctaacgaccgccgactattccgtaataccgccgtcgccgtcgcgaacgcctcgcgcctattccgctacaaattaaccacgcgcgcgaaacgcccccgatccgaacaaaaaaacgaacgctcgatacgactaacgacgcgaacgctttaccaacgcgcgtatacttatatccgcgaatata

SEQ ID NO: 36963 - DNA, 586 bp, Artificial Sequence
  chemically treated genomic DNA (Homo sapiens) CpG-island No: 36963
ggtaagttttttgttgtcggatacgttttttcgtacgttttttttttttaagaaaattggtttttttagtaggaattattcgtttttttttgcggtttcgtcggatttcggaaattcgttcggtttcgtttatttaggaaatgtttgcggtttcgtttaatttcgtaagcgcgcgcggtttcgttttaatttcggaagcgcgcgcggttcgttttcgaaagtcggttcggtttcgttttaatttcggaagtgcgcgcggtttcgtttcgtcggttcgcgtttttttgttgcggcgcggggacgtgtgttttcggtaggcggttgggttgggtgggttcgtatttttttttcgtttcgtgtcgcgcgtttcggtatttttaggtttatttcgggaggggtttgcgttttggcggtcgtcggttgtttcgtgatgtcgtcgtcgtcgtcgcgggcgtttcgcgtttgtttcgttgtaggttggttacgcgcgcggagcgttttcgattcggataaagaaacgagcgttcggtgcgattagcggcgcgggcgttttgttagcgcgcgtgtgtttgtgttcgcgagtgtg

SEQ ID NO: 36964 - DNA, 586 bp, Artificial Sequence
  chemically treated genomic DNA (Homo sapiens) CpG-island No: 36964
cacactcgcgaacacaaacacacgcgcgctaacaaaacgcccgcgccgctaatcgcaccgaacgctcgtttctttatccgaatcgaaaacgctccgcgcgcgtaaccaacctacaacgaaacaaacgcgaaacgcccgcgacgacgacgacgacatcacgaaacaaccgacgaccgccaaaacgcaaacccctcccgaaataaacctaaaaataccgaaacgcgcgacacgaaacgaaaaaaaaatacgaacccacccaacccaaccgcctaccgaaaacacacgtccccgcgccgcaacaaaaaaacgcgaaccgacgaaacgaaaccgcgcgcacttccgaaattaaaacgaaaccgaaccgactttcgaaaacgaaccgcgcgcgcttccgaaattaaaacgaaaccgcgcgcgcttacgaaattaaacgaaaccgcaaacatttcctaaataaacgaaaccgaacgaatttccgaaatccgacgaaaccgcaaaaaaaaacgaataattcctactaaaaaaaccaattttcttaaaaaaaaaaaacgtacgaaaaaacgtatccgacaacaaaaaacttacc

SEQ ID NO: 36965 - DNA, 682 bp, Artificial Sequence
  chemically treated genomic DNA (Homo sapiens) CpG-island No: 36965
agataatcgcggaaggcgtcggttagtagtcgttattcgttttcgtttttgtatcggttgttcggtgatttttagaggggtaggttcgaaaacgtttaaaattttttcgaaacgtttttgattattttcgttacgatcgttgtttattcggattgtggtgcgcggtagagaggttcggttttcgtgcgttttcggtttcgttagatagggaaagatggataagtttagggagaatcgcgaagatcgaattcgttttgtagaggtagaaatttcgcgtcggtcgtttttacgtcgagcgtgtttagggtgtcgaggtcgggggcgttttgaagagttttgaagcgagcgagacgcgggttcggatcgttaatttcggtcgtttagagttttataggataagtatcgtacggttttttcggttcgcgggtttattttgcgcgtgtagtgtttatattttatttggagcgcggcgggcgggaggtcgggcgttttagttttagggaagtatcgggagattggatatttatttgtatcgtcgcggttttttgttgtttttcgcgcggtagttttacgtttttagattcgcgttcggttaatgagagtatcgggagagataagtcgtatttttgggttaatagattttttatttttgacgtttttttaggttaatgatagtgtcggg

SEQ ID NO: 36966 - DNA, 682 bp, Artificial Sequence
  chemically treated genomic DNA (Homo sapiens) CpG-island No: 36966
cccgacactatcattaacctaaaaaaacgtcaaaaataaaaaatctattaacccaaaaatacgacttatctctcccgatactctcattaaccgaacgcgaatctaaaaacgtaaaactaccgcgcgaaaaacaacaaaaaaccgcgacgatacaaataaatatccaatctcccgatacttccctaaaactaaaacgcccgacctcccgcccgccgcgctccaaataaaatataaacactacacgcgcaaaataaacccgcgaaccgaaaaaaccgtacgatacttatcctataaaactctaaacgaccgaaattaacgatccgaacccgcgtctcgctcgcttcaaaactcttcaaaacgcccccgacctcgacaccctaaacacgctcgacgtaaaaacgaccgacgcgaaatttctacctctacaaaacgaattcgatcttcgcgattctccctaaacttatccatctttccctatctaacgaaaccgaaaacgcacgaaaaccgaacctctctaccgcgcaccacaatccgaataaacaacgatcgtaacgaaaataatcaaaaacgtttcgaaaaaattttaaacgttttcgaacctacccctctaaaaatcaccgaacaaccgatacaaaaacgaaaacgaataacgactactaaccgacgccttccgcgattatct

SEQ ID NO: 36967 - DNA, 682 bp, Artificial Sequence
  chemically treated genomic DNA (Homo sapiens) CpG-island No: 36967
ttcgatattgttattggtttaggaaagcgttaagggtggggaatttattggtttaggggtgcggtttgtttttttcggtgtttttattggtcgagcgcgggtttaggggcgtgaggttgtcgcgcggaggataataaagggtcgcggcggtgtaagtaggtgtttagtttttcggtgtttttttgaggttgaggcgttcggtttttcgttcgtcgcgttttagatgaagtgtgagtattgtacgcgtaaggtgagttcgcgggtcggggaggtcgtgcgatgtttgttttgtggggttttgggcggtcgaggttggcggttcgggttcgcgtttcgttcgttttagggttttttaaggcgttttcggtttcggtattttgggtacgttcggcgtggaggcggtcggcgcggggtttttgtttttgtagggcgggttcggttttcgcggttttttttgaatttgtttatttttttttatttggcgaagtcggaaacgtacggagatcgagtttttttgtcgcgtattatagttcgagtaaatagcggtcgtggcgggaatgattagaagcgtttcgagagggttttaggcgttttcgaatttgtttttttgagggttatcgagtagtcggtgtaggggcggaagcgggtgacggttgttgatcggcgtttttcgcggttgttt

SEQ ID NO: 36968 - DNA, 682 bp, Artificial Sequence
  chemically treated genomic DNA (Homo sapiens) CpG-island No: 36968
aaacaaccgcgaaaaacgccgatcaacaaccgtcacccgcttccgcccctacaccgactactcgataaccctcaaaaaaacaaattcgaaaacgcctaaaaccctctcgaaacgcttctaatcattcccgccacgaccgctatttactcgaactataatacgcgacaaaaaaactcgatctccgtacgtttccgacttcgccaaataaaaaaaaataaacaaattcaaaaaaaaccgcgaaaaccgaacccgccctacaaaaacaaaaaccccgcgccgaccgcctccacgccgaacgtacccaaaataccgaaaccgaaaacgccttaaaaaaccctaaaacgaacgaaacgcgaacccgaaccgccaacctcgaccgcccaaaaccccacaaaacaaacatcgcacgacctccccgacccgcgaactcaccttacgcgtacaatactcacacttcatctaaaacgcgacgaacgaaaaaccgaacgcctcaacctcaaaaaaacaccgaaaaactaaacacctacttacaccgccgcgaccctttattatcctccgcgcgacaacctcacgcccctaaacccgcgctcgaccaataaaaacaccgaaaaaaacaaaccgcacccctaaaccaataaattccccacccttaacgctttcctaaaccaataacaatatcgaa

SEQ ID NO: 36969 - DNA, 746 bp, Artificial Sequence
  chemically treated genomic DNA (Homo sapiens) CpG-island No: 36969
  unsure (328, 330, 701..)
ttattcgggatgttcgagcgttagtcgcggtagcgttagcgcgcgcgtcggaagcgtttgttcgtgtagattttcggcgcggaacgtcgattacgaagttgcggtatcgagcgtcgtttttaggtttttatttcgttttttttcgggttttgcggacggagttggcgtttttgaaggcgaggcgagggttcgttttttgatcgtttttgttttttcgcgggagcgtcggtcgttacgtgggaggttacgtgggtggtttgttaattgttcggagacgttttcgtcgtagtcggtttttacgggagtcgtagttcgagtatgttaaggnanggcgcgagtttggattttatagcgcggcgtggcgggaggtttttttttatttagatttcgtcggttttttttttttttatttagatttcgtcggttttttttttatttatttagatttcgtcggttttttattttttatttagatatcgtcgttttttttcggcgttcgggataggttcgggacgttggggtcgcgttcgagtacgtgagggttgagtagttcgcgtttttttttaggaaatttagtgagacgttgggtattcgaatgtggtcgtcggggaacggggtttatatttttcgcgttcggagaattttttagtttcgtttgaaacgaacgcggtgttttaaagtgcgggttgtaggttttgttnnttgacgcggcgatgattgaaggtgttgtttttaggagagaatag

SEQ ID NO: 36970 - DNA, 746 bp, Artificial Sequence
  chemically treated genomic DNA (Homo sapiens) CpG-island No: 36970
  unsure (45..46, 417, 419)
ctattctctcctaaaaacaacaccttcaatcatcgccgcgtcaannaacaaaacctacaacccgcactttaaaacaccgcgttcgtttcaaacgaaactaaaaaattctccgaacgcgaaaaatataaaccccgttccccgacgaccacattcgaatacccaacgtctcactaaatttcctaaaaaaaaacgcgaactactcaaccctcacgtactcgaacgcgaccccaacgtcccgaacctatcccgaacgccgaaaaaaaacgacgatatctaaataaaaaataaaaaaccgacgaaatctaaataaataaaaaaaaaaccgacgaaatctaaataaaaaaaaaaaaaaccgacgaaatctaaataaaaaaaaacctcccgccacgccgcgctataaaatccaaactcgcgccntnccttaacatactcgaactacgactcccgtaaaaaccgactacgacgaaaacgtctccgaacaattaacaaaccacccacgtaacctcccacgtaacgaccgacgctcccgcgaaaaaacaaaaacgatcaaaaaacgaaccctcgcctcgccttcaaaaacgccaactccgtccgcaaaacccgaaaaaaaacgaaataaaaacctaaaaacgacgctcgataccgcaacttcgtaatcgacgttccgcgccgaaaatctacacgaacaaacgcttccgacgcgcgcgctaacgctaccgcgactaacgctcgaacatcccgaataa

SEQ ID NO: 36971 - DNA, 746 bp, Artificial Sequence
  chemically treated genomic DNA (Homo sapiens) CpG-island No: 36971
  unsure (45..46, 417, 419)
ttatttttttttaaaagtagtatttttaattatcgtcgcgttaannggtagagtttgtagttcgtattttagggtatcgcgttcgttttaggcgggattggggagtttttcgagcgcggggggtgtgggtttcgtttttcggcgattatattcgaatatttagcgttttattgggttttttaaggagaggcgcgggttgtttagtttttacgtgttcggacgcggttttagcgtttcgagtttgtttcgagcgtcgagggagggcggcggtgtttgggtgaaaagtgggaggtcggcggggtttgggtgggtgggagggagatcggcggggtttgggtaggagggagggaggtcggcggggtttgggtgggagggagtttttcgttacgtcgcgttgtggagtttaaattcgcgttntnttttggtatgttcggattgcgattttcgtgagggtcggttgcggcgaaggcgttttcgagtagttgatagattatttacgtgattttttacgtgacggtcggcgttttcgcggaggagtaagaacggttaaggaacgggttttcgtttcgtttttagaggcgttagtttcgttcgtaaaattcggggggaagcgaggtggggatttggaggcggcgttcgatgtcgtagtttcgtagtcggcgtttcgcgtcggggatttgtacgagtaaacgttttcggcgcgcgcgttggcgttgtcgcgattgacgttcgggtatttcgggtag

SEQ ID NO: 36972 - DNA, 746 bp, Artificial Sequence
  chemically treated genomic DNA (Homo sapiens) CpG-island No: 36972
  unsure (328, 330, 701..)
ctacccgaaatacccgaacgtcaatcgcgacaacgccaacgcgcgcgccgaaaacgtttactcgtacaaatccccgacgcgaaacgccgactacgaaactacgacatcgaacgccgcctccaaatccccacctcgcttccccccgaattttacgaacgaaactaacgcctctaaaaacgaaacgaaaacccgttccttaaccgttcttactcctccgcgaaaacgccgaccgtcacgtaaaaaatcacgtaaataatctatcaactactcgaaaacgccttcgccgcaaccgaccctcacgaaaatcgcaatccgaacataccaaaananaacgcgaatttaaactccacaacgcgacgtaacgaaaaactccctcccacccaaaccccgccgacctccctccctcctacccaaaccccgccgatctccctcccacccacccaaaccccgccgacctcccacttttcacccaaacaccgccgccctccctcgacgctcgaaacaaactcgaaacgctaaaaccgcgtccgaacacgtaaaaactaaacaacccgcgcctctccttaaaaaacccaataaaacgctaaatattcgaatataatcgccgaaaaacgaaacccacaccccccgcgctcgaaaaactccccaatcccgcctaaaacgaacgcgataccctaaaatacgaactacaaactctaccnnttaacgcgacgataattaaaaatactacttttaaaaaaaaataa

SEQ ID NO: 36973 - DNA, 747 bp, Artificial Sequence
  chemically treated genomic DNA (Homo sapiens) CpG-island No: 36973
gggcgcggaacggggtggggagtttgcgggcgagttcggaggatattggcgtatttttttcgtcggtttacggtcgtattcgttatattcgaaggcgtcgcgatttttcggagatttcgaagcgtgcgtttttattcgggttttgcgggcgttggcggaaagaggcgaggcggtgtttcgggggcggggtttttttcggttggcggtttcgggtttcgggagttttttaagaggttaggtgaggcgtttcgtgatgttcgcgttcggtcgttttggttgtaacgtgtttttggggcggaggagcggtagtggagttcgttgcgcgttgttgggggttatttgttttttcgtttgtgtttttttttttagtgtcgcgttcgagtatcgacgggtcgttttaagtttcgatatgtcgtataattacgtggtaacggtttagaagtttatcgtcgtgaacggttgcgtgatcggtgaggttgtcggggtcggagatttcggcgagtgagggagttggggggagtcgcggtttagggaggttcgtcgtttcgggggcggtcgggtaggagtgggttcggcgaatggaaggcgttggcggatcgaggaattttttttagtatcgcgatttcgaaagagtcgtttttgtacgcgtttttgggggttggaagtcgttttcgaggggtttttttttcgttttggggaggttattcggtttcgagaatagggcgggttttagtgagatagaggagt

SEQ ID NO: 36974 - DNA, 747 bp, Artificial Sequence
  chemically treated genomic DNA (Homo sapiens) CpG-island No: 36974
actcctctatctcactaaaacccgccctattctcgaaaccgaataacctccccaaaacgaaaaaaaaacccctcgaaaacgacttccaacccccaaaaacgcgtacaaaaacgactctttcgaaatcgcgatactaaaaaaaattcctcgatccgccaacgccttccattcgccgaacccactcctacccgaccgcccccgaaacgacgaacctccctaaaccgcgactccccccaactccctcactcgccgaaatctccgaccccgacaacctcaccgatcacgcaaccgttcacgacgataaacttctaaaccgttaccacgtaattatacgacatatcgaaacttaaaacgacccgtcgatactcgaacgcgacactaaaaaaaaaaacacaaacgaaaaaacaaataacccccaacaacgcgcaacgaactccactaccgctcctccgccccaaaaacacgttacaaccaaaacgaccgaacgcgaacatcacgaaacgcctcacctaacctcttaaaaaactcccgaaacccgaaaccgccaaccgaaaaaaaccccgcccccgaaacaccgcctcgcctctttccgccaacgcccgcaaaacccgaataaaaacgcacgcttcgaaatctccgaaaaatcgcgacgccttcgaatataacgaatacgaccgtaaaccgacgaaaaaaatacgccaatatcctccgaactcgcccgcaaactccccaccccgttccgcgccc

SEQ ID NO: 36975 - DNA, 747 bp, Artificial Sequence
  chemically treated genomic DNA (Homo sapiens) CpG-island No: 36975
atttttttgttttattggggttcgttttgttttcgaggtcgaatgatttttttaggacgaaagggggatttttcgagagcggtttttaatttttaaaagcgcgtatagggacgattttttcgaggtcgcggtgttgggggaggtttttcgattcgttagcgttttttattcgtcgggtttatttttgttcggtcgttttcggggcggcgggtttttttaggtcgcggttttttttaatttttttattcgtcggggttttcggtttcggtagttttatcggttacgtagtcgtttacggcggtgggtttttgggtcgttattacgtagttgtacgatatgtcgaggtttggagcggttcgtcggtattcgagcgcgatattagaaagagggatataagcgaaaagataggtggtttttaatagcgcgtagcgaattttattgtcgttttttcgttttagagatacgttgtagttagagcggtcgggcgcgggtattacgggacgttttatttggttttttggaggattttcgaagttcgaggtcgttaatcgaaggaggtttcgttttcggagtatcgtttcgttttttttcgttagcgttcgtaggattcggatgagagcgtacgtttcggggttttcgggaagtcgcggcgttttcggatgtggcggatgcggtcgtgagtcggcgggggaggtgcgttagtgtttttcgagttcgttcgtagattttttatttcgtttcgcgttt

SEQ ID NO: 36976 - DNA, 747 bp, Artificial Sequence
  chemically treated genomic DNA (Homo sapiens) CpG-island No: 36976
aaacgcgaaacgaaataaaaaatctacgaacgaactcgaaaaacactaacgcacctcccccgccgactcacgaccgcatccgccacatccgaaaacgccgcgacttcccgaaaaccccgaaacgtacgctctcatccgaatcctacgaacgctaacgaaaaaaaacgaaacgatactccgaaaacgaaacctccttcgattaacgacctcgaacttcgaaaatcctccaaaaaaccaaataaaacgtcccgtaatacccgcgcccgaccgctctaactacaacgtatctctaaaacgaaaaaacgacaataaaattcgctacgcgctattaaaaaccacctatcttttcgcttatatccctctttctaatatcgcgctcgaataccgacgaaccgctccaaacctcgacatatcgtacaactacgtaataacgacccaaaaacccaccgccgtaaacgactacgtaaccgataaaactaccgaaaccgaaaaccccgacgaataaaaaaattaaaaaaaaccgcgacctaaaaaaacccgccgccccgaaaacgaccgaacaaaaataaacccgacgaataaaaaacgctaacgaatcgaaaaacctcccccaacaccgcgacctcgaaaaaatcgtccctatacgcgcttttaaaaattaaaaaccgctctcgaaaaatccccctttcgtcctaaaaaaatcattcgacctcgaaaacaaaacgaaccccaataaaacaaaaaaat

SEQ ID NO: 36977 - DNA, 769 bp, Artificial Sequence
  chemically treated genomic DNA (Homo sapiens) CpG-island No: 36977
agggagacggaggtggagagttttagaaaattgttttgtacggcgggttaggttttcgcggggtttcgtaagattttcgcgtcgtttttcgcgttacggtaggcgttgttttagttcggtttttttagtcgcgttcggttttcgcgattcgtacggttcggatacgttcgtttttaggaaacgtcggacgtttgtgggggtaattacggatcgtaggatagagattcgcgggcggcgggttttttcggtggcgtcgtatttagagtagcgttcgcgtttttaggcggtgatgtcgtcgcggtcgaggattttttgtgttagtttcggtcgcgtagttcggggagggtgagagacggcgacgcgggtcggtaagcgggggcggggcggaggtaggacggggcggggttgaaggcggggttgaaggcggggttttagggaaggcgagagatagcgacgttggttggcgggcgtggggcgggacggagataggatagggcggggttagaggcggggtttcggggaggacgggaggagtcgtgagtaggtcggcggcgggcggggcggggtcgaaagtaggtgaggcggggttaagcgtttcgggtttttaagcggaggaagttttaggcgtttgtgttttgggtttgtagcggtggtcgcgcgttttcggaggagtcgagttggaggaggggatagtttgggagtgcgagagtttaaagacgttgttaggttggcgttaaaattttttggttatgggaagacgataattata

SEQ ID NO: 36978 - DNA, 769 bp, Artificial Sequence
  chemically treated genomic DNA (Homo sapiens) CpG-island No: 36978
tataattatcgtcttcccataaccaaaaaattttaacgccaacctaacaacgtctttaaactctcgcactcccaaactatcccctcctccaactcgactcctccgaaaacgcgcgaccaccgctacaaacccaaaacacaaacgcctaaaacttcctccgcttaaaaacccgaaacgcttaaccccgcctcacctactttcgaccccgccccgcccgccgccgacctactcacgactcctcccgtcctccccgaaaccccgcctctaaccccgccctatcctatctccgtcccgccccacgcccgccaaccaacgtcgctatctctcgccttccctaaaaccccgccttcaaccccgccttcaaccccgccccgtcctacctccgccccgcccccgcttaccgacccgcgtcgccgtctctcaccctccccgaactacgcgaccgaaactaacacaaaaaatcctcgaccgcgacgacatcaccgcctaaaaacgcgaacgctactctaaatacgacgccaccgaaaaaacccgccgcccgcgaatctctatcctacgatccgtaattacccccacaaacgtccgacgtttcctaaaaacgaacgtatccgaaccgtacgaatcgcgaaaaccgaacgcgactaaaaaaaccgaactaaaacaacgcctaccgtaacgcgaaaaacgacgcgaaaatcttacgaaaccccgcgaaaacctaacccgccgtacaaaacaattttctaaaactctccacctccgtctccct

SEQ ID NO: 36979 - DNA, 769 bp, Artificial Sequence
  chemically treated genomic DNA (Homo sapiens) CpG-island No: 36979
tatagttgtcgtttttttataattaaaaggttttaacgttagtttggtagcgtttttagattttcgtatttttaaattgtttttttttttagttcgattttttcgggagcgcgcggttatcgttgtaagtttagaatataaacgtttagagtttttttcgtttagaaattcggggcgtttggtttcgttttatttgttttcggtttcgtttcgttcgtcgtcggtttgtttacggtttttttcgtttttttcgaagtttcgtttttgatttcgttttgttttgttttcgtttcgttttacgttcgttagttagcgtcgttgtttttcgttttttttgaggtttcgtttttagtttcgtttttaatttcgtttcgttttgttttcgtttcgttttcgtttgtcggttcgcgtcgtcgttttttatttttttcgggttgcgcggtcggagttggtatagaggattttcggtcgcggcgatattatcgtttggggacgcgggcgttgttttggatacggcgttatcgagagaattcgtcgttcgcgggtttttgttttgcggttcgtggttgtttttataagcgttcggcgttttttgagggcgggcgtgttcgggtcgtgcgggtcgcggggatcgagcgcggttgaggagatcgagttggggtagcgtttgtcgtagcgcgggagacgacgcgggggttttgcggagtttcgcgggagtttggttcgtcgtgtagagtagttttttggaattttttattttcgttttttt

SEQ ID NO: 36980 - DNA, 769 bp, Artificial Sequence
  chemically treated genomic DNA (Homo sapiens) CpG-island No: 36980
aaaaaaacgaaaataaaaaattccaaaaaactactctacacgacgaaccaaactcccgcgaaactccgcaaaacccccgcgtcgtctcccgcgctacgacaaacgctaccccaactcgatctcctcaaccgcgctcgatccccgcgacccgcacgacccgaacacgcccgccctcaaaaaacgccgaacgcttataaaaacaaccacgaaccgcaaaacaaaaacccgcgaacgacgaattctctcgataacgccgtatccaaaacaacgcccgcgtccccaaacgataatatcgccgcgaccgaaaatcctctataccaactccgaccgcgcaacccgaaaaaaataaaaaacgacgacgcgaaccgacaaacgaaaacgaaacgaaaacaaaacgaaacgaaattaaaaacgaaactaaaaacgaaacctcaaaaaaaacgaaaaacaacgacgctaactaacgaacgtaaaacgaaacgaaaacaaaacaaaacgaaatcaaaaacgaaacttcgaaaaaaacgaaaaaaaccgtaaacaaaccgacgacgaacgaaacgaaaccgaaaacaaataaaacgaaaccaaacgccccgaatttctaaacgaaaaaaactctaaacgtttatattctaaacttacaacgataaccgcgcgctcccgaaaaaatcgaactaaaaaaaaaaacaatttaaaaatacgaaaatctaaaaacgctaccaaactaacgttaaaaccttttaattataaaaaaacgacaactata

SEQ ID NO: 36981 - DNA, 994 bp, Artificial Sequence
  chemically treated genomic DNA (Homo sapiens) CpG-island No: 36981
tgtcgtcggtttttatttaggtcgaggtggttcggttttatgtatcgcgacgtaacgcggggaggtagataaggtatagggcggcgtttataatttatgttaattcgttttatgtgttcgtcgaggcggtataaatcgtcgtgacgattagcggtttaatgatcgaagttaggttggtaagagtcgcgagcgatttttgaagttgtttttgatggtcgttatttatttgtttggatagtatggtttgtaacgcgggtatttcgatgtcgtcggaagcgagaagaattataatggggaaggttatttagtttcgcgtcgcgaacgttagtaagacgtagtttagcgcgtcggtcgttatgtcggcgataatggtttgtttttcgtcgaaacgtttggtggcgggattagtgacgaaggtttgagcgagggcgtgtaagatttcgaatatcgtaagcgataggtcgattatcgtcgcgttttagcgaaagcggttttcgtcgaaaatgatttagagcgttgtcggtatttgttttacgagttgtatgataaagaagatagttataagtgcggcgacgatagttatgtttcgcgtttatcggaaggagttgattgggttgaaggtttttaagggtatcggtcgacgtttttttttatgcgatttttgtattaggaagtagtttagtagtaggttgaggtcgttgagtatcgtcgtcgtaaggaatggtgtatgtaaggagatggcgtttaatagtttttcggttacggggtttgttattatatttacgtcgaaataagcgtttatgagttcgaagtggcgagttcgattttttttatcggtgatgtcggcgatataggcgttagtaatcgtatttgtggcgtcggtgatgtcggttacgatgcgttcggcgtagaggattttattgattgtttttagttagtttcgttagaggagaattagtgaataattttgtttttattgttttatggagtggag

SEQ ID NO: 36982 - DNA, 994 bp, Artificial Sequence
  chemically treated genomic DNA (Homo sapiens) CpG-island No: 36982
ctccactccataaaacaataaaaacaaaattattcactaattctcctctaacgaaactaactaaaaacaatcaataaaatcctctacgccgaacgcatcgtaaccgacatcaccgacgccacaaatacgattactaacgcctatatcgccgacatcaccgataaaaaaaatcgaactcgccacttcgaactcataaacgcttatttcgacgtaaatataataacaaaccccgtaaccgaaaaactattaaacgccatctccttacatacaccattccttacgacgacgatactcaacgacctcaacctactactaaactacttcctaatacaaaaatcgcataaaaaaaaacgtcgaccgatacccttaaaaaccttcaacccaatcaactccttccgataaacgcgaaacataactatcgtcgccgcacttataactatcttctttatcatacaactcgtaaaacaaataccgacaacgctctaaatcattttcgacgaaaaccgctttcgctaaaacgcgacgataatcgacctatcgcttacgatattcgaaatcttacacgccctcgctcaaaccttcgtcactaatcccgccaccaaacgtttcgacgaaaaacaaaccattatcgccgacataacgaccgacgcgctaaactacgtcttactaacgttcgcgacgcgaaactaaataaccttccccattataattcttctcgcttccgacgacatcgaaatacccgcgttacaaaccatactatccaaacaaataaataacgaccatcaaaaacaacttcaaaaatcgctcgcgactcttaccaacctaacttcgatcattaaaccgctaatcgtcacgacgatttataccgcctcgacgaacacataaaacgaattaacataaattataaacgccgccctataccttatctacctccccgcgttacgtcgcgatacataaaaccgaaccacctcgacctaaataaaaaccgacgaca

SEQ ID NO: 36983 - DNA, 994 bp, Artificial Sequence
  chemically treated genomic DNA (Homo sapiens) CpG-island No: 36983
ttttattttatgagatagtagagataggattatttattaatttttttttggcggagttggttgaggataattagtaagattttttacgtcggacgtatcgtggtcggtattatcggcgttataggtgcggttgttggcgtttatatcgtcgatattatcgatggggaagatcgggttcgttatttcgggtttatgagcgtttgtttcggcgtgggtatggtggtaggtttcgtggtcgggggattgttgggcgttatttttttgtatgtattattttttgcggcggcggtgtttaacggttttaatttattattgggttgttttttaatgtaggagtcgtataagggagagcgtcgatcgatgtttttgagagtttttaatttagttagtttttttcggtgggcgcggggtatgattatcgtcgtcgtatttatgattgttttttttattatgtaattcgtaggataggtgtcggtagcgttttgggttattttcggcgaggatcgttttcgttggagcgcgacgatgatcggtttgtcgtttgcggtattcggaattttgtacgttttcgtttaagttttcgttattggtttcgttattaaacgtttcggcgagaagtaggttattatcgtcggtatggcggtcgacgcgttgggttacgttttgttggcgttcgcgacgcgaggttggatggttttttttattatgatttttttcgttttcggcggtatcgggatgttcgcgttgtaggttatgttgtttaggtaggtagatgacgattattagggatagttttaaggatcgttcgcggtttttattagtttaatttcgattattggatcgttgatcgttacggcgatttatgtcgtttcggcgagtatatggaacgggttggtatggattgtaggcgtcgttttatattttgtttgttttttcgcgttgcgtcgcggtgtatggagtcgggttatttcgatttgaatggaagtcggcggta

SEQ ID NO: 36984 - DNA, 994 bp, Artificial Sequence
  chemically treated genomic DNA (Homo sapiens) CpG-island No: 36984
taccgccgacttccattcaaatcgaaataacccgactccatacaccgcgacgcaacgcgaaaaaacaaacaaaatataaaacgacgcctacaatccataccaacccgttccatatactcgccgaaacgacataaatcgccgtaacgatcaacgatccaataatcgaaattaaactaataaaaaccgcgaacgatccttaaaactatccctaataatcgtcatctacctacctaaacaacataacctacaacgcgaacatcccgataccgccgaaaacgaaaaaaatcataataaaaaaaaccatccaacctcgcgtcgcgaacgccaacaaaacgtaacccaacgcgtcgaccgccataccgacgataataacctacttctcgccgaaacgtttaataacgaaaccaataacgaaaacttaaacgaaaacgtacaaaattccgaataccgcaaacgacaaaccgatcatcgtcgcgctccaacgaaaacgatcctcgccgaaaataacccaaaacgctaccgacacctatcctacgaattacataataaaaaaaacaatcataaatacgacgacgataatcataccccgcgcccaccgaaaaaaactaactaaattaaaaactctcaaaaacatcgatcgacgctctcccttatacgactcctacattaaaaaacaacccaataataaattaaaaccgttaaacaccgccgccgcaaaaaataatacatacaaaaaaataacgcccaacaatcccccgaccacgaaacctaccaccatacccacgccgaaacaaacgctcataaacccgaaataacgaacccgatcttccccatcgataatatcgacgatataaacgccaacaaccgcacctataacgccgataataccgaccacgatacgtccgacgtaaaaaatcttactaattatcctcaaccaactccgccaaaaaaaaattaataaataatcctatctctactatctcataaaataaaa

SEQ ID NO: 36985 - DNA, 689 bp, Artificial Sequence
  chemically treated genomic DNA (Homo sapiens) CpG-island No: 36985
tttgtcgtcgggttttcgagtttcgtcgcgttttcgatgtttagttttttggtcgttaggttttcgtcgtcgtcggggtcgtcgttaatgaggtcgggggtttcgaagatgtttagcgttttttcggcgtcgcggtgttgtcggtaggttatttagtagtagggttttacgtcggtttcgtcgatgttttagaaggttagttttttttcgaagagcggttcgtatacgtttgcggggtagtgtagtttgtcggtgcggtagtaattgagtatataggcgaagacgttcgggtgtcggtcgaagaagaattcgcggtcgttatcgggatggtcgttggttttgtcgtcgcgggaattgtagttgttcgcgtcgttttcgaagtagtcgtttggttcgggggatagcgggggcgttttcggcggcggcgatagtggaggcggcgacggttgtagtttgtcgttcgtcgtggttaagtagtcgtttgggggttcggaggaggtaagaagggttaggcgtgttttaggtagggttttgagggtgttgcggtaggtttcgtgtcggtgttttcgatattgaggattattttttcgttgttttcgattttgtttatttttgtgatttagatatgattagggggaggtaaatatagcgtcgagttaaagattttagtcgttaaagatatattatga

SEQ ID NO: 36986 - DNA, 689 bp, Artificial Sequence
  chemically treated genomic DNA (Homo sapiens) CpG-island No: 36986
tcataatatatctttaacgactaaaatctttaactcgacgctatatttacctccccctaatcatatctaaatcacaaaaataaacaaaatcgaaaacaacgaaaaaataatcctcaatatcgaaaacaccgacacgaaacctaccgcaacaccctcaaaaccctacctaaaacacgcctaacccttcttacctcctccgaacccccaaacgactacttaaccacgacgaacgacaaactacaaccgtcgccgcctccactatcgccgccgccgaaaacgcccccgctatcccccgaaccaaacgactacttcgaaaacgacgcgaacaactacaattcccgcgacgacaaaaccaacgaccatcccgataacgaccgcgaattcttcttcgaccgacacccgaacgtcttcgcctatatactcaattactaccgcaccgacaaactacactaccccgcaaacgtatacgaaccgctcttcgaaaaaaaactaaccttctaaaacatcgacgaaaccgacgtaaaaccctactactaaataacctaccgacaacaccgcgacgccgaaaaaacgctaaacatcttcgaaacccccgacctcattaacgacgaccccgacgacgacgaaaacctaacgaccaaaaaactaaacatcgaaaacgcgacgaaactcgaaaacccgacgacaaa

SEQ ID NO: 36987 - DNA, 689 bp, Artificial Sequence
  chemically treated genomic DNA (Homo sapiens) CpG-island No: 36987
ttatggtgtgtttttgacggttaagatttttaattcggcgttgtgtttgtttttttttagttatgtttgagttatagagatgggtaagatcgagaataacgagagggtgatttttaatgtcgggggtatcggtacgaaatttatcgtagtatttttaagattttgtttggaatacgtttggttttttttgtttttttcgagtttttaggcgattgtttgattacggcgggcgataagttgtagtcgtcgtcgtttttattgtcgtcgtcgtcgagagcgttttcgttgtttttcgggttaggcggttgtttcgagggcggcgcgggtaattgtagttttcgcggcggtagggttagcgattatttcggtggcggtcgcgagttttttttcgatcggtattcgggcgttttcgtttatgtgtttaattattatcgtatcggtaagttgtattgtttcgtagacgtgtgcgggtcgtttttcgaggaggagttggttttttggggtatcgacgagatcgacgtggagttttgttgttggatgatttatcggtagtatcgcgacgtcgaggaggcgttggatattttcgagattttcgattttattggcggcgatttcggcgacgacgaggatttggcggttaagaggttgggtatcgaggacgcggcggggttcgggggttcgacggtaaa

SEQ ID NO: 36988 - DNA, 689 bp, Artificial Sequence
  chemically treated genomic DNA (Homo sapiens) CpG-island No: 36988
tttaccgtcgaacccccgaaccccgccgcgtcctcgatacccaacctcttaaccgccaaatcctcgtcgtcgccgaaatcgccgccaataaaatcgaaaatctcgaaaatatccaacgcctcctcgacgtcgcgatactaccgataaatcatccaacaacaaaactccacgtcgatctcgtcgataccccaaaaaaccaactcctcctcgaaaaacgacccgcacacgtctacgaaacaatacaacttaccgatacgataataattaaacacataaacgaaaacgcccgaataccgatcgaaaaaaaactcgcgaccgccaccgaaataatcgctaaccctaccgccgcgaaaactacaattacccgcgccgccctcgaaacaaccgcctaacccgaaaaacaacgaaaacgctctcgacgacgacgacaataaaaacgacgacgactacaacttatcgcccgccgtaatcaaacaatcgcctaaaaactcgaaaaaaacaaaaaaaaccaaacgtattccaaacaaaatcttaaaaatactacgataaatttcgtaccgatacccccgacattaaaaatcaccctctcgttattctcgatcttacccatctctataactcaaacataactaaaaaaaaacaaacacaacgccgaattaaaaatcttaaccgtcaaaaacacaccataa

SEQ ID NO: 36989 - DNA, 608 bp, Artificial Sequence
  chemically treated genomic DNA (Homo sapiens) CpG-island No: 36989
aacgcgcgtttgttttttagggcggtggagacgtttttagttttcgtcgttagttcgcggggtagaaggggtgcgagcgattttggttaggttttagggacggggatcgggtttcgcggttttgatcggggagagtttaggaacgtacgtggtcggagcgttaggggttttagtatcgagatttatttcgtttgtttttggattttcgcgattttcgcgggttttttcgttcgtttcgtcggttatttgttaggggaaggagcgtagtgagcgcgtcgttaggaagcggcgttcgaaattttgtagttagagttttgttttcgcgtttttttcgggcgttatgacgtgggcggagtcgtagcgttgtttggagatttggaggaagtcgggtttggattgaagagggggcgggtcgagggtagtgcgcgggggtagagagggggcggggtttggggatacggttaggaggtgcgttttgggggcggattttagggcggggttaagatgagcgttaggagggcggggtttggggtgtggttaggatgaacgttatgagggcgaagtttggggtagggttaggataagcgacgttggggtaggttttgggg

SEQ ID NO: 36990 - DNA, 608 bp, Artificial Sequence
  chemically treated genomic DNA (Homo sapiens) CpG-island No: 36990
ccccaaaacctaccccaacgtcgcttatcctaaccctaccccaaacttcgccctcataacgttcatcctaaccacaccccaaaccccgccctcctaacgctcatcttaaccccgccctaaaatccgcccccaaaacgcacctcctaaccgtatccccaaaccccgccccctctctacccccgcgcactaccctcgacccgccccctcttcaatccaaacccgacttcctccaaatctccaaacaacgctacgactccgcccacgtcataacgcccgaaaaaaacgcgaaaacaaaactctaactacaaaatttcgaacgccgcttcctaacgacgcgctcactacgctccttcccctaacaaataaccgacgaaacgaacgaaaaaacccgcgaaaatcgcgaaaatccaaaaacaaacgaaataaatctcgatactaaaacccctaacgctccgaccacgtacgttcctaaactctccccgatcaaaaccgcgaaacccgatccccgtccctaaaacctaaccaaaatcgctcgcaccccttctaccccgcgaactaacgacgaaaactaaaaacgtctccaccgccctaaaaaacaaacgcgcgtt

SEQ ID NO: 36991 - DNA, 608 bp, Artificial Sequence
  chemically treated genomic DNA (Homo sapiens) CpG-island No: 36991
ttttaggatttgttttaacgtcgtttattttggttttattttaggtttcgtttttatgacgtttattttggttatattttaggtttcgtttttttaacgtttattttggtttcgttttagagttcgtttttaggacgtattttttgatcgtatttttaggtttcgttttttttttgttttcgcgtattgttttcggttcgttttttttttagtttaggttcggttttttttaggtttttaggtaacgttgcggtttcgtttacgttatggcgttcgaggagaacgcggggatagaattttggttgtagggtttcgagcgtcgttttttggcggcgcgtttattgcgtttttttttttggtaggtggtcggcggggcgagcggagaggttcgcgggggtcgcgggagtttaggggtagacgggatgggtttcggtgttgaaatttttggcgtttcggttacgtgcgtttttgggtttttttcggttagggtcgcgagattcggttttcgtttttggggtttggttagagtcgttcgtattttttttgtttcgcgagttggcggcggaagttgggggcgtttttatcgttttggggggtagacgcgcgtt

SEQ ID NO: 36992 - DNA, 608 bp, Artificial Sequence
  chemically treated genomic DNA (Homo sapiens) CpG-island No: 36992
aacgcgcgtctaccccccaaaacgataaaaacgcccccaacttccgccgccaactcgcgaaacaaaaaaaatacgaacgactctaaccaaaccccaaaaacgaaaaccgaatctcgcgaccctaaccgaaaaaaacccaaaaacgcacgtaaccgaaacgccaaaaatttcaacaccgaaacccatcccgtctacccctaaactcccgcgacccccgcgaacctctccgctcgccccgccgaccacctaccaaaaaaaaaaacgcaataaacgcgccgccaaaaaacgacgctcgaaaccctacaaccaaaattctatccccgcgttctcctcgaacgccataacgtaaacgaaaccgcaacgttacctaaaaacctaaaaaaaaccgaacctaaactaaaaaaaaaacgaaccgaaaacaatacgcgaaaacaaaaaaaaaacgaaacctaaaaatacgatcaaaaaatacgtcctaaaaacgaactctaaaacgaaaccaaaataaacgttaaaaaaacgaaacctaaaatataaccaaaataaacgtcataaaaacgaaacctaaaataaaaccaaaataaacgacgttaaaacaaatcctaaaa

SEQ ID NO: 36993 - DNA, 546 bp, Artificial Sequence
  chemically treated genomic DNA (Homo sapiens) CpG-island No: 36993
acgtgtgtgtggatttttcgcggtgttcgtgtgtggatttttcgcggtgttcgtgtgtggatttttcgcggtgtttgtgtgtgtgtggattttatagtttttatgtgtgtgtggatttttcgcggtgttcgtgtgtggatttttcgcggtgttcgtgtgtgtgtggattttatagtttttatgtgtgtgtggatttttcgcggtgttcgtgtgtggatttcgcggtgttcgtgtgtgtgtggattttatagtttttatgtgtgtgtggattttttacggtgttcgtgtgtggatttcgcggtgttcgtgtgtgtgtggattttatagtttttatgtgtgtgtggatttttcgcggtgttcgtgtgtggatttcgcggtgttcgtgtgtgtgtggattttatagtttttatgtgtgtgtggatttttcgcggtgttcgtgtgtggattttgcggtgttcgtgtgtgtgtggattttatagtttttatgtgtgtgtggatttttcgcggtgtttgtgtgtgtgtggattttatagtttttatgtgtgt

SEQ ID NO: 36994 - DNA, 546 bp, Artificial Sequence
  chemically treated genomic DNA (Homo sapiens) CpG-island No: 36994
acacacataaaaactataaaatccacacacacacaaacaccgcgaaaaatccacacacacataaaaactataaaatccacacacacacgaacaccgcaaaatccacacacgaacaccgcgaaaaatccacacacacataaaaactataaaatccacacacacacgaacaccgcgaaatccacacacgaacaccgcgaaaaatccacacacacataaaaactataaaatccacacacacacgaacaccgcgaaatccacacacgaacaccgtaaaaaatccacacacacataaaaactataaaatccacacacacacgaacaccgcgaaatccacacacgaacaccgcgaaaaatccacacacacataaaaactataaaatccacacacacacgaacaccgcgaaaaatccacacacgaacaccgcgaaaaatccacacacacataaaaactataaaatccacacacacacaaacaccgcgaaaaatccacacacgaacaccgcgaaaaatccacacacgaacaccgcgaaaaatccacacacacgt

SEQ ID NO: 36995 - DNA, 546 bp, Artificial Sequence
  chemically treated genomic DNA (Homo sapiens) CpG-island No: 36995
atatatatagaaattgtgaagtttatatatatatagatatcgcggagagtttatatatatatagaaattgtgaagtttatatatatacggatatcgtagagtttatatacggatatcgcggagagtttatatatatatagaaattgtgaagtttatatatatacggatatcgcggagtttatatacggatatcgcggagagtttatatatatatagaaattgtgaagtttatatatatacggatatcgcggagtttatatacggatatcgtggagagtttatatatatatagaaattgtgaagtttatatatatacggatatcgcggagtttatatacggatatcgcggagagtttatatatatatagaaattgtgaagtttatatatatacggatatcgcggagagtttatatacggatatcgcggagagtttatatatatatagaaattgtgaagtttatatatatatagatatcgcggagagtttatatacggatatcgcggagagtttatatacggatatcgcggagagtttatatatacgt

SEQ ID NO: 36996 - DNA, 546 bp, Artificial Sequence
  chemically treated genomic DNA (Homo sapiens) CpG-island No: 36996
acgtatatataaactctccgcgatatccgtatataaactctccgcgatatccgtatataaactctccgcgatatctatatatatataaacttcacaatttctatatatatataaactctccgcgatatccgtatataaactctccgcgatatccgtatatatataaacttcacaatttctatatatatataaactctccgcgatatccgtatataaactccgcgatatccgtatatatataaacttcacaatttctatatatatataaactctccacgatatccgtatataaactccgcgatatccgtatatatataaacttcacaatttctatatatatataaactctccgcgatatccgtatataaactccgcgatatccgtatatatataaacttcacaatttctatatatatataaactctccgcgatatccgtatataaactctacgatatccgtatatatataaacttcacaatttctatatatatataaactctccgcgatatctatatatatataaacttcacaatttctatatatat

SEQ ID NO: 36997 - DNA, 546 bp, Artificial Sequence
  chemically treated genomic DNA (Homo sapiens) CpG-island No: 36997
tcgggcggtaggcgttttagaataggttcgggcggtaggcgttagtagtgtgtttagaataggggcgggtagcgggcgtttagtagtgtgtttagaataggggcgggcggcgggcgtttagtagtgtgtttagaagaggggcgggcggcgggcgtttagtagtgtgtttagaagaggggcgggcggcgggcgtttagtagtgtgtttagaagaggggcgggcggcgggcgtttagtagtgtgtttagaagaggggcgggcggcgggcgtttagtagtgtgtttagaataggggcgggcggcgggcgtttagtagtgtgtttagaataggggcgggcggcgggcgtttagtagtgtgtttagaagaggggcgggcggcgggcgtttagtagtgtgtttagaagaggggcgcgcgggcgtttagtagtgtgtttagaataggggcgggcggcgggcgtttagtagtgtgtttagaataggggcgggcggcgggcgtttagtagtgtgttaaataattaggggtataaataggtgtagagaggaaatgt

SEQ ID NO: 36998 - DNA, 546 bp, Artificial Sequence
  chemically treated genomic DNA (Homo sapiens) CpG-island No: 36998
acatttcctctctacacctatttatacccctaattatttaacacactactaaacgcccgccgcccgcccctattctaaacacactactaaacgcccgccgcccgcccctattctaaacacactactaaacgcccgcgcgcccctcttctaaacacactactaaacgcccgccgcccgcccctcttctaaacacactactaaacgcccgccgcccgcccctattctaaacacactactaaacgcccgccgcccgcccctattctaaacacactactaaacgcccgccgcccgcccctcttctaaacacactactaaacgcccgccgcccgcccctcttctaaacacactactaaacgcccgccgcccgcccctcttctaaacacactactaaacgcccgccgcccgcccctcttctaaacacactactaaacgcccgccgcccgcccctattctaaacacactactaaacgcccgctacccgcccctattctaaacacactactaacgcctaccgcccgaacctattctaaaacgcctaccgcccga

SEQ ID NO: 36999 - DNA, 546 bp, Artificial Sequence
  chemically treated genomic DNA (Homo sapiens) CpG-island No: 36999
gtattttttttttgtatttgtttatgtttttggttatttgatatattgttgagcgttcgtcgttcgtttttgttttagatatattgttgggcgttcgtcgttcgtttttgttttagatatattgttgggcgttcgcgcgttttttttttagatatattgttgggcgttcgtcgttcgttttttttttagatatattgttgggcgttcgtcgttcgtttttgttttagatatattgttgggcgttcgtcgttcgtttttgttttagatatattgttgggcgttcgtcgttcgttttttttttagatatattgttgggcgttcgtcgttcgttttttttttagatatattgttgggcgttcgtcgttcgttttttttttagatatattgttgggcgttcgtcgttcgttttttttttagatatattgttgggcgttcgtcgttcgtttttgttttagatatattgttgggcgttcgttgttcgtttttgttttagatatattgttggcgtttgtcgttcgaatttgttttagagcgtttgtcgttcga

SEQ ID NO: 37000 - DNA, 546 bp, Artificial Sequence
  chemically treated genomic DNA (Homo sapiens) CpG-island No: 37000
tcgaacgacaaacgctctaaaacaaattcgaacgacaaacgccaacaatatatctaaaacaaaaacgaacaacgaacgcccaacaatatatctaaaacaaaaacgaacgacgaacgcccaacaatatatctaaaaaaaaaacgaacgacgaacgcccaacaatatatctaaaaaaaaaacgaacgacgaacgcccaacaatatatctaaaaaaaaaacgaacgacgaacgcccaacaatatatctaaaaaaaaaacgaacgacgaacgcccaacaatatatctaaaacaaaaacgaacgacgaacgcccaacaatatatctaaaacaaaaacgaacgacgaacgcccaacaatatatctaaaaaaaaaacgaacgacgaacgcccaacaatatatctaaaaaaaaaacgcgcgaacgcccaacaatatatctaaaacaaaaacgaacgacgaacgcccaacaatatatctaaaacaaaaacgaacgacgaacgctcaacaatatatcaaataaccaaaaacataaacaaatacaaaaaaaaaatac

SEQ ID NO: 37001 - DNA, 1730 bp, Artificial Sequence
  chemically treated genomic DNA (Homo sapiens) CpG-island No: 37001
gagtagtacgttaggttcgtttcggtttttttttttttcgttatttaaatattcggttaattttcgttttggtttttatggttatcgcgtttcgaggcgttttcgcgggggttggcgaatcgggtagtttcgcgaaggaggggggcgcgcgatcggggcgtttggttttatttttagcgcgtttttcgagagtcggcggtttcggagggtgtatagtcgggaagcgatatacggtcgaggggtgtcgggatcgggtcgttttcgttttagagcgcgcgatgatttataaatgtagtagttgaagtttgagttagttcgagcggcgggtacgcgcgacgcgttttcgttatgtcggggagggggcgaggtcgggtcggggagcgcgcggggagggggcggtcggcgttcgggttcgcgttcgttcgtcgttcgtttaaattgcgttatacgtcgcggcggggttacgcggcggtcgtcgttattttgtgcggtcgttattttttggttcgtcgcgttcgcgatttatcgttttcgttaaataaagatataaatttaacgttgttcgttcgggattgggatgaagtgaggcgcgatataaattcgagttcgagttcgaggaggcggaggcgaagcgtagcgaggagcggtcgggttaggtgtcgtcgtcgagtagcggggaggggttgttttagcgacgttcgcggtttatattcgttagcgtcggagttgggcgatttggcgcggagagacggcgtcgtgagtcgtgggcggtcggggagtgtatttttttcgttagttagcggttcgaggggtcgagggggcgggaagtatcgggtagggggtcgtttttttatcgaatttatttttggaatgttttcgttttgattgaataacgtcgtcgtcgcgtttaagttattttcggttttagcgttcgtttttcgcgttaggttttattgtttattggttggaggtttgttatagttcgttcgttattggttcgtttgcgacgttaatcgtattttttcgcgttttttttgttttttgaggtttaattcgcggtttcggttcgtttttagtttcggtttcgttttttttttttttttttttttcgttttttttagaggttttcgcggcgtagtttttgggtttcgcgagattcggagtggttttggtggcggggtcggggtatcgggggtcgttttttgtcggtttgggttttgagggggagatggtggttggttttttttttcgtcgggtttgggataggtcgcggcgttatggcgattttcgggacgtaggagttatcgttttcgaaattgttttcgaggtcgtgtttttgcggttgttattttcggggagaggaattcgatcgcgtttttttcgtagcgggcgtttatttttttttttcgttttttcgggacgttcgatttcgggtttcgaggaatgagttgtttttttattttaagttttaggtttgggttttttattttagggacgttttttgtttcggattcggggtggattggtcgttggcggaacgagttcgtgattcgttagtgatcgtttagggcggtcgcgaggtcgcgtcgtttcggtgtcggttcgtaatttagtttgcgcgtttagtttagcgcgtcgtttttcgttttcggaagaggaggtttttaattggtttggaattttggggttttttgaaggcgtttcgtggtgggtttttattttttggtgaa

SEQ ID NO: 37002 - DNA, 1730 bp, Artificial Sequence
  chemically treated genomic DNA (Homo sapiens) CpG-island No: 37002
ttcaccaaaaaataaaaacccaccacgaaacgccttcaaaaaaccccaaaattccaaaccaattaaaaacctcctcttccgaaaacgaaaaacgacgcgctaaactaaacgcgcaaactaaattacgaaccgacaccgaaacgacgcgacctcgcgaccgccctaaacgatcactaacgaatcacgaactcgttccgccaacgaccaatccaccccgaatccgaaacaaaaaacgtccctaaaataaaaaacccaaacctaaaacttaaaataaaaaaacaactcattcctcgaaacccgaaatcgaacgtcccgaaaaaacgaaaaaaaaaaataaacgcccgctacgaaaaaaacgcgatcgaattcctctccccgaaaataacaaccgcaaaaacacgacctcgaaaacaatttcgaaaacgataactcctacgtcccgaaaatcgccataacgccgcgacctatcccaaacccgacgaaaaaaaaaaccaaccaccatctccccctcaaaacccaaaccgacaaaaaacgacccccgataccccgaccccgccaccaaaaccactccgaatctcgcgaaacccaaaaactacgccgcgaaaacctctaaaaaaaacgaaaaaaaaaaaaaaaaaaaaaacgaaaccgaaactaaaaacgaaccgaaaccgcgaattaaacctcaaaaaacaaaaaaaacgcgaaaaaatacgattaacgtcgcaaacgaaccaataacgaacgaactataacaaacctccaaccaataaacaataaaacctaacgcgaaaaacgaacgctaaaaccgaaaataacttaaacgcgacgacgacgttattcaatcaaaacgaaaacattccaaaaataaattcgataaaaaaacgaccccctacccgatacttcccgccccctcgacccctcgaaccgctaactaacgaaaaaaatacactccccgaccgcccacgactcacgacgccgtctctccgcgccaaatcgcccaactccgacgctaacgaatataaaccgcgaacgtcgctaaaacaacccctccccgctactcgacgacgacacctaacccgaccgctcctcgctacgcttcgcctccgcctcctcgaactcgaactcgaatttatatcgcgcctcacttcatcccaatcccgaacgaacaacgttaaatttatatctttatttaacgaaaacgataaatcgcgaacgcgacgaaccaaaaaataacgaccgcacaaaataacgacgaccgccgcgtaaccccgccgcgacgtataacgcaatttaaacgaacgacgaacgaacgcgaacccgaacgccgaccgccccctccccgcgcgctccccgacccgacctcgccccctccccgacataacgaaaacgcgtcgcgcgtacccgccgctcgaactaactcaaacttcaactactacatttataaatcatcgcgcgctctaaaacgaaaacgacccgatcccgacacccctcgaccgtatatcgcttcccgactatacaccctccgaaaccgccgactctcgaaaaacgcgctaaaaataaaaccaaacgccccgatcgcgcgcccccctccttcgcgaaactacccgattcgccaacccccgcgaaaacgcctcgaaacgcgataaccataaaaaccaaaacgaaaattaaccgaatatttaaataacgaaaaaaaaaaaaaccgaaacgaacctaacgtactactc

SEQ ID NO: 37003 - DNA, 1730 bp, Artificial Sequence
  chemically treated genomic DNA (Homo sapiens) CpG-island No: 37003
tttattagaaggtgggaatttattacgaagcgtttttaggaggttttaggattttaaattaattaagggttttttttttcgaaaacgggaggcgacgcgttgagttaagcgcgtaggttgggttgcgggtcgatatcgaggcggcgcggtttcgcgatcgttttgggcggttattggcgagttacggattcgtttcgttagcggttaatttatttcgagttcgaaatagaagacgtttttgggatgaaagatttaggtttggggtttaaggtggaaaaataatttatttttcgaggttcggagtcgggcgtttcgggagaacgggaaagggagatgagcgttcgttgcggggagaacgcggtcgggttttttttttcgaaggtggtagtcgtaaaaatacggtttcgaaagtagtttcgaggacgatggtttttgcgtttcgggagtcgttatgacgtcgcggtttgttttagattcggcgagggaggggattaattattattttttttttaaggtttaaatcgataaagaacggttttcggtatttcggtttcgttattagggttatttcgggtttcgcgagatttaagggttgcgtcgcgaagatttttgggaaaggcggggggaggggagaggaaggaagcgagatcggggttggaggcgggtcgaggtcgcgagttgagttttaggaagtagaaggggcgcggaaagatgcgattgacgtcgtaagcgaattaatgacgagcgagttgtggtaggtttttagttaatgggtagtgaggtttgacgcggggggcggacgttggggtcgagggtagtttgagcgcggcggcggcgttgtttagttagagcgagaatattttagaggtgagttcggtgaaggggcggttttttgttcggtgtttttcgttttttcgatttttcgggtcgttggttggcggggaaggtgtatttttcgatcgtttacggtttacggcgtcgttttttcgcgttaggtcgtttagtttcggcgttgacgggtgtggatcgcggacgtcgttgggatagttttttttcgttgttcggcggcggtatttggttcggtcgtttttcgttgcgtttcgttttcgttttttcggattcggattcgggtttatatcgcgttttattttattttagtttcgggcgagtagcgttgggtttatgtttttatttgacgaaaacggtgagtcgcgggcgcggcgggttaggagatggcggtcgtataagatggcggcggtcgtcgcgtgatttcgtcgcggcgtgtggcgtagtttgggcggacggcgggcgggcgcgggttcgggcgtcggtcgtttttttttcgcgcgtttttcggttcggtttcgtttttttttcggtatggcgggagcgcgtcgcgcgtgttcgtcgttcgggttgatttaggttttagttgttgtatttgtgagttatcgcgcgttttggggcgggggcggttcgatttcggtatttttcggtcgtgtgtcgtttttcggttgtgtatttttcggggtcgtcggttttcgggggacgcgttggggatggggttagacgtttcggtcgcgcgtttttttttttcgcggagttgttcggttcgttagttttcgcggaaacgtttcggagcgcggtagttatggggattagggcgaaggttaatcgagtatttgaatagcgaggaaaagggaggtcggggcgagtttggcgtattgttt

SEQ ID NO: 37004 - DNA, 1730 bp, Artificial Sequence
  chemically treated genomic DNA (Homo sapiens) CpG-island No: 37004
aaacaatacgccaaactcgccccgacctcccttttcctcgctattcaaatactcgattaaccttcgccctaatccccataactaccgcgctccgaaacgtttccgcgaaaactaacgaaccgaacaactccgcgaaaaaaaaaaacgcgcgaccgaaacgtctaaccccatccccaacgcgtcccccgaaaaccgacgaccccgaaaaatacacaaccgaaaaacgacacacgaccgaaaaataccgaaatcgaaccgcccccgccccaaaacgcgcgataactcacaaatacaacaactaaaacctaaatcaacccgaacgacgaacacgcgcgacgcgctcccgccataccgaaaaaaaaacgaaaccgaaccgaaaaacgcgcgaaaaaaaaacgaccgacgcccgaacccgcgcccgcccgccgtccgcccaaactacgccacacgccgcgacgaaatcacgcgacgaccgccgccatcttatacgaccgccatctcctaacccgccgcgcccgcgactcaccgttttcgtcaaataaaaacataaacccaacgctactcgcccgaaactaaaataaaataaaacgcgatataaacccgaatccgaatccgaaaaaacgaaaacgaaacgcaacgaaaaacgaccgaaccaaataccgccgccgaacaacgaaaaaaaactatcccaacgacgtccgcgatccacacccgtcaacgccgaaactaaacgacctaacgcgaaaaaacgacgccgtaaaccgtaaacgatcgaaaaatacaccttccccgccaaccaacgacccgaaaaatcgaaaaaacgaaaaacaccgaacaaaaaaccgccccttcaccgaactcacctctaaaatattctcgctctaactaaacaacgccgccgccgcgctcaaactaccctcgaccccaacgtccgccccccgcgtcaaacctcactacccattaactaaaaacctaccacaactcgctcgtcattaattcgcttacgacgtcaatcgcatctttccgcgccccttctacttcctaaaactcaactcgcgacctcgacccgcctccaaccccgatctcgcttccttcctctcccctccccccgcctttcccaaaaatcttcgcgacgcaacccttaaatctcgcgaaacccgaaataaccctaataacgaaaccgaaataccgaaaaccgttctttatcgatttaaaccttaaaaaaaaaataataattaatcccctccctcgccgaatctaaaacaaaccgcgacgtcataacgactcccgaaacgcaaaaaccatcgtcctcgaaactactttcgaaaccgtatttttacgactaccaccttcgaaaaaaaaaacccgaccgcgttctccccgcaacgaacgctcatctccctttcccgttctcccgaaacgcccgactccgaacctcgaaaaataaattatttttccaccttaaaccccaaacctaaatctttcatcccaaaaacgtcttctatttcgaactcgaaataaattaaccgctaacgaaacgaatccgtaactcgccaataaccgcccaaaacgatcgcgaaaccgcgccgcctcgatatcgacccgcaacccaacctacgcgcttaactcaacgcgtcgcctcccgttttcgaaaaaaaaaacccttaattaatttaaaatcctaaaacctcctaaaaacgcttcgtaataaattcccaccttctaataaa

SEQ ID NO: 37005 - DNA, 796 bp, Artificial Sequence
  chemically treated genomic DNA (Homo sapiens) CpG-island No: 37005
gagtcgcgttcgcgtaaagttgcgcgttcgcgcgcggatcgtttttcgttcggttcgtgggatgcggtcgtttttttagttttttttttcgtttttttcgttttcgtttttttttttttttttttcgattcgttttaggttagattttcgcgcgggttttcgtttttttaggatttttttttttttttttttttttttcgtcgcgtttcggattttgcgggttggtttcgcgtttcgttagggttgtcggggtgtgttgttggggagcgtggagtgggtaggattacgttggatacgtagttcgcgtgcggtcgtttttcgagtagtgcgcggcgtgggcggaggagcggtttcgcgaggagatcgaggcgaacgcggcgttcgcgttgttggaggtcgtggacgcggcgggcgtcgagtatttggttacgttttaggatttggatattcgttacggcgacggtttcgcggtgttttcgggcgtgtgtagcgaggtttcgtttcgggtcgtgaggtcgtcgagtaagcgtttgcgtcggtcgtgggaattcggggtcgtttcgcgggtgttggtgggtatttaggtcgattcggacgacgggcgttaggtgttgacggcgcggggtcgcgaggggcgtttttcgttttcggaggttatggttaagagttagcggatggtggatcgggtgtttatgtaggcggtgcgcgagacggaggttttggtttcgttcgaggaggaggtggagtgttgggaagttttttgttgttttttggattttatttagaaaaagatggt

SEQ ID NO: 37006 - DNA, 796 bp, Artificial Sequence
  chemically treated genomic DNA (Homo sapiens) CpG-island No: 37006
accatctttttctaaataaaatccaaaaaacaacaaaaaacttcccaacactccacctcctcctcgaacgaaaccaaaacctccgtctcgcgcaccgcctacataaacacccgatccaccatccgctaactcttaaccataacctccgaaaacgaaaaacgcccctcgcgaccccgcgccgtcaacacctaacgcccgtcgtccgaatcgacctaaatacccaccaacacccgcgaaacgaccccgaattcccacgaccgacgcaaacgcttactcgacgacctcacgacccgaaacgaaacctcgctacacacgcccgaaaacaccgcgaaaccgtcgccgtaacgaatatccaaatcctaaaacgtaaccaaatactcgacgcccgccgcgtccacgacctccaacaacgcgaacgccgcgttcgcctcgatctcctcgcgaaaccgctcctccgcccacgccgcgcactactcgaaaaacgaccgcacgcgaactacgtatccaacgtaatcctacccactccacgctccccaacaacacaccccgacaaccctaacgaaacgcgaaaccaacccgcaaaatccgaaacgcgacgaaaaaaaaaaaaaaaaaaaaaaaaatcctaaaaaaacgaaaacccgcgcgaaaatctaacctaaaacgaatcgaaaaaaaaaaaaaaaaaaacgaaaacgaaaaaaacgaaaaaaaaaactaaaaaaacgaccgcatcccacgaaccgaacgaaaaacgatccgcgcgcgaacgcgcaactttacgcgaacgcgactc

SEQ ID NO: 37007 - DNA, 796 bp, Artificial Sequence
  chemically treated genomic DNA (Homo sapiens) CpG-island No: 37007
gttatttttttttggatggagtttaggggataatagaaaattttttaatattttatttttttttcgggcgggattaaggttttcgtttcgcgtatcgtttgtatgaatattcggtttattattcgttggtttttggttatgattttcgggaacggggagcgtttttcgcggtttcgcgtcgttagtatttggcgttcgtcgttcgggtcggtttgggtgtttattagtattcgcgggacggtttcgggtttttacggtcggcgtaggcgtttgttcggcggttttacggttcggaacgaggtttcgttgtatacgttcgggagtatcgcggagtcgtcgtcgtggcggatgtttaggttttggagcgtgattaggtgttcggcgttcgtcgcgtttacgatttttagtaacgcgggcgtcgcgttcgtttcgattttttcgcggagtcgttttttcgtttacgtcgcgtattgttcggggagcggtcgtacgcgaattgcgtgtttagcgtggttttgtttattttacgttttttagtagtatatttcggtagttttggcggggcgcgggattagttcgtagggttcgggacgcggcggggaggggaggggagggaggaagggttttgggagggcgaggattcgcgcgggggtttggtttggggcgggtcgggaggggaggggaggaaaacgggggcggggagggcggaggaaggggttgggagggcgatcgtattttacgagtcgggcgaggagcggttcgcgcgcgagcgcgtagttttgcgcgagcgcggttt

SEQ ID NO: 37008 - DNA, 796 bp, Artificial Sequence
  chemically treated genomic DNA (Homo sapiens) CpG-island No: 37008
aaaccgcgctcgcgcaaaactacgcgctcgcgcgcgaaccgctcctcgcccgactcgtaaaatacgatcgccctcccaaccccttcctccgccctccccgcccccgttttcctcccctcccctcccgacccgccccaaaccaaacccccgcgcgaatcctcgccctcccaaaacccttcctccctcccctcccctccccgccgcgtcccgaaccctacgaactaatcccgcgccccgccaaaactaccgaaatatactactaaaaaacgtaaaataaacaaaaccacgctaaacacgcaattcgcgtacgaccgctccccgaacaatacgcgacgtaaacgaaaaaacgactccgcgaaaaaatcgaaacgaacgcgacgcccgcgttactaaaaatcgtaaacgcgacgaacgccgaacacctaatcacgctccaaaacctaaacatccgccacgacgacgactccgcgatactcccgaacgtatacaacgaaacctcgttccgaaccgtaaaaccgccgaacaaacgcctacgccgaccgtaaaaacccgaaaccgtcccgcgaatactaataaacacccaaaccgacccgaacgacgaacgccaaatactaacgacgcgaaaccgcgaaaaacgctccccgttcccgaaaatcataaccaaaaaccaacgaataataaaccgaatattcatacaaacgatacgcgaaacgaaaaccttaatcccgcccgaaaaaaaaataaaatattaaaaaattttctattatcccctaaactccatccaaaaaaaaataac

SEQ ID NO: 37009 - DNA, 743 bp, Artificial Sequence
  chemically treated genomic DNA (Homo sapiens) CpG-island No: 37009
tttttttttttttttgttttttatttttttttttttttttttttgtcgaagtttcgacgcgtttttggttttagttttttttttattttttttttttgtttttttttttttttcgcgcgttcggaattgcggttgtttcgcgttcgttaggttgtcgggtgtgttgttggggagcgtgacgtggtaggattacgttggatacgtagttcgcgtgcggtcgtttttcgagtagtgcgcggcgtgggcggaggagcggtttcgcgaggagatcgaggtaaacgcggcgttcgcgttgttggaaatcgtggacgcggcggacgtcgagtatttggttacgttttaggatttgggatattcgttacggcgacgcgttcgcggtgtttcggggcgtgtgtagcgaggtttcgttttcggtcgtgagggtttgcgcgagcgtttgcgcgggttgtgggaattcggggtcgttttgttggtgttggtgggtatttaggtcgatcgggatttcgagcgttaggtgttgatggcgcgggttcgcgaggggttttgttcgttttcgggggttacggttaagatttagcggaggatggattaggtgtttacgttggcggtgcgcgagacggaggttttgatttcgttcgaggtgttttttcgttaatgtttagtatacgaggttgtcggaaaggtttattggttaatttgttatagttggtttttaatacgtttatttttttttttgattttta

SEQ ID NO: 37010 - DNA, 743 bp, Artificial Sequence
  chemically treated genomic DNA (Homo sapiens) CpG-island No: 37010
taaaaatcaaaaaaaaaaataaacgtattaaaaaccaactataacaaattaaccaataaacctttccgacaacctcgtatactaaacattaacgaaaaaacacctcgaacgaaatcaaaacctccgtctcgcgcaccgccaacgtaaacacctaatccatcctccgctaaatcttaaccgtaacccccgaaaacgaacaaaacccctcgcgaacccgcgccatcaacacctaacgctcgaaatcccgatcgacctaaatacccaccaacaccaacaaaacgaccccgaattcccacaacccgcgcaaacgctcgcgcaaaccctcacgaccgaaaacgaaacctcgctacacacgccccgaaacaccgcgaacgcgtcgccgtaacgaatatcccaaatcctaaaacgtaaccaaatactcgacgtccgccgcgtccacgatttccaacaacgcgaacgccgcgtttacctcgatctcctcgcgaaaccgctcctccgcccacgccgcgcactactcgaaaaacgaccgcacgcgaactacgtatccaacgtaatcctaccacgtcacgctccccaacaacacacccgacaacctaacgaacgcgaaacaaccgcaattccgaacgcgcgaaaaaaaaaaaaaaacaaaaaaaaaaaataaaaaaaaaactaaaaccaaaaacgcgtcgaaacttcgacaaaaaaaaaaaaaaaaaaaaataaaaaacaaaaaaaaaaaaaaa

SEQ ID NO: 37011 - DNA, 743 bp, Artificial Sequence
  chemically treated genomic DNA (Homo sapiens) CpG-island No: 37011
tggaaattaggaaaagggatggacgtattgaaaattaattgtggtaaattagttaatgaattttttcgatagtttcgtgtgttgggtattggcggggaggtatttcgggcgggattagggttttcgtttcgcgtatcgttagcgtgaatatttggtttatttttcgttggattttggtcgtgattttcgggaacgggtagggtttttcgcgggttcgcgttattagtatttggcgttcggagtttcggtcggtttgggtgtttattagtattagtaggacggtttcgggtttttatagttcgcgtaggcgttcgcgtaggtttttacggtcgggaacgaggtttcgttgtatacgtttcggagtatcgcgaacgcgtcgtcgtggcggatgttttaggttttggagcgtgattaggtgttcggcgttcgtcgcgtttacgatttttagtagcgcgggcgtcgcgtttgtttcgattttttcgcggagtcgttttttcgtttacgtcgcgtattgttcggggagcggtcgtacgcgaattgcgtgtttagcgtggttttgttacgttacgttttttagtagtatattcggtagtttggcgggcgcgggatagtcgtagtttcggacgcgcgggagggagagaggagtagggagggaagatgagggaggggttgggattagggacgcgtcgggatttcggtagggaggagggaagaggagggtgggaggtaaagaaaaagagagg

SEQ ID NO: 37012 - DNA, 743 bp, Artificial Sequence
  chemically treated genomic DNA (Homo sapiens) CpG-island No: 37012
cctctctttttctttacctcccaccctcctcttccctcctccctaccgaaatcccgacgcgtccctaatcccaacccctccctcatcttccctccctactcctctctccctcccgcgcgtccgaaactacgactatcccgcgcccgccaaactaccgaatatactactaaaaaacgtaacgtaacaaaaccacgctaaacacgcaattcgcgtacgaccgctccccgaacaatacgcgacgtaaacgaaaaaacgactccgcgaaaaaatcgaaacaaacgcgacgcccgcgctactaaaaatcgtaaacgcgacgaacgccgaacacctaatcacgctccaaaacctaaaacatccgccacgacgacgcgttcgcgatactccgaaacgtatacaacgaaacctcgttcccgaccgtaaaaacctacgcgaacgcctacgcgaactataaaaacccgaaaccgtcctactaatactaataaacacccaaaccgaccgaaactccgaacgccaaatactaataacgcgaacccgcgaaaaaccctacccgttcccgaaaatcacgaccaaaatccaacgaaaaataaaccaaatattcacgctaacgatacgcgaaacgaaaaccctaatcccgcccgaaatacctccccgccaatacccaacacacgaaactatcgaaaaaattcattaactaatttaccacaattaattttcaatacgtccatcccttttcctaatttcca

SEQ ID NO: 37013 - DNA, 746 bp, Artificial Sequence
  chemically treated genomic DNA (Homo sapiens) CpG-island No: 37013
aatttcgcgttcggtatcgtttttttttttttcgcgtattgttgatttttcgttttgttttcgtagtgttggagattttgagtttgatttagtagcgcgaattagcgcgtgcggacgagtatattttggagttagaggtcgaggagttggcgtcgtcgaggggcggcgcgtttgggttttttaaggtcgagggcgttggcgggggtcgtcgggcgcgggacgtggcgttgttgtacgaggttttgtagcgcgagttgtgggcgttggtgcgcgagacgttggcgggtttcgggtcgggagcgtgcgtcggggcgggcgcggtggcgtagttgggttaggtgttggtataggaggaggcggtcgacgggcgtcggggtttcggggcggttcgtaaattacgcgtacgttgggtcgaagtcgtggcgcgcgcggttcgggagcgtttagaggtagcggttttcggggcgttcgggggtttggtcgggtagttggaggcgttgcgggcgcggttgttggaggatatggtcgtggtgcggggtcgtttggcgttcgtttatttcgtcggtttgggcgttttcggcgtttatttgcgcggttattacggggttttggtcgagtggttgggggttttcgttcgtcgtaggttgtcgttggtcgatcgttacgcgttgttgtattggtataattaggtttattttaggtaagttggatttagttgtttaaggttacgtgaaatttttagtttt

SEQ ID NO: 37014 - DNA, 746 bp, Artificial Sequence
  chemically treated genomic DNA (Homo sapiens) CpG-island No: 37014
aaaactaaaaatttcacgtaaccttaaacaactaaatccaacttacctaaaataaacctaattataccaatacaacaacgcgtaacgatcgaccaacgacaacctacgacgaacgaaaacccccaaccactcgaccaaaaccccgtaataaccgcgcaaataaacgccgaaaacgcccaaaccgacgaaataaacgaacgccaaacgaccccgcaccacgaccatatcctccaacaaccgcgcccgcaacgcctccaactacccgaccaaacccccgaacgccccgaaaaccgctacctctaaacgctcccgaaccgcgcgcgccacgacttcgacccaacgtacgcgtaatttacgaaccgccccgaaaccccgacgcccgtcgaccgcctcctcctataccaacacctaacccaactacgccaccgcgcccgccccgacgcacgctcccgacccgaaacccgccaacgtctcgcgcaccaacgcccacaactcgcgctacaaaacctcgtacaacaacgccacgtcccgcgcccgacgacccccgccaacgccctcgaccttaaaaaacccaaacgcgccgcccctcgacgacgccaactcctcgacctctaactccaaaatatactcgtccgcacgcgctaattcgcgctactaaatcaaactcaaaatctccaacactacgaaaacaaaacgaaaaatcaacaatacgcgaaaaaaaaaaaaacgataccgaacgcgaaatt

SEQ ID NO: 37015 - DNA, 746 bp, Artificial Sequence
  chemically treated genomic DNA (Homo sapiens) CpG-island No: 37015
agggttgagggttttacgtgattttggataattgagtttagtttatttggggtagatttgattgtgttagtgtagtagcgcgtagcggtcggttagcggtagtttgcgacgggcggaggtttttagttattcggttagggtttcgtggtagtcgcgtaggtagacgtcgaaggcgtttaggtcggcggggtaggcgggcgttaggcggtttcgtattacggttatattttttagtagtcgcgttcgtagcgtttttagttgttcggttaggttttcgggcgtttcgggagtcgttgtttttaggcgttttcgggtcgcgcgcgttacggtttcggtttagcgtgcgcgtagtttgcgggtcgtttcgggatttcgacgttcgtcggtcgtttttttttgtattagtatttggtttagttgcgttatcgcgttcgtttcggcgtacgttttcggttcggggttcgttagcgtttcgcgtattagcgtttatagttcgcgttgtagggtttcgtatagtagcgttacgtttcgcgttcggcggttttcgttagcgttttcggttttgggaggtttaggcgcgtcgtttttcgacggcgttagtttttcggtttttagttttaggatgtgttcgttcgtacgcgttagttcgcgttgttggattaggtttaggatttttagtattgcgggagtaaagcgggaggttagtagtgcgcgggggggaggagggcgatgtcggacgcggggtt

SEQ ID NO: 37016 - DNA, 746 bp, Artificial Sequence
  chemically treated genomic DNA (Homo sapiens) CpG-island No: 37016
aaccccgcgtccgacatcgccctcctcccccccgcgcactactaacctcccgctttactcccgcaatactaaaaatcctaaacctaatccaacaacgcgaactaacgcgtacgaacgaacacatcctaaaactaaaaaccgaaaaactaacgccgtcgaaaaacgacgcgcctaaacctcccaaaaccgaaaacgctaacgaaaaccgccgaacgcgaaacgtaacgctactatacgaaaccctacaacgcgaactataaacgctaatacgcgaaacgctaacgaaccccgaaccgaaaacgtacgccgaaacgaacgcgataacgcaactaaaccaaatactaatacaaaaaaaaacgaccgacgaacgtcgaaatcccgaaacgacccgcaaactacgcgcacgctaaaccgaaaccgtaacgcgcgcgacccgaaaacgcctaaaaacaacgactcccgaaacgcccgaaaacctaaccgaacaactaaaaacgctacgaacgcgactactaaaaaatataaccgtaatacgaaaccgcctaacgcccgcctaccccgccgacctaaacgccttcgacgtctacctacgcgactaccacgaaaccctaaccgaataactaaaaacctccgcccgtcgcaaactaccgctaaccgaccgctacgcgctactacactaacacaatcaaatctaccccaaataaactaaactcaattatccaaaatcacgtaaaaccctcaaccct

SEQ ID NO: 37017 - DNA, 532 bp, Artificial Sequence
  chemically treated genomic DNA (Homo sapiens) CpG-island No: 37017
agaacgttcgggttcgcgcggcgggagagggggtagggcgggggaggggaagggacgtcgagggttttagtggtttcgtgtagcggggatttcgggcgttatgggggcggcgggtaggcgggcgggcgggggtcgcggagggggcgcggagtcggtttaggcggcggcggagggaggcggtggaggggttggggagggaggaagggacgttagggggaggggcgggtagggcggggcgtcgggatttcgtttttcgtcgtcggtttttaaaggcgtaggttcgggttggtcggggcgtcgggggtttcgggggtttcgggggcggaggcgggtttgggtacgtcggcggggagcgtgttttcgttcgagacgagaggcgtattggagaggagagaaggggagagagaggtcggggtagagcgttagagacgtagagagagagatcgagagacgtagagatagagagatacgaagagagagagacgagttataaaagggtggagaggcgtaaggagatgaaggaagagttaga

SEQ ID NO: 37018 - DNA, 532 bp, Artificial Sequence
  chemically treated genomic DNA (Homo sapiens) CpG-island No: 37018
tctaactcttccttcatctccttacgcctctccacccttttataactcgtctctctctcttcgtatctctctatctctacgtctctcgatctctctctctacgtctctaacgctctaccccgacctctctctccccttctctcctctccaatacgcctctcgtctcgaacgaaaacacgctccccgccgacgtacccaaacccgcctccgcccccgaaacccccgaaacccccgacgccccgaccaacccgaacctacgcctttaaaaaccgacgacgaaaaacgaaatcccgacgccccgccctacccgcccctccccctaacgtcccttcctccctccccaacccctccaccgcctccctccgccgccgcctaaaccgactccgcgccccctccgcgacccccgcccgcccgcctacccgccgcccccataacgcccgaaatccccgctacacgaaaccactaaaaccctcgacgtcccttcccctcccccgccctaccccctctcccgccgcgcgaacccgaacgttct

SEQ ID NO: 37019 - DNA, 532 bp, Artificial Sequence
  chemically treated genomic DNA (Homo sapiens) CpG-island No: 37019
tttggttttttttttatttttttgcgtttttttatttttttgtaattcgttttttttttttcgtgtttttttatttttacgtttttcgatttttttttttgcgtttttggcgttttgtttcggttttttttttttttttttttttttttagtgcgtttttcgtttcgggcgagaatacgtttttcgtcggcgtgtttagattcgttttcgttttcggagttttcggagttttcggcgtttcgattagttcgggtttgcgtttttaagggtcggcggcggggggcggggtttcggcgtttcgttttgttcgtttttttttttgacgtttttttttttttttttagtttttttatcgttttttttcgtcgtcgtttgggtcggtttcgcgtttttttcgcggttttcgttcgttcgtttgttcgtcgtttttatggcgttcggggttttcgttgtacggggttattaggattttcggcgtttttttttttttttcgttttgttttttttttcgtcgcgcggattcgggcgtttt

SEQ ID NO: 37020 - DNA, 532 bp, Artificial Sequence
  chemically treated genomic DNA (Homo sapiens) CpG-island No: 37020
aaaacgcccgaatccgcgcgacgaaaaaaaaaacaaaacgaaaaaaaaaaaaaaacgccgaaaatcctaataaccccgtacaacgaaaaccccgaacgccataaaaacgacgaacaaacgaacgaacgaaaaccgcgaaaaaaacgcgaaaccgacccaaacgacgacgaaaaaaaacgataaaaaaactaaaaaaaaaaaaaaaaacgtcaaaaaaaaaaacgaacaaaacgaaacgccgaaaccccgccccccgccgccgacccttaaaaacgcaaacccgaactaatcgaaacgccgaaaactccgaaaactccgaaaacgaaaacgaatctaaacacgccgacgaaaaacgtattctcgcccgaaacgaaaaacgcactaaaaaaaaaaaaaaaaaaaaaaaaaaccgaaacaaaacgccaaaaacgcaaaaaaaaaaatcgaaaaacgtaaaaataaaaaaacacgaaaaaaaaaaaacgaattacaaaaaaataaaaaaacgcaaaaaaataaaaaaaaaaccaaa

SEQ ID NO: 37021 - DNA, 543 bp, Artificial Sequence
  chemically treated genomic DNA (Homo sapiens) CpG-island No: 37021
cggggtagagtttgagtcgtatcgtttttttagaagtttttgggaggcggttttacgttttaggcgattggttgttatcgaggaagatggcggcgttagattcgaggcgttagggaagatcgtatcgcggacgttcgttgagtttggcgtacgggtcgattaggtgagtgcggggttgcgggggttcggcgagggcggacggatttttgatcgtgtttacggattcgagggaacgcggcgtagtcgtggcggggtttgcggggtcgggggcgtggtcgggagtaaaggttgttgggtaggcggtttggggcgcggggcgcggggcgcggggcgcggggcgcggggcgcggggcgcggggttcggggtttagggtttgcggcggaaatttgggggaggtttgaggttcgcggggttgggttcggggcggggtttaaggagagtttggggcgaggttgaaggcgtttggtgggatttcgggggcggggtttggagtgggtttggggtcgtcggggtggagtttggggattggggggttgtagagg

SEQ ID NO: 37022 - DNA, 543 bp, Artificial Sequence
  chemically treated genomic DNA (Homo sapiens) CpG-island No: 37022
cctctacaaccccccaatccccaaactccaccccgacgaccccaaacccactccaaaccccgcccccgaaatcccaccaaacgccttcaacctcgccccaaactctccttaaaccccgccccgaacccaaccccgcgaacctcaaacctcccccaaatttccgccgcaaaccctaaaccccgaaccccgcgccccgcgccccgcgccccgcgccccgcgccccgcgccccgcgccccaaaccgcctacccaacaacctttactcccgaccacgcccccgaccccgcaaaccccgccacgactacgccgcgttccctcgaatccgtaaacacgatcaaaaatccgtccgccctcgccgaacccccgcaaccccgcactcacctaatcgacccgtacgccaaactcaacgaacgtccgcgatacgatcttccctaacgcctcgaatctaacgccgccatcttcctcgataacaaccaatcgcctaaaacgtaaaaccgcctcccaaaaacttctaaaaaaacgatacgactcaaactctaccccg

SEQ ID NO: 37023 - DNA, 543 bp, Artificial Sequence
  chemically treated genomic DNA (Homo sapiens) CpG-island No: 37023
tttttatagttttttagtttttaggttttatttcggcgattttaaatttattttaggtttcgttttcgaagttttattaagcgtttttagtttcgttttaaattttttttaggtttcgtttcgaatttagtttcgcgggttttaggttttttttaggttttcgtcgtaaattttgagtttcgagtttcgcgtttcgcgtttcgcgtttcgcgtttcgcgtttcgcgtttcgcgttttaggtcgtttatttagtagtttttgttttcggttacgttttcgatttcgtaggtttcgttacggttgcgtcgcgttttttcgggttcgtggatacggttaggggttcgttcgttttcgtcgggttttcgtagtttcgtatttatttggtcggttcgtgcgttaagtttagcgggcgttcgcggtgcgattttttttagcgtttcgggtttggcgtcgttatttttttcggtaataattagtcgtttgaggcgtggggtcgttttttaaagatttttgggagggcggtgcggtttaggttttgtttcg

SEQ ID NO: 37024 - DNA, 543 bp, Artificial Sequence
  chemically treated genomic DNA (Homo sapiens) CpG-island No: 37024
cgaaacaaaacctaaaccgcaccgccctcccaaaaatctttaaaaaacgaccccacgcctcaaacgactaattattaccgaaaaaaataacgacgccaaacccgaaacgctaaaaaaaatcgcaccgcgaacgcccgctaaacttaacgcacgaaccgaccaaataaatacgaaactacgaaaacccgacgaaaacgaacgaacccctaaccgtatccacgaacccgaaaaaacgcgacgcaaccgtaacgaaacctacgaaatcgaaaacgtaaccgaaaacaaaaactactaaataaacgacctaaaacgcgaaacgcgaaacgcgaaacgcgaaacgcgaaacgcgaaacgcgaaactcgaaactcaaaatttacgacgaaaacctaaaaaaaacctaaaacccgcgaaactaaattcgaaacgaaacctaaaaaaaatttaaaacgaaactaaaaacgcttaataaaacttcgaaaacgaaacctaaaataaatttaaaatcgccgaaataaaacctaaaaactaaaaaactataaaaa

SEQ ID NO: 37025 - DNA, 1370 bp, Artificial Sequence
  chemically treated genomic DNA (Homo sapiens) CpG-island No: 37025
ggttagcgcgttttcgttggacgatttcgcgcgtcgttatatgattatttacgtgtcgttggacgtttcgcgttttaagtagtttattagcgagtggaagtagaagagtttggagggtcgcggtttggggttgttcgacgacgttagtttcgggtatttgcgcgcgttcgtcgaatttatggcggaggaggaggaagaggaggaggacgaagaggaagaggaggaggaggaagaggaggaggacgagggttcggtttcgttttcgttttattttatcgtgtaggcgcggtcggggttggggtttcgggttatttttttatcgcgcgcggggtcgtcgtcgttggtgtatatttcggaggagggcgcgtaggcgggggtcggtttgttttttaaaagcggcgtcggggtgcgcgttaagtggtttatgatggtcgagaagagcggggcggtagtggttaatttttcgcggttgttgtaggttatcgttatgtttaaggtttcgggcgcgtcgggttttaaggcggtcgagacggcgtcgtcgtttagcgttagtttcgatttttcgtagtatcggtcgtcgtcggatcgcgatttcgttagtatcgtgattatcgacgcgtacgcgtcgtattatttcgtggtgtatttgtcggtcggcggcgcgttttgggagtggaaggcggcgggcggcggggttaaggcggaggtcgacggcggttacgagttgggggatttggcgcgcggttttcgcggcggggttaagttttcgggcgtgtttttcggttcgtcggttagcgacgtggattaggaggagtcgcggttcggggtcgtggttatcgttaatttggttacgggcgaggggttgttttcgttgggcgcggtcgatggggcgttgggttcgggtagtcgggagtttacgttgcggcgttacgcgggcggtttggggttggcggagcgcgaggcggaggcggaggtcgagggttattttcgtaagatgtaggcgcgtcgttttttcgattagcgcggcggggtcgggggcgggcggggggcgggtcgagggcgcgggcggtcgcgcggatgtttaataaagcggtagaaatcgaggttcggtttttggttattcgttttggttcgtacgttttacgtagggatttttatttttagggtcgggtttatttcgttcgtggttttatttggcgtttcggcggatattcgggcgggagtcggggtcgttcgcggtatagaaagaggaagttagtaacgaaggcggaacggagcgaggatatagaagatttattcgaagtttaggtatagattggttaatttgtttttatagcgtttatagcgaatatagggttagataagggagg

SEQ ID NO: 37026 - DNA, 1370 bp, Artificial Sequence
  chemically treated genomic DNA (Homo sapiens) CpG-island No: 37026
cctcccttatctaaccctatattcgctataaacgctataaaaacaaattaaccaatctatacctaaacttcgaataaatcttctatatcctcgctccgttccgccttcgttactaacttcctctttctataccgcgaacgaccccgactcccgcccgaatatccgccgaaacgccaaataaaaccacgaacgaaataaacccgaccctaaaaataaaaatccctacgtaaaacgtacgaaccaaaacgaataaccaaaaaccgaacctcgatttctaccgctttattaaacatccgcgcgaccgcccgcgccctcgacccgccccccgcccgcccccgaccccgccgcgctaatcgaaaaaacgacgcgcctacatcttacgaaaataaccctcgacctccgcctccgcctcgcgctccgccaaccccaaaccgcccgcgtaacgccgcaacgtaaactcccgactacccgaacccaacgccccatcgaccgcgcccaacgaaaacaacccctcgcccgtaaccaaattaacgataaccacgaccccgaaccgcgactcctcctaatccacgtcgctaaccgacgaaccgaaaaacacgcccgaaaacttaaccccgccgcgaaaaccgcgcgccaaatcccccaactcgtaaccgccgtcgacctccgccttaaccccgccgcccgccgccttccactcccaaaacgcgccgccgaccgacaaatacaccacgaaataatacgacgcgtacgcgtcgataatcacgatactaacgaaatcgcgatccgacgacgaccgatactacgaaaaatcgaaactaacgctaaacgacgacgccgtctcgaccgccttaaaacccgacgcgcccgaaaccttaaacataacgataacctacaacaaccgcgaaaaattaaccactaccgccccgctcttctcgaccatcataaaccacttaacgcgcaccccgacgccgcttttaaaaaacaaaccgacccccgcctacgcgccctcctccgaaatatacaccaacgacgacgaccccgcgcgcgataaaaaaataacccgaaaccccaaccccgaccgcgcctacacgataaaataaaacgaaaacgaaaccgaaccctcgtcctcctcctcttcctcctcctcctcttcctcttcgtcctcctcctcttcctcctcctccgccataaattcgacgaacgcgcgcaaatacccgaaactaacgtcgtcgaacaaccccaaaccgcgaccctccaaactcttctacttccactcgctaataaactacttaaaacgcgaaacgtccaacgacacgtaaataatcatataacgacgcgcgaaatcgtccaacgaaaacgcgctaacc

SEQ ID NO: 37027 - DNA, 1370 bp, Artificial Sequence
  chemically treated genomic DNA (Homo sapiens) CpG-island No: 37027
ttttttttgtttagttttgtgttcgttgtggacgttgtagaggtaggttggttagtttgtatttggatttcgaataaattttttgtattttcgtttcgtttcgttttcgttgttggttttttttttttgtgtcgcgggcggtttcgattttcgttcgggtgttcgtcgaagcgttaggtggggttacgggcggggtgggttcggttttgagagtgggggtttttgcgtggggcgtgcgggttagagcgaatgattaagagtcggatttcggtttttgtcgttttattgagtattcgcgcggtcgttcgcgttttcggttcgtttttcgttcgttttcggtttcgtcgcgttagtcggggaagcggcgcgtttgtattttgcggaagtagttttcggttttcgttttcgtttcgcgtttcgttagttttaggtcgttcgcgtggcgtcgtagcgtggattttcggttgttcgggtttagcgttttatcggtcgcgtttagcgggggtagtttttcgttcgtggttaggttgacggtggttacggtttcgaatcgcggttttttttggtttacgtcgttgatcgacgagtcgggggatacgttcgggggtttggtttcgtcgcggaagtcgcgcgttaggttttttagttcgtagtcgtcgtcggttttcgttttggtttcgtcgttcgtcgttttttatttttagggcgcgtcgtcggtcgataggtgtattacggggtggtgcggcgcgtgcgcgtcgatggttacgatgttggcggagtcgcggttcgacggcgatcggtattgcgaggagtcggagttggcgttggacgacgacgtcgtttcggtcgttttggggttcggcgcgttcggagttttggatatggcgatgatttgtagtagtcgcggagggttggttattgtcgtttcgtttttttcggttattatgagttatttggcgcgtatttcggcgtcgtttttgggggataggtcggttttcgtttgcgcgttttttttcgggatgtgtattagcggcggcggtttcgcgcgcggtgggaggatgattcgaggttttagtttcggtcgcgtttgtacggtggggtagagcgagggcggggtcgggttttcgttttttttttttttttttttttttttttttttttcgtttttttttttttttttttttttcgttatgggttcggcgggcgcgcgtaggtgttcggggttggcgtcgtcgggtagttttaggtcgcggttttttaggtttttttgtttttattcgttgatgagttgtttggagcgcgaggcgtttagcggtacgtggatggttatgtggcggcgcgcggggtcgtttagcgagggcgcgttggtt

SEQ ID NO: 37028 - DNA, 1370 bp, Artificial Sequence
  chemically treated genomic DNA (Homo sapiens) CpG-island No: 37028
aaccaacgcgccctcgctaaacgaccccgcgcgccgccacataaccatccacgtaccgctaaacgcctcgcgctccaaacaactcatcaacgaataaaaacaaaaaaacctaaaaaaccgcgacctaaaactacccgacgacgccaaccccgaacacctacgcgcgcccgccgaacccataacgaaaaaaaaaaaaaaaaaaaaaaacgaaaaaaaaaaaaaaaaaaaaaaaaaaaaaaaaaacgaaaacccgaccccgccctcgctctaccccaccgtacaaacgcgaccgaaactaaaacctcgaatcatcctcccaccgcgcgcgaaaccgccgccgctaatacacatcccgaaaaaaaacgcgcaaacgaaaaccgacctatcccccaaaaacgacgccgaaatacgcgccaaataactcataataaccgaaaaaaacgaaacgacaataaccaaccctccgcgactactacaaatcatcgccatatccaaaactccgaacgcgccgaaccccaaaacgaccgaaacgacgtcgtcgtccaacgccaactccgactcctcgcaataccgatcgccgtcgaaccgcgactccgccaacatcgtaaccatcgacgcgcacgcgccgcaccaccccgtaatacacctatcgaccgacgacgcgccctaaaaataaaaaacgacgaacgacgaaaccaaaacgaaaaccgacgacgactacgaactaaaaaacctaacgcgcgacttccgcgacgaaaccaaacccccgaacgtatcccccgactcgtcgatcaacgacgtaaaccaaaaaaaaccgcgattcgaaaccgtaaccaccgtcaacctaaccacgaacgaaaaactacccccgctaaacgcgaccgataaaacgctaaacccgaacaaccgaaaatccacgctacgacgccacgcgaacgacctaaaactaacgaaacgcgaaacgaaaacgaaaaccgaaaactacttccgcaaaatacaaacgcgccgcttccccgactaacgcgacgaaaccgaaaacgaacgaaaaacgaaccgaaaacgcgaacgaccgcgcgaatactcaataaaacgacaaaaaccgaaatccgactcttaatcattcgctctaacccgcacgccccacgcaaaaacccccactctcaaaaccgaacccaccccgcccgtaaccccacctaacgcttcgacgaacacccgaacgaaaatcgaaaccgcccgcgacacaaaaaaaaaaaaccaacaacgaaaacgaaacgaaacgaaaatacaaaaaatttattcgaaatccaaatacaaactaaccaacctacctctacaacgtccacaacgaacacaaaactaaacaaaaaaaa

SEQ ID NO: 37029 - DNA, 564 bp, Artificial Sequence
  chemically treated genomic DNA (Homo sapiens) CpG-island No: 37029
tcgcgtttcggattttagggatatagaacggggttttattcgtggatttattcgttatttcgtagtttcgtttaggtttcgacgcgtgtagtttttatttcgtagtttcgtttaggtttcgacgcgtgtagtttttatttcgtagtttcgtttaggtttcgacgcgtgtagtttttatttcgtagtttcgtttaggtttcgacgcgtgcggtttttatttcgtagtttcgtttaggtttcgacgcgtgtagtttttatttcgtagtttcgtttaggtttcgacgcgtgtagtttttatttcgtagtttcgtttaggtttcgacgcgtgcggtttttatttcgtagtttcgtttaggtttcgacgcgtgcggtttttatttcgtagtttcgtttaggtttcgacgcgtgcgtgtagtttttatttcgtagtttcgtttaggtttcgacgcgtgtagtttttatttcgtagtttcgtttaggtttcgacgcgtgtagttttttggtagagttagtttcgtttaggtttcgacgcgtgtagttttttggtagagttagttgtgttta

SEQ ID NO: 37030 - DNA, 564 bp, Artificial Sequence
  chemically treated genomic DNA (Homo sapiens) CpG-island No: 37030
taaacacaactaactctaccaaaaaactacacgcgtcgaaacctaaacgaaactaactctaccaaaaaactacacgcgtcgaaacctaaacgaaactacgaaataaaaactacacgcgtcgaaacctaaacgaaactacgaaataaaaactacacgcacgcgtcgaaacctaaacgaaactacgaaataaaaaccgcacgcgtcgaaacctaaacgaaactacgaaataaaaaccgcacgcgtcgaaacctaaacgaaactacgaaataaaaactacacgcgtcgaaacctaaacgaaactacgaaataaaaactacacgcgtcgaaacctaaacgaaactacgaaataaaaaccgcacgcgtcgaaacctaaacgaaactacgaaataaaaactacacgcgtcgaaacctaaacgaaactacgaaataaaaactacacgcgtcgaaacctaaacgaaactacgaaataaaaactacacgcgtcgaaacctaaacgaaactacgaaataacgaataaatccacgaataaaaccccgttctatatccctaaaatccgaaacgcga

SEQ ID NO: 37031 - DNA, 564 bp, Artificial Sequence
  chemically treated genomic DNA (Homo sapiens) CpG-island No: 37031
tgagtatagttggttttgttaggaggttgtacgcgtcggggtttggacggggttggttttgttagggggttgtacgcgtcggggtttggacggggttgcggggtgggggttgtacgcgtcggggtttggacggggttgcggggtgggggttgtacgtacgcgtcggggtttggacggggttgcggggtgggggtcgtacgcgtcggggtttggacggggttgcggggtgggggtcgtacgcgtcggggtttggacggggttgcggggtgggggttgtacgcgtcggggtttggacggggttgcggggtgggggttgtacgcgtcggggtttggacggggttgcggggtgggggtcgtacgcgtcggggtttggacggggttgcggggtgggggttgtacgcgtcggggtttggacggggttgcggggtgggggttgtacgcgtcggggtttggacggggttgcggggtgggggttgtacgcgtcggggtttggacggggttgcggggtggcgggtgggtttacggatgggatttcgttttatgtttttgaaattcgaggcgcgg

SEQ ID NO: 37032 - DNA, 564 bp, Artificial Sequence
  chemically treated genomic DNA (Homo sapiens) CpG-island No: 37032
ccgcgcctcgaatttcaaaaacataaaacgaaatcccatccgtaaacccacccgccaccccgcaaccccgtccaaaccccgacgcgtacaacccccaccccgcaaccccgtccaaaccccgacgcgtacaacccccaccccgcaaccccgtccaaaccccgacgcgtacaacccccaccccgcaaccccgtccaaaccccgacgcgtacgacccccaccccgcaaccccgtccaaaccccgacgcgtacaacccccaccccgcaaccccgtccaaaccccgacgcgtacaacccccaccccgcaaccccgtccaaaccccgacgcgtacgacccccaccccgcaaccccgtccaaaccccgacgcgtacgacccccaccccgcaaccccgtccaaaccccgacgcgtacgtacaacccccaccccgcaaccccgtccaaaccccgacgcgtacaacccccaccccgcaaccccgtccaaaccccgacgcgtacaaccccctaacaaaaccaaccccgtccaaaccccgacgcgtacaacctcctaacaaaaccaactatactca

SEQ ID NO: 37033 - DNA, 596 bp, Artificial Sequence
  chemically treated genomic DNA (Homo sapiens) CpG-island No: 37033
attagcgagcggcgggtttcgcggaggggcgggcggaggcgcggggcgggggtagtcggagtcggcgagagatcgtgagagatacggagatagttagagatttcgaaattttaattttcgttttcgttttcgttttcgtttcgatggcgtttttcgggtcgatcgtagttattcgggaggggaggacggggtcgttatcgtcgtaggttcgaagggaggaggacgcgattttcgagtttcgttagtcgttcgcgtagatttgagattttcgagattttcggcggtgggaggcggcgttagggaggcggggacggtgcgcggggtttgcggaggacgcgtttagataaagagttttcgtttttggttgcggcgtttgggttgcggcgtttgggcgcgcgcgggggttttcgggtcggatttttttttttttcgtttttttttttttttcggttttcggtttcgttttacggaggagacgcgttttgtgttgggcgtcggtcgcgttaggtgaggggttgtggggttgggggcgcggatttagtttttttcgtcgttcggatttttagttttttcggatgttttttattattacgcgg

SEQ ID NO: 37034 - DNA, 596 bp, Artificial Sequence
  chemically treated genomic DNA (Homo sapiens) CpG-island No: 37034
ccgcgtaataataaaaaacatccgaaaaaactaaaaatccgaacgacgaaaaaaactaaatccgcgcccccaaccccacaacccctcacctaacgcgaccgacgcccaacacaaaacgcgtctcctccgtaaaacgaaaccgaaaaccgaaaaaaaaaaaaaaacgaaaaaaaaaaaaatccgacccgaaaacccccgcgcgcgcccaaacgccgcaacccaaacgccgcaaccaaaaacgaaaactctttatctaaacgcgtcctccgcaaaccccgcgcaccgtccccgcctccctaacgccgcctcccaccgccgaaaatctcgaaaatctcaaatctacgcgaacgactaacgaaactcgaaaatcgcgtcctcctcccttcgaacctacgacgataacgaccccgtcctcccctcccgaataactacgatcgacccgaaaaacgccatcgaaacgaaaacgaaaacgaaaacgaaaattaaaatttcgaaatctctaactatctccgtatctctcacgatctctcgccgactccgactacccccgccccgcgcctccgcccgcccctccgcgaaacccgccgctcgctaat

SEQ ID NO: 37035 - DNA, 596 bp, Artificial Sequence
  chemically treated genomic DNA (Homo sapiens) CpG-island No: 37035
tcgcgtggtggtggggggtattcgggagaattgggggttcgggcggcggaggagattgggttcgcgtttttagttttatagttttttatttggcgcggtcggcgtttagtataaagcgcgtttttttcgtggggcggggtcgggagtcgggaaggggagggggacgggggaggggagggttcggttcggagattttcgcgcgcgtttagacgtcgtagtttagacgtcgtagttaggggcgggggttttttgtttgggcgcgtttttcgtaggtttcgcgtatcgttttcgtttttttggcgtcgttttttatcgtcgggggtttcgggggttttaggtttgcgcgagcggttggcggggttcgggggtcgcgttttttttttttcgggtttgcggcggtgacggtttcgtttttttttttcgggtggttgcggtcggttcggggggcgttatcgagacgggggcggaggcgggggcgggggttggggtttcggggtttttgattgttttcgtgttttttacggtttttcgtcggtttcgattgttttcgtttcgcgttttcgttcgttttttcgcggagttcgtcgttcgttggt

SEQ ID NO: 37036 - DNA, 596 bp, Artificial Sequence
  chemically treated genomic DNA (Homo sapiens) CpG-island No: 37036
accaacgaacgacgaactccgcgaaaaaacgaacgaaaacgcgaaacgaaaacaatcgaaaccgacgaaaaaccgtaaaaaacacgaaaacaatcaaaaaccccgaaaccccaacccccgcccccgcctccgcccccgtctcgataacgccccccgaaccgaccgcaaccacccgaaaaaaaaaaacgaaaccgtcaccgccgcaaacccgaaaaaaaaaaaacgcgacccccgaaccccgccaaccgctcgcgcaaacctaaaacccccgaaacccccgacgataaaaaacgacgccaaaaaaacgaaaacgatacgcgaaacctacgaaaaacgcgcccaaacaaaaaacccccgcccctaactacgacgtctaaactacgacgtctaaacgcgcgcgaaaatctccgaaccgaaccctcccctcccccgtccccctccccttcccgactcccgaccccgccccacgaaaaaaacgcgctttatactaaacgccgaccgcgccaaataaaaaactataaaactaaaaacgcgaacccaatctcctccgccgcccgaacccccaattctcccgaataccccccaccaccacgcga

SEQ ID NO: 37037 - DNA, 561 bp, Artificial Sequence
  chemically treated genomic DNA (Homo sapiens) CpG-island No: 37037
ttcgttcggagatttttcgtttttttcggcgatttcggtttcgatttttcgatttcgggtgtaggggcgttcggaagtcgcgtgttgggtcggggcgcggggaggttacgcggacgtcgttttttgtagttttagttttttcgatcgtttttttttcgtcggcgtcggttatcgtgtttttttcgggtttcgtttgcgcgtttttttttagcgtcgtttttttttttttagttacggtttgcggcgttcgcggtattatgatttttattaaggagaagaataagatttcgaaggatagtatgacgtttttgttttgtttttatttcgtggaggtgggtgggggtcgcgttggggttcgggggagacgtttcggtttcgttcgttcgtagagattttcgcgttgggggatcggagtcggcgtagttgtttcggtagtggtttcggggcggggtaggatcggggtgttcggcggatggggggtggggtagaggatttgggttgtgcgggtcgagtaggagttttagaggaatcgaggggggtttaggtcgtgggaattgtggg

SEQ ID NO: 37038 - DNA, 561 bp, Artificial Sequence
  chemically treated genomic DNA (Homo sapiens) CpG-island No: 37038
cccacaattcccacgacctaaacccccctcgattcctctaaaactcctactcgacccgcacaacccaaatcctctaccccaccccccatccgccgaacaccccgatcctaccccgccccgaaaccactaccgaaacaactacgccgactccgatcccccaacgcgaaaatctctacgaacgaacgaaaccgaaacgtctcccccgaaccccaacgcgacccccacccacctccacgaaataaaaacaaaacaaaaacgtcatactatccttcgaaatcttattcttctccttaataaaaatcataataccgcgaacgccgcaaaccgtaactaaaaaaaaaaaaacgacgctaaaaaaaaacgcgcaaacgaaacccgaaaaaaacacgataaccgacgccgacgaaaaaaaaacgatcgaaaaaactaaaactacaaaaaacgacgtccgcgtaacctccccgcgccccgacccaacacgcgacttccgaacgcccctacacccgaaatcgaaaaatcgaaaccgaaatcgccgaaaaaaacgaaaaatctccgaacgaa

SEQ ID NO: 37039 - DNA, 561 bp, Artificial Sequence
  chemically treated genomic DNA (Homo sapiens) CpG-island No: 37039
tttatagtttttacggtttggatttttttcggtttttttggagtttttattcgattcgtatagtttaagttttttgttttattttttattcgtcggatatttcggttttgtttcgtttcgaggttattgtcggggtagttgcgtcggtttcggttttttagcgcgggggtttttgcgggcgggcggaatcgaggcgtttttttcgggttttagcgcgatttttatttatttttacgaagtagaagtagggtagaagcgttatgttgtttttcgggattttgtttttttttttggtggagattatggtgtcgcgggcgtcgtaggtcgtggttggaggggagaaagcggcgttggaggggggcgcgtaggcggagttcgggggagatacggtggtcggcgtcggcgggggaggggcggtcggggaaattgaggttgtagagagcggcgttcgcgtggttttttcgcgtttcggtttagtacgcggttttcgggcgtttttatattcgggatcggggggtcggggtcgggatcgtcgaggagggcggggggttttcgggcggg

SEQ ID NO: 37040 - DNA, 561 bp, Artificial Sequence
  chemically treated genomic DNA (Homo sapiens) CpG-island No: 37040
cccgcccgaaaaccccccgccctcctcgacgatcccgaccccgaccccccgatcccgaatataaaaacgcccgaaaaccgcgtactaaaccgaaacgcgaaaaaaccacgcgaacgccgctctctacaacctcaatttccccgaccgcccctcccccgccgacgccgaccaccgtatctcccccgaactccgcctacgcgcccccctccaacgccgctttctcccctccaaccacgacctacgacgcccgcgacaccataatctccaccaaaaaaaaaaacaaaatcccgaaaaacaacataacgcttctaccctacttctacttcgtaaaaataaataaaaatcgcgctaaaacccgaaaaaaacgcctcgattccgcccgcccgcaaaaacccccgcgctaaaaaaccgaaaccgacgcaactaccccgacaataacctcgaaacgaaacaaaaccgaaatatccgacgaataaaaaataaaacaaaaaacttaaactatacgaatcgaataaaaactccaaaaaaaccgaaaaaaatccaaaccgtaaaaactataaa

SEQ ID NO: 37041 - DNA, 1007 bp, Artificial Sequence
  chemically treated genomic DNA (Homo sapiens) CpG-island No: 37041
ggggttgtacgcgtcggggtttggacggggttgcggggtgggggtcgtacgcgtcggggtttggacggggttgcggggtgggggtcgtacgcgtcggggtttggacggggttgcggggtgggggttgtacgcgtcggggtttggacggggttgcggggtgggggttgtacgcgtcggggtttggacggggttgcggggtgggggttgtacgcgtcggggtttggacggggttgcggggtgggggtcgtacgcgtcggggtttggacggggttgcggggtgggggttgtacgcgtcggggtttggacggggttgcggggtgggggttgtacgcgtcggggtttggacggggttgcggggtgggggttgtacgcgtcggggtttggacggggttgcggggtgggggtcgtacgcgtcggggtttggacggggttgcggggtgggggttgtacgcgtcggggtttggacggggttgcggggtgggggttgtacgcgtcggggtttggacggggttgcggggtgggggttgtacgcgtcggggtttggacggggttgcggggtgggggtcgtacgcgtcggggtttggacggggttgcggggtgggggttgtacgtacgcgtcggggtttggatagggttgcggggtgggggtcgtacgtacgcgtcggggtttggatagggttgcggggtgggggttgtacgtacgcgtcggggtttggatagggttgaggggtgggggtcgtacgcgtcggggtttggacggggttgcggggtgggggtcgtacgcgtcggggtttggacggggttgcggggtgggggttgtacgcgtcggggtttggacggggttgcggggtgggggttgtacgcgtcggggtttggacggggttgcggggtgggggtcgtatacgtcggggtttggacggtgttgcggggggggggttgtacgcgtcggggtttggacggagttgcggggtgggggttgtacgtattggggtttggacggggttgcg

SEQ ID NO: 37042 - DNA, 1007 bp, Artificial Sequence
  chemically treated genomic DNA (Homo sapiens) CpG-island No: 37042
cgcaaccccgtccaaaccccaatacgtacaacccccaccccgcaactccgtccaaaccccgacgcgtacaaccccccccccgcaacaccgtccaaaccccgacgtatacgacccccaccccgcaaccccgtccaaaccccgacgcgtacaacccccaccccgcaaccccgtccaaaccccgacgcgtacaacccccaccccgcaaccccgtccaaaccccgacgcgtacgacccccaccccgcaaccccgtccaaaccccgacgcgtacgacccccacccctcaaccctatccaaaccccgacgcgtacgtacaacccccaccccgcaaccctatccaaaccccgacgcgtacgtacgacccccaccccgcaaccctatccaaaccccgacgcgtacgtacaacccccaccccgcaaccccgtccaaaccccgacgcgtacgacccccaccccgcaaccccgtccaaaccccgacgcgtacaacccccaccccgcaaccccgtccaaaccccgacgcgtacaacccccaccccgcaaccccgtccaaaccccgacgcgtacaacccccaccccgcaaccccgtccaaaccccgacgcgtacgacccccaccccgcaaccccgtccaaaccccgacgcgtacaacccccaccccgcaaccccgtccaaaccccgacgcgtacaacccccaccccgcaaccccgtccaaaccccgacgcgtacaacccccaccccgcaaccccgtccaaaccccgacgcgtacgacccccaccccgcaaccccgtccaaaccccgacgcgtacaacccccaccccgcaaccccgtccaaaccccgacgcgtacaacccccaccccgcaaccccgtccaaaccccgacgcgtacaacccccaccccgcaaccccgtccaaaccccgacgcgtacgacccccaccccgcaaccccgtccaaaccccgacgcgtacgacccccaccccgcaaccccgtccaaaccccgacgcgtacaacccc

SEQ ID NO: 37043 - DNA, 1007 bp, Artificial Sequence
  chemically treated genomic DNA (Homo sapiens) CpG-island No: 37043
cgtagtttcgtttaggttttaatgcgtgtagtttttatttcgtagtttcgtttaggtttcgacgcgtgtagtttttttttcgtagtatcgtttaggtttcgacgtgtgcggtttttatttcgtagtttcgtttaggtttcgacgcgtgtagtttttatttcgtagtttcgtttaggtttcgacgcgtgtagtttttatttcgtagtttcgtttaggtttcgacgcgtgcggtttttatttcgtagtttcgtttaggtttcgacgcgtgcggtttttattttttagttttgtttaggtttcgacgcgtgcgtgtagtttttatttcgtagttttgtttaggtttcgacgcgtgcgtgcggtttttatttcgtagttttgtttaggtttcgacgcgtgcgtgtagtttttatttcgtagtttcgtttaggtttcgacgcgtgcggtttttatttcgtagtttcgtttaggtttcgacgcgtgtagtttttatttcgtagtttcgtttaggtttcgacgcgtgtagtttttatttcgtagtttcgtttaggtttcgacgcgtgtagtttttatttcgtagtttcgtttaggtttcgacgcgtgcggtttttatttcgtagtttcgtttaggtttcgacgcgtgtagtttttatttcgtagtttcgtttaggtttcgacgcgtgtagtttttatttcgtagtttcgtttaggtttcgacgcgtgtagtttttatttcgtagtttcgtttaggtttcgacgcgtgcggtttttatttcgtagtttcgtttaggtttcgacgcgtgtagtttttatttcgtagtttcgtttaggtttcgacgcgtgtagtttttatttcgtagtttcgtttaggtttcgacgcgtgtagtttttatttcgtagtttcgtttaggtttcgacgcgtgcggtttttatttcgtagtttcgtttaggtttcgacgcgtgcggtttttatttcgtagtttcgtttaggtttcgacgcgtgtagtttt

SEQ ID NO: 37044 - DNA, 1007 bp, Artificial Sequence
  chemically treated genomic DNA (Homo sapiens) CpG-island No: 37044
aaaactacacgcgtcgaaacctaaacgaaactacgaaataaaaaccgcacgcgtcgaaacctaaacgaaactacgaaataaaaaccgcacgcgtcgaaacctaaacgaaactacgaaataaaaactacacgcgtcgaaacctaaacgaaactacgaaataaaaactacacgcgtcgaaacctaaacgaaactacgaaataaaaactacacgcgtcgaaacctaaacgaaactacgaaataaaaaccgcacgcgtcgaaacctaaacgaaactacgaaataaaaactacacgcgtcgaaacctaaacgaaactacgaaataaaaactacacgcgtcgaaacctaaacgaaactacgaaataaaaactacacgcgtcgaaacctaaacgaaactacgaaataaaaaccgcacgcgtcgaaacctaaacgaaactacgaaataaaaactacacgcgtcgaaacctaaacgaaactacgaaataaaaactacacgcgtcgaaacctaaacgaaactacgaaataaaaactacacgcgtcgaaacctaaacgaaactacgaaataaaaaccgcacgcgtcgaaacctaaacgaaactacgaaataaaaactacacgcacgcgtcgaaacctaaacaaaactacgaaataaaaaccgcacgcacgcgtcgaaacctaaacaaaactacgaaataaaaactacacgcacgcgtcgaaacctaaacaaaactaaaaaataaaaaccgcacgcgtcgaaacctaaacgaaactacgaaataaaaaccgcacgcgtcgaaacctaaacgaaactacgaaataaaaactacacgcgtcgaaacctaaacgaaactacgaaataaaaactacacgcgtcgaaacctaaacgaaactacgaaataaaaaccgcacacgtcgaaacctaaacgatactacgaaaaaaaaactacacgcgtcgaaacctaaacgaaactacgaaataaaaactacacgcattaaaacctaaacgaaactacg

SEQ ID NO: 37045 - DNA, 512 bp, Artificial Sequence
  chemically treated genomic DNA (Homo sapiens) CpG-island No: 37045
agttgaggacgcggtttttcggtggtaattttggtaattagttagcgcgtcgttggtttttcggaagttagatttcgtcgggttgagtcgagttacgttagcgtcgattggcgtcgtggaggagtttgcgtagaggagatatttgattcggtgggagacggttaggggagcgcgcgcggattggttggagtcgacgggggacggttgggcggggcgcggattgggggatcgtagtttcggggagcgtatcggaagttttcgtttggtttaggcgcggggtttaagatggtggcgttaggagtcgcgatttagtgatagcggtcgtggaggggttttcgatcgagcgggaggttgggggtagtttggaggtgagatttcgttgcgtttatagagttggcggtcgcggcgtttgcgtttatcggtaagcgaggagtggagtagagtttatatgtttatggggagaggtttgggggatcgtaggaggatgtaggcgtcgggtgcgtatgattggg

SEQ ID NO: 37046 - DNA, 512 bp, Artificial Sequence
  chemically treated genomic DNA (Homo sapiens) CpG-island No: 37046
cccaatcatacgcacccgacgcctacatcctcctacgatcccccaaacctctccccataaacatataaactctactccactcctcgcttaccgataaacgcaaacgccgcgaccgccaactctataaacgcaacgaaatctcacctccaaactacccccaacctcccgctcgatcgaaaacccctccacgaccgctatcactaaatcgcgactcctaacgccaccatcttaaaccccgcgcctaaaccaaacgaaaacttccgatacgctccccgaaactacgatcccccaatccgcgccccgcccaaccgtcccccgtcgactccaaccaatccgcgcgcgctcccctaaccgtctcccaccgaatcaaatatctcctctacgcaaactcctccacgacgccaatcgacgctaacgtaactcgactcaacccgacgaaatctaacttccgaaaaaccaacgacgcgctaactaattaccaaaattaccaccgaaaaaccgcgtcctcaact

SEQ ID NO: 37047 - DNA, 512 bp, Artificial Sequence
  chemically treated genomic DNA (Homo sapiens) CpG-island No: 37047
tttagttatgcgtattcggcgtttatatttttttgcggttttttaggtttttttttataggtatatgagttttgttttatttttcgtttgtcggtggacgtaggcgtcgcggtcgttagttttgtgaacgtagcggggttttatttttaggttatttttaatttttcgttcggtcgggggtttttttacggtcgttattattgggtcgcggtttttagcgttattattttggatttcgcgtttgggttaggcgagaattttcggtgcgtttttcgggattgcggttttttagttcgcgtttcgtttagtcgtttttcgtcggttttagttaattcgcgcgcgtttttttggtcgttttttatcggattaggtgttttttttgcgtagatttttttacgacgttagtcggcgttggcgtagttcggtttagttcggcggagtttgattttcggagggttagcggcgcgttggttggttattaaggttattatcgagaggtcgcgtttttagtt

SEQ ID NO: 37048 - DNA, 512 bp, Artificial Sequence
  chemically treated genomic DNA (Homo sapiens) CpG-island No: 37048
aactaaaaacgcgacctctcgataataaccttaataaccaaccaacgcgccgctaaccctccgaaaatcaaactccgccgaactaaaccgaactacgccaacgccgactaacgtcgtaaaaaaatctacgcaaaaaaaacacctaatccgataaaaaacgaccaaaaaaacgcgcgcgaattaactaaaaccgacgaaaaacgactaaacgaaacgcgaactaaaaaaccgcaatcccgaaaaacgcaccgaaaattctcgcctaacccaaacgcgaaatccaaaataataacgctaaaaaccgcgacccaataataacgaccgtaaaaaaacccccgaccgaacgaaaaattaaaaataacctaaaaataaaaccccgctacgttcacaaaactaacgaccgcgacgcctacgtccaccgacaaacgaaaaataaaacaaaactcatatacctataaaaaaaaacctaaaaaaccgcaaaaaaatataaacgccgaatacgcataactaaa

SEQ ID NO: 37049 - DNA, 699 bp, Artificial Sequence
  chemically treated genomic DNA (Homo sapiens) CpG-island No: 37049
  unsure (45, 122..)
tcgaaatagggttcgttttatttcggtcggggagcgcgggatttncgtggttatttagcgttatcgttcgcgggttcgttttgcgtaggcgcggcgttttcgttttttaaatttcggttcgnncgtggcgtggtgcgtaagcgtaatgtttttattagcgtttcgttttgattcggtcgtggtgcgtaggcgtagtttgcgtagggattggcgggattgcgcggaggcgattgtagacgtatcgggggttcggagtttgtcgcggttgttaagcgttcggcgtttggcgttggcgttggttaaggttgtgagtttttgtcgcggatcggggtagggtaggcgggggacgaggcggcggtaggagcgggacggtttttagcgggttcgagcggagcggtttttcgggttttcgcgttttttgttcggggatcgggaaggggttgggagagttttgggtcggtgcgagggggagtcgcggagtgtattcgggggtttggggagttcggtttttagtaggtaggtcgcgtttcggtgaaggtcgcgatttcgcgggtttgttgggcgtttttttcgtcgttttggttcgggtttggggttcggcgatttcgcgggttgaggtagtttttcgtttttgtttggcgggtggattcggggaggagtcgtgtttgtttaaggttatcggggtggagttttggttgg

SEQ ID NO: 37050 - DNA, 699 bp, Artificial Sequence
  chemically treated genomic DNA (Homo sapiens) CpG-island No: 37050
  unsure (577..578, 655)
ccaaccaaaactccaccccgataaccttaaacaaacacgactcctccccgaatccacccgccaaacaaaaacgaaaaactacctcaacccgcgaaatcgccgaaccccaaacccgaaccaaaacgacgaaaaaaacgcccaacaaacccgcgaaatcgcgaccttcaccgaaacgcgacctacctactaaaaaccgaactccccaaacccccgaatacactccgcgactccccctcgcaccgacccaaaactctcccaaccccttcccgatccccgaacaaaaaacgcgaaaacccgaaaaaccgctccgctcgaacccgctaaaaaccgtcccgctcctaccgccgcctcgtcccccgcctaccctaccccgatccgcgacaaaaactcacaaccttaaccaacgccaacgccaaacgccgaacgcttaacaaccgcgacaaactccgaacccccgatacgtctacaatcgcctccgcgcaatcccgccaatccctacgcaaactacgcctacgcaccacgaccgaatcaaaacgaaacgctaataaaaacattacgcttacgcaccacgccacgnncgaaccgaaatttaaaaaacgaaaacgccgcgcctacgcaaaacgaacccgcgaacgataacgctaaataaccacgnaaatcccgcgctccccgaccgaaataaaacgaaccctatttcga

SEQ ID NO: 37051 - DNA, 699 bp, Artificial Sequence
  chemically treated genomic DNA (Homo sapiens) CpG-island No: 37051
  unsure (577..578, 655)
ttagttaggattttatttcggtgattttgggtagatacgattttttttcgagtttattcgttaggtagaggcgaggggttattttagttcgcgaggtcgtcggattttaggttcggattaaagcggcggaggggacgtttagtaagttcgcggggtcgcgatttttatcgggacgcggtttatttgttaaggatcgagttttttaggttttcgagtatatttcgcggttttttttcgtatcggtttagggtttttttagttttttttcgattttcgggtagggggcgcggggattcggaagatcgtttcgttcggattcgttggggatcgtttcgtttttatcgtcgtttcgtttttcgtttgttttgtttcggttcgcggtagggatttatagttttggttagcgttagcgttaggcgtcgagcgtttagtagtcgcgataggtttcggattttcgatacgtttgtagtcgttttcgcgtagtttcgttagtttttgcgtagattgcgtttgcgtattacggtcgggttaaggcggggcgttagtggggatattgcgtttgcgtattacgttacgnncgggtcggggtttaaggggcggggacgtcgcgtttgcgtaaagcggattcgcggacggtggcgttgggtggttacgnaggtttcgcgtttttcgatcgagatagggcgggttttatttcgg

SEQ ID NO: 37052 - DNA, 699 bp, Artificial Sequence
  chemically treated genomic DNA (Homo sapiens) CpG-island No: 37052
  unsure (45, 122..)
ccgaaataaaacccgccctatctcgatcgaaaaacgcgaaacctncgtaaccacccaacgccaccgtccgcgaatccgctttacgcaaacgcgacgtccccgccccttaaaccccgacccgnncgtaacgtaatacgcaaacgcaatatccccactaacgccccgccttaacccgaccgtaatacgcaaacgcaatctacgcaaaaactaacgaaactacgcgaaaacgactacaaacgtatcgaaaatccgaaacctatcgcgactactaaacgctcgacgcctaacgctaacgctaaccaaaactataaatccctaccgcgaaccgaaacaaaacaaacgaaaaacgaaacgacgataaaaacgaaacgatccccaacgaatccgaacgaaacgatcttccgaatccccgcgccccctacccgaaaatcgaaaaaaaactaaaaaaaccctaaaccgatacgaaaaaaaaccgcgaaatatactcgaaaacctaaaaaactcgatccttaacaaataaaccgcgtcccgataaaaatcgcgaccccgcgaacttactaaacgtcccctccgccgctttaatccgaacctaaaatccgacgacctcgcgaactaaaataacccctcgcctctacctaacgaataaactcgaaaaaaaatcgtatctacccaaaatcaccgaaataaaatcctaactaa

SEQ ID NO: 37053 - DNA, 530 bp, Artificial Sequence
  chemically treated genomic DNA (Homo sapiens) CpG-island No: 37053
ggaagtagggttttcgcgtattttatggaattttttttgtagtatttggatcgttttttcgagtttttggcggttttaagtattatttacgttagtatttgggatttcgttatcgtgcgtcgggttttgtagtgggcgcgttatttgcgttatatttatcggcgttttggtcggtatggttttattcgtacggttttggagcggcggttgtataattagtggaggtaagagggcggttttgggcggggtttagtttcgggattagcgaatttttaggttttcggttattgtgacgttttgttttttttgcgtttgttggagaatcgggttttcggggatgtagttcgttattatttggtgtagtaattttttttcggtttcgtgtcgggacgtcgatgaggagatattttaagagagtttggttcgttttgttcgtcggcggtttgcggtgtatatgttgcgttttaatggttatagagagaatttaaatttttaggaggattttttgatgaagatttaggcggagttgt

SEQ ID NO: 37054 - DNA, 530 bp, Artificial Sequence
  chemically treated genomic DNA (Homo sapiens) CpG-island No: 37054
acaactccgcctaaatcttcatcaaaaaatcctcctaaaaatttaaattctctctataaccattaaaacgcaacatatacaccgcaaaccgccgacgaacaaaacgaaccaaactctcttaaaatatctcctcatcgacgtcccgacacgaaaccgaaaaaaaattactacaccaaataataacgaactacatccccgaaaacccgattctccaacaaacgcaaaaaaaacaaaacgtcacaataaccgaaaacctaaaaattcgctaatcccgaaactaaaccccgcccaaaaccgccctcttacctccactaattatacaaccgccgctccaaaaccgtacgaataaaaccataccgaccaaaacgccgataaatataacgcaaataacgcgcccactacaaaacccgacgcacgataacgaaatcccaaatactaacgtaaataatacttaaaaccgccaaaaactcgaaaaaacgatccaaatactacaaaaaaaattccataaaatacgcgaaaaccctacttcc

SEQ ID NO: 37055 - DNA, 530 bp, Artificial Sequence
  chemically treated genomic DNA (Homo sapiens) CpG-island No: 37055
gtagtttcgtttgggtttttattagagagtttttttggagatttgggttttttttatagttattgaagcgtagtatgtgtatcgtagatcgtcggcgggtaaggcgggttaggtttttttggagtgtttttttatcggcgtttcggtacggggtcgggaaagagttgttgtattaggtggtaacgagttgtattttcgagggttcggttttttagtaggcgtagagagagtaggacgttatagtgatcgagggtttggaagttcgttaatttcggaattggatttcgtttaaagtcgtttttttgtttttattggttgtgtagtcgtcgttttagagtcgtgcgaatggggttatgtcgattaaagcgtcgatggatgtggcgtaggtagcgcgtttattgtaaggttcggcgtacggtggcggggttttaggtgttgacgtaggtagtgtttgagatcgttagaagttcggaaaagcgatttaggtgttgtagaagggattttatgaggtgcgcgaaggttttattttt

SEQ ID NO: 37056 - DNA, 530 bp, Artificial Sequence
  chemically treated genomic DNA (Homo sapiens) CpG-island No: 37056
aaaaataaaaccttcgcgcacctcataaaatcccttctacaacacctaaatcgcttttccgaacttctaacgatctcaaacactacctacgtcaacacctaaaaccccgccaccgtacgccgaaccttacaataaacgcgctacctacgccacatccatcgacgctttaatcgacataaccccattcgcacgactctaaaacgacgactacacaaccaataaaaacaaaaaaacgactttaaacgaaatccaattccgaaattaacgaacttccaaaccctcgatcactataacgtcctactctctctacgcctactaaaaaaccgaaccctcgaaaatacaactcgttaccacctaatacaacaactctttcccgaccccgtaccgaaacgccgataaaaaaacactccaaaaaaacctaacccgccttacccgccgacgatctacgatacacatactacgcttcaataactataaaaaaaacccaaatctccaaaaaaactctctaataaaaacccaaacgaaactac

SEQ ID NO: 37057 - DNA, 1246 bp, Artificial Sequence
  chemically treated genomic DNA (Homo sapiens) CpG-island No: 37057
tcggttacgggtaagtaagtggtttcgcgttttcgttttttatttaggcggtcggtttggtttcgttatcgttcgtagcgttcgttcggggttcgcgcgggaagagggttttagttttatatgttgcggggtagtttcgggacgcgtagacgttagcgtcgttgagggtcgggttcgggatcggcgcggcgggggtttttagagcggtcggttacgtttttttaggttttaagtttttaatttgttgaatattttagattttaatagtaaaagcggttgacgttttcgcgggtaagcggtttttcggggtttgtagcgttttagggtattcgcgtcgttagttttacgcgcgagttcgcgtaggttttcgggttttcgtacgtttcgaggttttgagtttggacgaacgtaggtcgcgtggaggggtcggcgatttttgttcgagagtcgtttttttttggagggagcgagtataaggcgttcgcgggattcggttcgagtgttcgagcgtggaggggcgggcggttttcggcggtggggtcgttcgtagtgtttttagcgttcgggagggggcgttcggcggagcgtagacgggcgggttatcggcgcgggcgtttttgacgttatcggttcgcggtcgttagggtaacggttttatatcgcgtcgttagagtcgttagttttttgtaatcgttcgatttttcgtttttttttcgttcgcgttcggtcgcgcgtcgttttggcgttaaagcgacgtgtaaatgggaagttgcgtcgggcggcgggggcggggtagggggcggggattatcgggggtcggtatcgggcgcgggtcggggcgggatcgggtcgcgtgcggcggagcgcggcggtttcgggttgatatgcgcgcggtttcggaggtagtagtagcggcgcggtagtcggagtagtaggtattcgagtagtttagcggtcgagcgggcggttttttggtttgggcgtttcggtggcggcggaggtgaggcggcggtagcggcggtagcggcggtagcggcgggtttcgggcgggcggaggtggtcgtcgtgggggttcgcgcgggcgtcgggtcggggttcggggttgtagttatcgcgtagggtttttggttttgcgcgcgcggggttcgcgggcggggatttgatttggaacgtttcgggtttttttttgttggggggtcggggtaggagtgagttcgcggggtttaggggttggggagtcgggggt

SEQ ID NO: 37058 - DNA, 1246 bp, Artificial Sequence
  chemically treated genomic DNA (Homo sapiens) CpG-island No: 37058
acccccgactccccaacccctaaaccccgcgaactcactcctaccccgaccccccaacaaaaaaaaacccgaaacgttccaaatcaaatccccgcccgcgaaccccgcgcgcgcaaaaccaaaaaccctacgcgataactacaaccccgaaccccgacccgacgcccgcgcgaacccccacgacgaccacctccgcccgcccgaaacccgccgctaccgccgctaccgccgctaccgccgcctcacctccgccgccaccgaaacgcccaaaccaaaaaaccgcccgctcgaccgctaaactactcgaatacctactactccgactaccgcgccgctactactacctccgaaaccgcgcgcatatcaacccgaaaccgccgcgctccgccgcacgcgacccgatcccgccccgacccgcgcccgataccgacccccgataatccccgccccctaccccgcccccgccgcccgacgcaacttcccatttacacgtcgctttaacgccaaaacgacgcgcgaccgaacgcgaacgaaaaaaaaacgaaaaatcgaacgattacaaaaaactaacgactctaacgacgcgatataaaaccgttaccctaacgaccgcgaaccgataacgtcaaaaacgcccgcgccgataacccgcccgtctacgctccgccgaacgccccctcccgaacgctaaaaacactacgaacgaccccaccgccgaaaaccgcccgcccctccacgctcgaacactcgaaccgaatcccgcgaacgccttatactcgctccctccaaaaaaaaacgactctcgaacaaaaatcgccgacccctccacgcgacctacgttcgtccaaactcaaaacctcgaaacgtacgaaaacccgaaaacctacgcgaactcgcgcgtaaaactaacgacgcgaataccctaaaacgctacaaaccccgaaaaaccgcttacccgcgaaaacgtcaaccgcttttactattaaaatctaaaatattcaacaaattaaaaacttaaaacctaaaaaaacgtaaccgaccgctctaaaaacccccgccgcgccgatcccgaacccgaccctcaacgacgctaacgtctacgcgtcccgaaactaccccgcaacatataaaactaaaaccctcttcccgcgcgaaccccgaacgaacgctacgaacgataacgaaaccaaaccgaccgcctaaataaaaaacgaaaacgcgaaaccacttacttacccgtaaccga

SEQ ID NO: 37059 - DNA, 1246 bp, Artificial Sequence
  chemically treated genomic DNA (Homo sapiens) CpG-island No: 37059
attttcggttttttagtttttgagtttcgcggatttatttttatttcggttttttaataaaggggagttcgaggcgttttaggttagattttcgttcgcgaatttcgcgcgcgtaaggttagggattttgcgcggtggttgtaatttcgagtttcggttcggcgttcgcgcgagtttttacggcggttattttcgttcgttcggagttcgtcgttgtcgtcgttgtcgtcgttgtcgtcgttttattttcgtcgttatcggagcgtttaggttaggaagtcgttcgttcggtcgttgggttgttcgggtgtttattgtttcggttgtcgcgtcgttgttgttgttttcggggtcgcgcgtatgttagttcggagtcgtcgcgtttcgtcgtacgcggttcggtttcgtttcggttcgcgttcggtgtcgattttcggtagttttcgttttttgtttcgttttcgtcgttcggcgtagttttttatttgtacgtcgttttgacgttagagcgacgcgcggtcgagcgcgggcggagggagagcgggagatcgggcggttgtaagagattggcggttttgacggcgcggtatgaggtcgttgttttggcgatcgcgggtcggtgacgttaggggcgttcgcgtcgatggttcgttcgtttgcgtttcgtcgggcgttttttttcgggcgttgggggtattgcgggcggttttatcgtcgagggtcgttcgtttttttacgttcgggtattcgggtcgggtttcgcgggcgttttgtgttcgttttttttaggaggggacggttttcgggtaggggtcgtcggtttttttacgcggtttgcgttcgtttagatttagagtttcgggacgtgcgggggttcgggggtttgcgcgggttcgcgcgtggggttggcggcgcggatgttttggggcgttgtagatttcgagaggtcgtttgttcgcggggacgttagtcgtttttgttgttaaaatttgaaatgtttagtaagttagaaatttgaaatttaaggaagcgtgatcggtcgttttggaagttttcgtcgcgtcggtttcggattcggtttttagcggcgttggcgtttgcgcgtttcggggttgtttcgtagtatgtggggttgggatttttttttcgcgcgggtttcgggcggacgttgcgggcggtgacggagttaggtcggtcgtttgggtaggggacgggggcgcgggattatttgtttgttcgtggtcga

SEQ ID NO: 37060 - DNA, 1246 bp, Artificial Sequence
  chemically treated genomic DNA (Homo sapiens) CpG-island No: 37060
tcgaccacgaacaaacaaataatcccgcgcccccgtcccctacccaaacgaccgacctaactccgtcaccgcccgcaacgtccgcccgaaacccgcgcgaaaaaaaaatcccaaccccacatactacgaaacaaccccgaaacgcgcaaacgccaacgccgctaaaaaccgaatccgaaaccgacgcgacgaaaacttccaaaacgaccgatcacgcttccttaaatttcaaatttctaacttactaaacatttcaaattttaacaacaaaaacgactaacgtccccgcgaacaaacgacctctcgaaatctacaacgccccaaaacatccgcgccgccaaccccacgcgcgaacccgcgcaaacccccgaacccccgcacgtcccgaaactctaaatctaaacgaacgcaaaccgcgtaaaaaaaccgacgacccctacccgaaaaccgtcccctcctaaaaaaaacgaacacaaaacgcccgcgaaacccgacccgaatacccgaacgtaaaaaaacgaacgaccctcgacgataaaaccgcccgcaatacccccaacgcccgaaaaaaaacgcccgacgaaacgcaaacgaacgaaccatcgacgcgaacgcccctaacgtcaccgacccgcgatcgccaaaacaacgacctcataccgcgccgtcaaaaccgccaatctcttacaaccgcccgatctcccgctctccctccgcccgcgctcgaccgcgcgtcgctctaacgtcaaaacgacgtacaaataaaaaactacgccgaacgacgaaaacgaaacaaaaaacgaaaactaccgaaaatcgacaccgaacgcgaaccgaaacgaaaccgaaccgcgtacgacgaaacgcgacgactccgaactaacatacgcgcgaccccgaaaacaacaacaacgacgcgacaaccgaaacaataaacacccgaacaacccaacgaccgaacgaacgacttcctaacctaaacgctccgataacgacgaaaataaaacgacgacaacgacgacaacgacgacaacgacgaactccgaacgaacgaaaataaccgccgtaaaaactcgcgcgaacgccgaaccgaaactcgaaattacaaccaccgcgcaaaatccctaaccttacgcgcgcgaaattcgcgaacgaaaatctaacctaaaacgcctcgaactcccctttattaaaaaaccgaaataaaaataaatccgcgaaactcaaaaactaaaaaaccgaaaat

SEQ ID NO: 37061 - DNA, 504 bp, Artificial Sequence
  chemically treated genomic DNA (Homo sapiens) CpG-island No: 37061
  unsure (259)
tcgagcgcgtaatatattcggtttttattttcgtatatcgaagcggtttgacggtacgtcgaacggaattcgacgggtatttttcgggagaaataattacgaagcgtaacgcgttacgcgtaggttaagacgaagagacggcgttacggtttattcgtatacgtataggcgtacgcgattacgaatacgcgtagggaggacgttattttttacgcgggaggagagcgtaatagcgatacgcggcggttacgcggatttnacgtcgggcgggttatttatacggattcgatagggtatttttacgaaacgagaggggtaaatatattatatgcgtagacgcggggtttaatcggttcgttcggtttttttttatttgggcgatagaagcggcgggaattattttacgacggaggcgatcggacggaatattaattttacgttcgtagcgtacgatgggcggacgtttttttcgtaagggcgggggttttatttaattagataatt

SEQ ID NO: 37062 - DNA, 504 bp, Artificial Sequence
  chemically treated genomic DNA (Homo sapiens) CpG-island No: 37062
  unsure (246)
aattatctaattaaataaaacccccgcccttacgaaaaaaacgtccgcccatcgtacgctacgaacgtaaaattaatattccgtccgatcgcctccgtcgtaaaataattcccgccgcttctatcgcccaaataaaaaaaaaccgaacgaaccgattaaaccccgcgtctacgcatataatatatttacccctctcgtttcgtaaaaataccctatcgaatccgtataaataacccgcccgacgtnaaatccgcgtaaccgccgcgtatcgctattacgctctcctcccgcgtaaaaaataacgtcctccctacgcgtattcgtaatcgcgtacgcctatacgtatacgaataaaccgtaacgccgtctcttcgtcttaacctacgcgtaacgcgttacgcttcgtaattatttctcccgaaaaatacccgtcgaattccgttcgacgtaccgtcaaaccgcttcgatatacgaaaataaaaaccgaatatattacgcgctcga

SEQ ID NO: 37063 - DNA, 504 bp, Artificial Sequence
  chemically treated genomic DNA (Homo sapiens) CpG-island No: 37063
  unsure (246)
gattgtttaattggatgagattttcgtttttgcggagggggcgttcgtttatcgtgcgttgcgagcgtggggttggtgtttcgttcggtcgttttcgtcgtgaggtagttttcgtcgtttttgtcgtttaaatgaaaggggatcgagcgggtcggttaagtttcgcgtttgcgtatatagtgtgtttgtttttttcgtttcgtgggggtattttgtcgggttcgtatgggtaattcgttcgacgtnaggttcgcgtggtcgtcgcgtgtcgttgttgcgtttttttttcgcgtgagagatagcgttttttttgcgcgtgttcgtaatcgcgtgcgtttatgcgtgtacgagtaggtcgtagcgtcgttttttcgttttagtttacgcgtgacgcgttgcgtttcgtggttgtttttttcgagggatattcgtcgggtttcgttcgacgtgtcgttaggtcgtttcggtgtgcgagggtgaggatcgggtgtgttgcgcgttcgg

SEQ ID NO: 37064 - DNA, 504 bp, Artificial Sequence
  chemically treated genomic DNA (Homo sapiens) CpG-island No: 37064
  unsure (259)
ccgaacgcgcaacacacccgatcctcaccctcgcacaccgaaacgacctaacgacacgtcgaacgaaacccgacgaatatccctcgaaaaaaacaaccacgaaacgcaacgcgtcacgcgtaaactaaaacgaaaaaacgacgctacgacctactcgtacacgcataaacgcacgcgattacgaacacgcgcaaaaaaaacgctatctctcacgcgaaaaaaaaacgcaacaacgacacgcgacgaccacgcgaacctnacgtcgaacgaattacccatacgaacccgacaaaatacccccacgaaacgaaaaaaacaaacacactatatacgcaaacgcgaaacttaaccgacccgctcgatcccctttcatttaaacgacaaaaacgacgaaaactacctcacgacgaaaacgaccgaacgaaacaccaaccccacgctcgcaacgcacgataaacgaacgccccctccgcaaaaacgaaaatctcatccaattaaacaatc

SEQ ID NO: 37065 - DNA, 534 bp, Artificial Sequence
  chemically treated genomic DNA (Homo sapiens) CpG-island No: 37065
gacgtaggacgcgttttttattttgtggagcgttagagttgttaagtgcgttagttgtggagtggcgtagacgagttaagttttggtttgcgtggaggtcgacgatttcgtcgtagattacggatttgtttgggttttagtcgttaaagatttcgttcggtaggtgagtggtttattttgagggtaagttttttcggatcgaggtttttttatggtcgtttagatcgtgagcggtcggggttgttttttttgcggaggatggcgtttaatgagcgtagttgattcgaggtgggcgttggggtacgttttttttttggtatattgtttgaggggtattgaggtgaaagggcggttattgttcgggtcgtttttatatagcggttgtgcgttcgtttttgttagttttaatgtttttattttttggatacgtagaatagtgggtcgggatttttttgattttgttggcgatgcggttgggttttttgtagggcggtcgtagtgattttcgagaagggggttgttgggaggagaagg

SEQ ID NO: 37066 - DNA, 534 bp, Artificial Sequence
  chemically treated genomic DNA (Homo sapiens) CpG-island No: 37066
ccttctcctcccaacaacccccttctcgaaaatcactacgaccgccctacaaaaaacccaaccgcatcgccaacaaaatcaaaaaaatcccgacccactattctacgtatccaaaaaataaaaacattaaaactaacaaaaacgaacgcacaaccgctatataaaaacgacccgaacaataaccgccctttcacctcaatacccctcaaacaatataccaaaaaaaaaacgtaccccaacgcccacctcgaatcaactacgctcattaaacgccatcctccgcaaaaaaaacaaccccgaccgctcacgatctaaacgaccataaaaaaacctcgatccgaaaaaacttaccctcaaaataaaccactcacctaccgaacgaaatctttaacgactaaaacccaaacaaatccgtaatctacgacgaaatcgtcgacctccacgcaaaccaaaacttaactcgtctacgccactccacaactaacgcacttaacaactctaacgctccacaaaataaaaaacgcgtcctacgtc

SEQ ID NO: 37067 - DNA, 534 bp, Artificial Sequence
  chemically treated genomic DNA (Homo sapiens) CpG-island No: 37067
ttttttttttttagtaatttttttttcgggggttattgcggtcgttttataaaaggtttagtcgtatcgttagtaaagttagggagatttcggtttattattttacgtgtttaggagatgaagatattaagattggtagggacgggcgtataatcgttgtgtaaaaacgattcgaatagtgatcgtttttttattttagtattttttaaatagtatgttaaaagggagacgtgttttagcgtttatttcgaattaattgcgtttattagacgttatttttcgtaaagagagtagtttcggtcgtttacgatttgagcggttatgaagaagtttcgattcgagaaggtttgtttttaaagtgagttatttatttatcggacggggtttttggcggttgagatttagataggttcgtagtttgcgacggagtcgtcgatttttacgtagattaggatttaattcgtttacgttattttataattgacgtatttagtagttttggcgttttataaaatggagggcgcgttttacgtt

SEQ ID NO: 37068 - DNA, 534 bp, Artificial Sequence
  chemically treated genomic DNA (Homo sapiens) CpG-island No: 37068
aacgtaaaacgcgccctccattttataaaacgccaaaactactaaatacgtcaattataaaataacgtaaacgaattaaatcctaatctacgtaaaaatcgacgactccgtcgcaaactacgaacctatctaaatctcaaccgccaaaaaccccgtccgataaataaataactcactttaaaaacaaaccttctcgaatcgaaacttcttcataaccgctcaaatcgtaaacgaccgaaactactctctttacgaaaaataacgtctaataaacgcaattaattcgaaataaacgctaaaacacgtctcccttttaacatactatttaaaaaatactaaaataaaaaaacgatcactattcgaatcgtttttacacaacgattatacgcccgtccctaccaatcttaatatcttcatctcctaaacacgtaaaataataaaccgaaatctccctaactttactaacgatacgactaaaccttttataaaacgaccgcaataacccccgaaaaaaaaattactaaaaaaaaaaaa

SEQ ID NO: 37069 - DNA, 854 bp, Artificial Sequence
  chemically treated genomic DNA (Homo sapiens) CpG-island No: 37069
ttagattttcgatgcgttcgtttttgcgttacgtgattttttgtttgtttggtcgcgcgatttcgttttcgggttcgggttgttcggagttgttcgcgttgttgaggtcggcgggcggggcggggcggggcggggcgcgtagtaggtggagtaggcggttcgggtaggggcgtggtttgttatgaggggcgtggtttggcgggggtgtggtcggaagtttaaagtggtttggtcgtcggggcgggtcgtggagcggttagtcgcggcgatttttttttcgtttttggagtgttatcgttattatgtttttaatggtttcggttggtcggggtttgggggtcgtgtggtttttaatttacgtgtaggtgacggtgttgaggcgcgggtttggcgttaagggttcgggggtacgagcgagcgtacgcggtgatttaggtgggtaaggagaagtacgttatttcgtgtcggagcgtagtttggcgcgtgtggcgcgaggaggttattttcgagttgttatcgttgttgtttttcggattcgcggtcgtcgttattttgtagtttatcgtgttgtatcgcgcgttgttcggtttcgataagtttttgggtcgcgtcgaggtggatttgcgggatttgtatcgcgattagggtcgtaggaagacgtagtgagtgcgggcggggaggggagggttcggtttgggggcgcggatttttcggtagggcggtttgggcgttggatttttcgagagtaagtcgggtagtagcggggaaggtttttcgggacggagttttcggtcggtgttggtgtttttatttggtttttttttttgcggttgtttcgtttagttttgttagtt

SEQ ID NO: 37070 - DNA, 854 bp, Artificial Sequence
  chemically treated genomic DNA (Homo sapiens) CpG-island No: 37070
aactaacaaaactaaacgaaacaaccgcaaaaaaaaaaaccaaataaaaacaccaacaccgaccgaaaactccgtcccgaaaaaccttccccgctactacccgacttactctcgaaaaatccaacgcccaaaccgccctaccgaaaaatccgcgcccccaaaccgaaccctcccctccccgcccgcactcactacgtcttcctacgaccctaatcgcgatacaaatcccgcaaatccacctcgacgcgacccaaaaacttatcgaaaccgaacaacgcgcgatacaacacgataaactacaaaataacgacgaccgcgaatccgaaaaacaacaacgataacaactcgaaaataacctcctcgcgccacacgcgccaaactacgctccgacacgaaataacgtacttctccttacccacctaaatcaccgcgtacgctcgctcgtacccccgaacccttaacgccaaacccgcgcctcaacaccgtcacctacacgtaaattaaaaaccacacgacccccaaaccccgaccaaccgaaaccattaaaaacataataacgataacactccaaaaacgaaaaaaaaatcgccgcgactaaccgctccacgacccgccccgacgaccaaaccactttaaacttccgaccacacccccgccaaaccacgcccctcataacaaaccacgcccctacccgaaccgcctactccacctactacgcgccccgccccgccccgccccgcccgccgacctcaacaacgcgaacaactccgaacaacccgaacccgaaaacgaaatcgcgcgaccaaacaaacaaaaaatcacgtaacgcaaaaacgaacgcatcgaaaatctaa

SEQ ID NO: 37071 - DNA, 854 bp, Artificial Sequence
  chemically treated genomic DNA (Homo sapiens) CpG-island No: 37071
agttggtagagttgggcgggatagtcgtagaaggggaagttaggtgagaatattagtatcggtcgagggtttcgtttcgaaaggtttttttcgttgttgttcggtttattttcgaagggtttagcgtttagatcgttttgtcggagggttcgcgtttttaggtcgggttttttttttttcgttcgtatttattgcgtttttttgcggttttggtcgcggtgtagatttcgtaggtttatttcggcgcggtttaggaatttgtcgaggtcgagtagcgcgcggtgtagtacggtgagttgtagggtggcggcggtcgcgggttcggaggatagtagcgatggtagttcgaaggtggttttttcgcgttatacgcgttaggttgcgtttcgatacggagtggcgtatttttttttgtttatttggattatcgcgtacgttcgttcgtgttttcgggtttttggcgttaggttcgcgttttagtatcgttatttgtacgtgggttggggattatacggtttttaggtttcggttagtcgagattattagggatatggtgacgataatattttagaagcgaggagaagatcgtcgcgattggtcgttttacggttcgtttcggcgattaggttattttaagttttcggttatattttcgttaagttacgttttttatggtaagttacgtttttgttcgagtcgtttgttttatttgttgcgcgtttcgtttcgtttcgtttcgttcgtcggttttagtagcgcgggtagtttcgggtaattcgggttcggaggcggggtcgcgcggttaggtaggtaggggattacgtgacgtaggggcgggcgtatcgagaatttaa

SEQ ID NO: 37072 - DNA, 854 bp, Artificial Sequence
  chemically treated genomic DNA (Homo sapiens) CpG-island No: 37072
ttaaattctcgatacgcccgcccctacgtcacgtaatcccctacctacctaaccgcgcgaccccgcctccgaacccgaattacccgaaactacccgcgctactaaaaccgacgaacgaaacgaaacgaaacgaaacgcgcaacaaataaaacaaacgactcgaacaaaaacgtaacttaccataaaaaacgtaacttaacgaaaatataaccgaaaacttaaaataacctaatcgccgaaacgaaccgtaaaacgaccaatcgcgacgatcttctcctcgcttctaaaatattatcgtcaccatatccctaataatctcgactaaccgaaacctaaaaaccgtataatccccaacccacgtacaaataacgatactaaaacgcgaacctaacgccaaaaacccgaaaacacgaacgaacgtacgcgataatccaaataaacaaaaaaaaatacgccactccgtatcgaaacgcaacctaacgcgtataacgcgaaaaaaccaccttcgaactaccatcgctactatcctccgaacccgcgaccgccgccaccctacaactcaccgtactacaccgcgcgctactcgacctcgacaaattcctaaaccgcgccgaaataaacctacgaaatctacaccgcgaccaaaaccgcaaaaaaacgcaataaatacgaacgaaaaaaaaaaaacccgacctaaaaacgcgaaccctccgacaaaacgatctaaacgctaaacccttcgaaaataaaccgaacaacaacgaaaaaaacctttcgaaacgaaaccctcgaccgatactaatattctcacctaacttccccttctacgactatcccgcccaactctaccaact

SEQ ID NO: 37073 - DNA, 704 bp, Artificial Sequence
  chemically treated genomic DNA (Homo sapiens) CpG-island No: 37073
gcgcggtcgtcggttaggcgggtattttcggcggagcgtagttttatcggggtcggggttagagacgcgacggcgtcggcggagatttttcgggcggaaagcggtttagtttttacgtagtaagcgtagtggcgcgtagttattacgaaaattcgcgcgtagacgaagagtattacgagaagaggaaggtagaaggagacggaggaggatagtagtacgtagggtatgttggaggcgaaggtatagtagcgcgggttggagtggtagcgtgtttcggcgtcgtttttacgcgttattattggtttatgatgggcgtaaacgatatcgcggtcgatacgatttatattaggattatagttgttcgggcgtagcgtttggtgattagtgcgtcgtaacgtagcgggttggttatagttaggtagcggtttacggttagggcgtatagggtttcgatgttggcggttatatatagtacgtttatcgaggtttatagttcgtagttagtggcgtttaacggttagtggttagttagcgttaaggtggtcgtcggcggtattattaggagttttattattaggtcggttgcggttagcgaagttacgaatacgttggttatggtttggagtttcggagtttaggcgatggttacgatgattagtaggttgttttttacggtggttagtatcgttagcgttagtagggtt

SEQ ID NO: 37074 - DNA, 704 bp, Artificial Sequence
  chemically treated genomic DNA (Homo sapiens) CpG-island No: 37074
aaccctactaacgctaacgatactaaccaccgtaaaaaacaacctactaatcatcgtaaccatcgcctaaactccgaaactccaaaccataaccaacgtattcgtaacttcgctaaccgcaaccgacctaataataaaactcctaataataccgccgacgaccaccttaacgctaactaaccactaaccgttaaacgccactaactacgaactataaacctcgataaacgtactatatataaccgccaacatcgaaaccctatacgccctaaccgtaaaccgctacctaactataaccaacccgctacgttacgacgcactaatcaccaaacgctacgcccgaacaactataatcctaatataaatcgtatcgaccgcgatatcgtttacgcccatcataaaccaataataacgcgtaaaaacgacgccgaaacacgctaccactccaacccgcgctactataccttcgcctccaacataccctacgtactactatcctcctccgtctccttctaccttcctcttctcgtaatactcttcgtctacgcgcgaattttcgtaataactacgcgccactacgcttactacgtaaaaactaaaccgctttccgcccgaaaaatctccgccgacgccgtcgcgtctctaaccccgaccccgataaaactacgctccgccgaaaatacccgcctaaccgacgaccgcgc

SEQ ID NO: 37075 - DNA, 704 bp, Artificial Sequence
  chemically treated genomic DNA (Homo sapiens) CpG-island No: 37075
ggttttgttggcgttggcggtgttggttatcgtgggaggtaatttgttggttatcgtggttatcgtttggatttcgagattttagattatgattaacgtgttcgtgatttcgttggtcgtagtcgatttggtgatgggatttttggtggtgtcgtcggcggttattttggcgttgattggttattggtcgttgggcgttattggttgcgagttgtggatttcggtggacgtgttgtgtgtgatcgttagtatcgaaattttgtgcgttttggtcgtggatcgttatttggttgtgattaattcgttgcgttacggcgtattggttattaagcgttgcgttcggatagttgtggttttggtgtgggtcgtgtcggtcgcggtgtcgtttgcgtttattatgagttagtggtggcgcgtaggggcgacgtcgaggtacgttgttattttaattcgcgttgttgtgttttcgtttttaatatgttttacgtgttgttgttttttttcgtttttttttattttttttttttcgtgatgtttttcgtttacgcgcgggttttcgtggtggttacgcgttattgcgtttgttgcgtgggagttgggtcgtttttcgttcgaggagttttcgtcggcgtcgtcgcgtttttggtttcggtttcggtggagttgcgtttcgtcgaaggtgttcgtttggtcggcggtcgcgt

SEQ ID NO: 37076 - DNA, 704 bp, Artificial Sequence
  chemically treated genomic DNA (Homo sapiens) CpG-island No: 37076
acgcgaccgccgaccaaacgaacaccttcgacgaaacgcaactccaccgaaaccgaaaccaaaaacgcgacgacgccgacgaaaactcctcgaacgaaaaacgacccaactcccacgcaacaaacgcaataacgcgtaaccaccacgaaaacccgcgcgtaaacgaaaaacatcacgaaaaaaaaaaaataaaaaaaaacgaaaaaaaacaacaacacgtaaaacatattaaaaacgaaaacacaacaacgcgaattaaaataacaacgtacctcgacgtcgcccctacgcgccaccactaactcataataaacgcaaacgacaccgcgaccgacacgacccacaccaaaaccacaactatccgaacgcaacgcttaataaccaatacgccgtaacgcaacgaattaatcacaaccaaataacgatccacgaccaaaacgcacaaaatttcgatactaacgatcacacacaacacgtccaccgaaatccacaactcgcaaccaataacgcccaacgaccaataaccaatcaacgccaaaataaccgccgacgacaccaccaaaaatcccatcaccaaatcgactacgaccaacgaaatcacgaacacgttaatcataatctaaaatctcgaaatccaaacgataaccacgataaccaacaaattacctcccacgataaccaacaccgccaacgccaacaaaacc

SEQ ID NO: 37077 - DNA, 820 bp, Artificial Sequence
  chemically treated genomic DNA (Homo sapiens) CpG-island No: 37077
ggattttcgcgcggttttgagtcgtcgtttttaatttagttaaggattaatttaggcgagttatttcgttcgttatttttatattcgtttttgttagcgtggcgggagggatttcggacggaggggtagtcgttgcggggcggcgttagcgttcgtgcggaagagttcgtgagtagacgggagtgggtcggggggcggcgggggattttacgtggaagtagcgttttggagttgggtggggttgcggcgcggattataaattttaggggcgtggggcgggagaggcggaaggggcgttttggggcggggcgggacggggcgaggcggagcgaggttggaggcgcgggagggtagcgagaggttcgcgggtgtagcgtataggagattatgttcgggggtagtagttgtagttagattttaagtcgggttattttcgttattcgtcgggtggtgttcggcgacggcgtgtagttttcgttcggggattatagtacgattttcggcggtacgttttttagtattatttcgggaggtaggcgcgggtttggcgacgcgtttgtcggtttttgggcgggcgggaggatcgggaatcgcggattggatcgggtgtttaggtttaagggcgtcgtgattggaaagaacggaaaaggggtatcggagagatagcgagggttatggaagtggtcgttcgttttttttttgagtgcgttttttagattcgagttataaattgtttcgtttgttttttttttttgttaggtgttagatagttgatatttaataaatacgtacgtttttaggatagttatatgtcgagttg

SEQ ID NO: 37078 - DNA, 820 bp, Artificial Sequence
  chemically treated genomic DNA (Homo sapiens) CpG-island No: 37078
caactcgacatataactatcctaaaaacgtacgtatttattaaatatcaactatctaacacctaacaaaaaaaaaaaacaaacgaaacaatttataactcgaatctaaaaaacgcactcaaaaaaaaaacgaacgaccacttccataaccctcgctatctctccgataccccttttccgttctttccaatcacgacgcccttaaacctaaacacccgatccaatccgcgattcccgatcctcccgcccgcccaaaaaccgacaaacgcgtcgccaaacccgcgcctacctcccgaaataatactaaaaaacgtaccgccgaaaatcgtactataatccccgaacgaaaactacacgccgtcgccgaacaccacccgacgaataacgaaaataacccgacttaaaatctaactacaactactacccccgaacataatctcctatacgctacacccgcgaacctctcgctaccctcccgcgcctccaacctcgctccgcctcgccccgtcccgccccgccccaaaacgccccttccgcctctcccgccccacgcccctaaaatttataatccgcgccgcaaccccacccaactccaaaacgctacttccacgtaaaatcccccgccgccccccgacccactcccgtctactcacgaactcttccgcacgaacgctaacgccgccccgcaacgactacccctccgtccgaaatccctcccgccacgctaacaaaaacgaatataaaaataacgaacgaaataactcgcctaaattaatccttaactaaattaaaaacgacgactcaaaaccgcgcgaaaatcc

SEQ ID NO: 37079 - DNA, 820 bp, Artificial Sequence
  chemically treated genomic DNA (Homo sapiens) CpG-island No: 37079
tagttcggtatgtggttgttttggaggcgtgcgtgtttgttaggtgttagttgtttgatatttaatagaaagaggaaataaacggggtagtttgtaattcgggtttggaagacgtatttagaggggaagcgggcggttatttttatgattttcgttgttttttcgatgtttttttttcgttttttttaattacggcgtttttgagtttggatattcggtttaattcgcgattttcgattttttcgttcgtttaggagtcggtaagcgcgtcgttaagttcgcgtttatttttcggggtggtgttgaagagcgtgtcgtcgggggtcgtgttgtagttttcgggcgggagttgtacgtcgtcgtcgagtattattcggcgagtggcggggatggttcggtttggggtttggttgtagttgttgttttcggatatggttttttgtgcgttgtattcgcgaatttttcgttgttttttcgcgtttttagtttcgtttcgtttcgtttcgtttcgtttcgttttaggacgtttttttcgtttttttcgttttacgtttttgggatttgtagttcgcgtcgtagttttatttagttttaggacgttgtttttacgtgggatttttcgtcgtttttcgatttattttcgtttgtttacgggttttttcgtacgggcgttggcgtcgtttcgtagcgattgttttttcgttcggggtttttttcgttacgttggtagggacggatatggggatggcgggcgggatagttcgtttaaattaatttttggttgggttgggggcggcgatttaggatcgcgcggagattt

SEQ ID NO: 37080 - DNA, 820 bp, Artificial Sequence
  chemically treated genomic DNA (Homo sapiens) CpG-island No: 37080
aaatctccgcgcgatcctaaatcgccgcccccaacccaaccaaaaattaatttaaacgaactatcccgcccgccatccccatatccgtccctaccaacgtaacgaaaaaaaccccgaacgaaaaaacaatcgctacgaaacgacgccaacgcccgtacgaaaaaacccgtaaacaaacgaaaataaatcgaaaaacgacgaaaaatcccacgtaaaaacaacgtcctaaaactaaataaaactacgacgcgaactacaaatcccaaaaacgtaaaacgaaaaaaacgaaaaaaacgtcctaaaacgaaacgaaacgaaacgaaacgaaacgaaactaaaaacgcgaaaaaacaacgaaaaattcgcgaatacaacgcacaaaaaaccatatccgaaaacaacaactacaaccaaaccccaaaccgaaccatccccgccactcgccgaataatactcgacgacgacgtacaactcccgcccgaaaactacaacacgacccccgacgacacgctcttcaacaccaccccgaaaaataaacgcgaacttaacgacgcgcttaccgactcctaaacgaacgaaaaaatcgaaaatcgcgaattaaaccgaatatccaaactcaaaaacgccgtaattaaaaaaaacgaaaaaaaaacatcgaaaaaacaacgaaaatcataaaaataaccgcccgcttcccctctaaatacgtcttccaaacccgaattacaaactaccccgtttatttcctctttctattaaatatcaaacaactaacacctaacaaacacgcacgcctccaaaacaaccacataccgaacta

SEQ ID NO: 37081 - DNA, 949 bp, Artificial Sequence
  chemically treated genomic DNA (Homo sapiens) CpG-island No: 37081
tgtcgtcggtttttatttaggtcgaggtggttcggttttatgtatcgcgacgtaacgcggggaggtagataaggtatagggcggcgtttataatttatgttaattcgttttatgtgttcgtcgaggcggtataaatcgtcgtgacgattagcggtttaatgatcgaagttaggttggtaagagtcgcgagcgatttttgaagttgtttttgatggtcgttatttatttgtttggatagtatggtttgtaacgcgggtatttcgatgtcgtcggaagcgagaagaattataatggggaaggttatttagtttcgcgtcgcgaacgttagtaagacgtagtttagcgcgtcggtcgttatgtcggcgataatggtttgtttttcgtcgaaacgtttggtggcgggattagtgacgaaggtttgagcgagggcgtgtaagatttcgaatatcgtaagcgataggtcgattatcgtcgcgttttagcgaaagcggttttcgtcgaaaatgatttagagcgttgtcggtatttgttttacgagttgtatgataaagaagatagttataagtgcggcgacgatagttatgtttcgcgtttatcggaaggagttgattgggttgaaggtttttaagggtatcggtcgacgtttttttttatgcgatttttgtattaggaagtagtttagtagtaggttgaggtcgttgagtatcgtcgtcgtaaggaatggtgtatgtaaggagatggcgtttaatagtttttcggttacggggtttgttattatatttacgtcgaaataagcgtttatgagttcgaagtggcgagttcgattttttttatcggtgatgtcggcgatataggcgttagtaatcgtatttgtggcgtcggtgatgtcggttacgatgcgttcggcgtagaggatttattattgatttttaattaggtattttttttt

SEQ ID NO: 37082 - DNA, 949 bp, Artificial Sequence
  chemically treated genomic DNA (Homo sapiens) CpG-island No: 37082
aaaaaaaaatacctaattaaaaatcaataataaatcctctacgccgaacgcatcgtaaccgacatcaccgacgccacaaatacgattactaacgcctatatcgccgacatcaccgataaaaaaaatcgaactcgccacttcgaactcataaacgcttatttcgacgtaaatataataacaaaccccgtaaccgaaaaactattaaacgccatctccttacatacaccattccttacgacgacgatactcaacgacctcaacctactactaaactacttcctaatacaaaaatcgcataaaaaaaaacgtcgaccgatacccttaaaaaccttcaacccaatcaactccttccgataaacgcgaaacataactatcgtcgccgcacttataactatcttctttatcatacaactcgtaaaacaaataccgacaacgctctaaatcattttcgacgaaaaccgctttcgctaaaacgcgacgataatcgacctatcgcttacgatattcgaaatcttacacgccctcgctcaaaccttcgtcactaatcccgccaccaaacgtttcgacgaaaaacaaaccattatcgccgacataacgaccgacgcgctaaactacgtcttactaacgttcgcgacgcgaaactaaataaccttccccattataattcttctcgcttccgacgacatcgaaatacccgcgttacaaaccatactatccaaacaaataaataacgaccatcaaaaacaacttcaaaaatcgctcgcgactcttaccaacctaacttcgatcattaaaccgctaatcgtcacgacgatttataccgcctcgacgaacacataaaacgaattaacataaattataaacgccgccctataccttatctacctccccgcgttacgtcgcgatacataaaaccgaaccacctcgacctaaataaaaaccgacgaca

SEQ ID NO: 37083 - DNA, 949 bp, Artificial Sequence
  chemically treated genomic DNA (Homo sapiens) CpG-island No: 37083
aaaaaaaaatatttaattgaaagttaataatagattttttacgtcggacgtatcgtggtcggtattatcggcgttataggtgcggttgttggcgtttatatcgtcgatattatcgatggggaagatcgggttcgttatttcgggtttatgagcgtttgtttcggcgtgggtatggtggtaggtttcgtggtcgggggattgttgggcgttatttttttgtatgtattattttttgcggcggcggtgtttaacggttttaatttattattgggttgttttttaatgtaggagtcgtataagggagagcgtcgatcgatgtttttgagagtttttaatttagttagtttttttcggtgggcgcggggtatgattatcgtcgtcgtatttatgattgttttttttattatgtaattcgtaggataggtgtcggtagcgttttgggttattttcggcgaggatcgttttcgttggagcgcgacgatgatcggtttgtcgtttgcggtattcggaattttgtacgttttcgtttaagttttcgttattggtttcgttattaaacgtttcggcgagaagtaggttattatcgtcggtatggcggtcgacgcgttgggttacgttttgttggcgttcgcgacgcgaggttggatggttttttttattatgatttttttcgttttcggcggtatcgggatgttcgcgttgtaggttatgttgtttaggtaggtagatgacgattattagggatagttttaaggatcgttcgcggtttttattagtttaatttcgattattggatcgttgatcgttacggcgatttatgtcgtttcggcgagtatatggaacgggttggtatggattgtaggcgtcgttttatattttgtttgttttttcgcgttgcgtcgcggtgtatggagtcgggttatttcgatttgaatggaagtcggcggta

SEQ ID NO: 37084 - DNA, 949 bp, Artificial Sequence
  chemically treated genomic DNA (Homo sapiens) CpG-island No: 37084
taccgccgacttccattcaaatcgaaataacccgactccatacaccgcgacgcaacgcgaaaaaacaaacaaaatataaaacgacgcctacaatccataccaacccgttccatatactcgccgaaacgacataaatcgccgtaacgatcaacgatccaataatcgaaattaaactaataaaaaccgcgaacgatccttaaaactatccctaataatcgtcatctacctacctaaacaacataacctacaacgcgaacatcccgataccgccgaaaacgaaaaaaatcataataaaaaaaaccatccaacctcgcgtcgcgaacgccaacaaaacgtaacccaacgcgtcgaccgccataccgacgataataacctacttctcgccgaaacgtttaataacgaaaccaataacgaaaacttaaacgaaaacgtacaaaattccgaataccgcaaacgacaaaccgatcatcgtcgcgctccaacgaaaacgatcctcgccgaaaataacccaaaacgctaccgacacctatcctacgaattacataataaaaaaaacaatcataaatacgacgacgataatcataccccgcgcccaccgaaaaaaactaactaaattaaaaactctcaaaaacatcgatcgacgctctcccttatacgactcctacattaaaaaacaacccaataataaattaaaaccgttaaacaccgccgccgcaaaaaataatacatacaaaaaaataacgcccaacaatcccccgaccacgaaacctaccaccatacccacgccgaaacaaacgctcataaacccgaaataacgaacccgatcttccccatcgataatatcgacgatataaacgccaacaaccgcacctataacgccgataataccgaccacgatacgtccgacgtaaaaaatctattattaactttcaattaaatattttttttt

SEQ ID NO: 37085 - DNA, 567 bp, Artificial Sequence
  chemically treated genomic DNA (Homo sapiens) CpG-island No: 37085
gcggcgtcggggcgcgcggggcgaatttcggcggcggtcggggagttgggggagagtcgcggaaggcgggcggtgggggtacggcgtagggagtttgcgggggtgtgcgtaatagcgttagaatttagttaggtagggtgggcgcgggcgttaggggacggtcgcggcgcggtgttggggcgcggggagtgcgaaaggtaggaggagggtttaggggttcgggcgttgggggcggcggcggggtcgggagcggggttaggtattttaggggcggcgttagtagtttttcgggcgttggggtcgcggggtttacggaggtggcgggcggggggatggagaagagtttcgtgaagttgggtatcgagtcgttgataaacgttacgtttttatagacgtgttgcgggaaggttttgttagcggattggtttttttcgggtttagggatttcggttgaagcgatttgcgacgtgcgtacgtggtacgggaagtttttgttggtcgttgatgggcgggttatgatttgaggttagggttaggagtaggtgtgagaggtattgttaggtcgga

SEQ ID NO: 37086 - DNA, 567 bp, Artificial Sequence
  chemically treated genomic DNA (Homo sapiens) CpG-island No: 37086
tccgacctaacaatacctctcacacctactcctaaccctaacctcaaatcataacccgcccatcaacgaccaacaaaaacttcccgtaccacgtacgcacgtcgcaaatcgcttcaaccgaaatccctaaacccgaaaaaaaccaatccgctaacaaaaccttcccgcaacacgtctataaaaacgtaacgtttatcaacgactcgatacccaacttcacgaaactcttctccatccccccgcccgccacctccgtaaaccccgcgaccccaacgcccgaaaaactactaacgccgcccctaaaatacctaaccccgctcccgaccccgccgccgcccccaacgcccgaacccctaaaccctcctcctacctttcgcactccccgcgccccaacaccgcgccgcgaccgtcccctaacgcccgcgcccaccctacctaactaaattctaacgctattacgcacacccccgcaaactccctacgccgtacccccaccgcccgccttccgcgactctcccccaactccccgaccgccgccgaaattcgccccgcgcgccccgacgccgc

SEQ ID NO: 37087 - DNA, 567 bp, Artificial Sequence
  chemically treated genomic DNA (Homo sapiens) CpG-island No: 37087
ttcggtttgatagtgttttttatatttgtttttggttttggttttagattatgattcgtttattagcggttaataagaatttttcgtattacgtgcgtacgtcgtagatcgttttagtcggagtttttggattcggagggagttaattcgttgataaggttttttcgtagtacgtttatgggaacgtgacgtttattagcgattcggtgtttaattttacggagtttttttttattttttcgttcgttattttcgtaagtttcgcggttttagcgttcgaggagttgttggcgtcgtttttggagtatttgatttcgttttcggtttcgtcgtcgtttttagcgttcggatttttgagttttttttttgtttttcgtatttttcgcgttttaatatcgcgtcgcgatcgttttttggcgttcgcgtttattttgtttgattgggttttggcgttgttgcgtatattttcgtagattttttgcgtcgtgtttttatcgttcgtttttcgcggtttttttttagtttttcggtcgtcgtcggagttcgtttcgcgcgtttcgacgtcgt

SEQ ID NO: 37088 - DNA, 567 bp, Artificial Sequence
  chemically treated genomic DNA (Homo sapiens) CpG-island No: 37088
acgacgtcgaaacgcgcgaaacgaactccgacgacgaccgaaaaactaaaaaaaaaccgcgaaaaacgaacgataaaaacacgacgcaaaaaatctacgaaaatatacgcaacaacgccaaaacccaatcaaacaaaataaacgcgaacgccaaaaaacgatcgcgacgcgatattaaaacgcgaaaaatacgaaaaacaaaaaaaaaactcaaaaatccgaacgctaaaaacgacgacgaaaccgaaaacgaaatcaaatactccaaaaacgacgccaacaactcctcgaacgctaaaaccgcgaaacttacgaaaataacgaacgaaaaaataaaaaaaaactccgtaaaattaaacaccgaatcgctaataaacgtcacgttcccataaacgtactacgaaaaaaccttatcaacgaattaactccctccgaatccaaaaactccgactaaaacgatctacgacgtacgcacgtaatacgaaaaattcttattaaccgctaataaacgaatcataatctaaaaccaaaaccaaaaacaaatataaaaaacactatcaaaccgaa

SEQ ID NO: 37089 - DNA, 541 bp, Artificial Sequence
  chemically treated genomic DNA (Homo sapiens) CpG-island No: 37089
ttcgcgtcggtcgttattttttcggtttcggtgatcgagtacgcgtgtttttttattagtttttgaaacgtgatggttttcgagttcgcggcgttggtgatttgtaaatatagtaatcgttagattggtcgtattcgttttttttttttttcggattttttcgttttttttgttttattgtcgggcgggatcgtcggacgtattagcgtagcggtcgaggtttggggtgggaggtttagggttgcgtttttttgtatttggagaattttttttatttcgtttaaatgtttgaacgtcgagaatattagagaaaaggcggaatgtaattttttcgcggaacgagtataggtattttcgtgtgaatagcgtatttacggatttttgtaggttgggaagggcgggaaagggcgtacggtcgagagagggttggagggggttttcgatggcgtagggaaagggcgtacggtcgagagagggtcggagggggttttcgatggcgtagggttgatatttagatagttttgagtggtttagggatatt

SEQ ID NO: 37090 - DNA, 541 bp, Artificial Sequence
  chemically treated genomic DNA (Homo sapiens) CpG-island No: 37090
aatatccctaaaccactcaaaactatctaaatatcaaccctacgccatcgaaaaccccctccgaccctctctcgaccgtacgccctttccctacgccatcgaaaaccccctccaaccctctctcgaccgtacgccctttcccgcccttcccaacctacaaaaatccgtaaatacgctattcacacgaaaatacctatactcgttccgcgaaaaaattacattccgccttttctctaatattctcgacgttcaaacatttaaacgaaataaaaaaaattctccaaatacaaaaaaacgcaaccctaaacctcccaccccaaacctcgaccgctacgctaatacgtccgacgatcccgcccgacaataaaacaaaaaaaacgaaaaaatccgaaaaaaaaaaaaaacgaatacgaccaatctaacgattactatatttacaaatcaccaacgccgcgaactcgaaaaccatcacgtttcaaaaactaataaaaaaacacgcgtactcgatcaccgaaaccgaaaaaataacgaccgacgcgaa

SEQ ID NO: 37091 - DNA, 541 bp, Artificial Sequence
  chemically treated genomic DNA (Homo sapiens) CpG-island No: 37091
agtgtttttgggttatttaaggttgtttgggtattagttttgcgttatcgaggatttttttcggttttttttcggtcgtgcgttttttttttgcgttatcgaggattttttttagttttttttcggtcgtgcgttttttttcgttttttttagtttgtagaaattcgtggatgcgttatttatacgggaatgtttgtgttcgtttcgcgagagggttgtatttcgttttttttttggtattttcggcgtttaagtatttgaacggggtaggaaaggttttttaagtgtaagaaagcgtagttttgagttttttattttaggtttcggtcgttgcgttagtgcgttcggcggtttcgttcggtagtaggatagagggagcgagggagttcgggaggaagggagagcgggtgcggttagtttgacggttgttgtgtttgtagattattagcgtcgcggattcggaggttattacgttttagaagttggtgaaggggtacgcgtattcggttatcggagtcgaggaggtaacggtcggcgcgga

SEQ ID NO: 37092 - DNA, 541 bp, Artificial Sequence
  chemically treated genomic DNA (Homo sapiens) CpG-island No: 37092
tccgcgccgaccgttacctcctcgactccgataaccgaatacgcgtaccccttcaccaacttctaaaacgtaataacctccgaatccgcgacgctaataatctacaaacacaacaaccgtcaaactaaccgcacccgctctcccttcctcccgaactccctcgctccctctatcctactaccgaacgaaaccgccgaacgcactaacgcaacgaccgaaacctaaaataaaaaactcaaaactacgctttcttacacttaaaaaacctttcctaccccgttcaaatacttaaacgccgaaaataccaaaaaaaaaacgaaatacaaccctctcgcgaaacgaacacaaacattcccgtataaataacgcatccacgaatttctacaaactaaaaaaaacgaaaaaaaacgcacgaccgaaaaaaaactaaaaaaaatcctcgataacgcaaaaaaaaaacgcacgaccgaaaaaaaaccgaaaaaaatcctcgataacgcaaaactaatacccaaacaaccttaaataacccaaaaacact

SEQ ID NO: 37093 - DNA, 1216 bp, Artificial Sequence
  chemically treated genomic DNA (Homo sapiens) CpG-island No: 37093
cgcgggcggttcgtttgatttcggagtagttggaggaattcgtttcgaggttagggtttcgtcgcgtttttacgacggttgtgggcgtagagtttagaggatggagttttttttttttgaaattcgttcgaagttcggaaagtttcggttttttcgcgcgggttgcggtttttaggtttttttttcgacgcgttcgagggcgcggattagttttcggtacgcgatttcgtatattttcgggttcgacgttttggtcgttcgtttatttatcggtattattttggattcgaatcgtatggaagcgggtggttagattgcggtttcggtcgagttgaggtgtttcggagggtcgcggatgcgggggaggggagcggagagcgaggtcgttcggatttgttgcgaggcggcggcggcggtagcggcggcgcgcgggttcgaagggtttttcgcgcgggttggggtattaataagtttcgggttttttcgtttcggtcgggttttttgacgcggttttgttttttcgacgttcgtgacggtcggggttttttttttcgtttcgaaattaattaatttcgggtcgggttttagtcgagttcgtgtcggttttcgtttttcgcgtcgatttcgttcgcggcgcgttcggcggtttgggggaggggcggtcgcgggaacgggagttgcgcgcgtttgcgcgggttcggttgggtagacggggagcggcgggagtcggtcgtttttttttttttcgtttcggattgaagtgcggtcggggtcgcgcggcggagcggttggagcgcgcgttttttagcggagtcggggtaattggaaggtcgcgttttaggaaaataggatggtagtgaatggtatcgagtcgttttagggttgtcgtcgttattttttcggcggtttcgagtcgtgcgaggtaggggattttttgtttttagaatagggcgttcgacgttgggcgcgtggatagagtttttcggcggtcgcgtcgttgggttaggcggagagaggcggacggattttaggggaggttcgggttacgtcgcggaaattattcgattttttggaggcggttaggatcgattttgtttcgataaaatggagtttttcgtgtggttttagttcgcggcgcgtttttagagttttttagtgattcggttttcggattgttcgttttttattttatttgtcgttgtttaaattttaattt

SEQ ID NO: 37094 - DNA, 1216 bp, Artificial Sequence
  chemically treated genomic DNA (Homo sapiens) CpG-island No: 37094
aaattaaaatttaaacaacgacaaataaaataaaaaacgaacaatccgaaaaccgaatcactaaaaaactctaaaaacgcgccgcgaactaaaaccacacgaaaaactccattttatcgaaacaaaatcgatcctaaccgcctccaaaaaatcgaataatttccgcgacgtaacccgaacctcccctaaaatccgtccgcctctctccgcctaacccaacgacgcgaccgccgaaaaactctatccacgcgcccaacgtcgaacgccctattctaaaaacaaaaaatcccctacctcgcacgactcgaaaccgccgaaaaaataacgacgacaaccctaaaacgactcgataccattcactaccatcctattttcctaaaacgcgaccttccaattaccccgactccgctaaaaaacgcgcgctccaaccgctccgccgcgcgaccccgaccgcacttcaatccgaaacgaaaaaaaaaaaaacgaccgactcccgccgctccccgtctacccaaccgaacccgcgcaaacgcgcgcaactcccgttcccgcgaccgcccctcccccaaaccgccgaacgcgccgcgaacgaaatcgacgcgaaaaacgaaaaccgacacgaactcgactaaaacccgacccgaaattaattaatttcgaaacgaaaaaaaaaaccccgaccgtcacgaacgtcgaaaaaacaaaaccgcgtcaaaaaacccgaccgaaacgaaaaaacccgaaacttattaataccccaacccgcgcgaaaaacccttcgaacccgcgcgccgccgctaccgccgccgccgcctcgcaacaaatccgaacgacctcgctctccgctcccctcccccgcatccgcgaccctccgaaacacctcaactcgaccgaaaccgcaatctaaccacccgcttccatacgattcgaatccaaaataataccgataaataaacgaacgaccaaaacgtcgaacccgaaaatatacgaaatcgcgtaccgaaaactaatccgcgccctcgaacgcgtcgaaaaaaaaacctaaaaaccgcaacccgcgcgaaaaaaccgaaactttccgaacttcgaacgaatttcaaaaaaaaaaaactccatcctctaaactctacgcccacaaccgtcgtaaaaacgcgacgaaaccctaacctcgaaacgaattcctccaactactccgaaatcaaacgaaccgcccgcg

SEQ ID NO: 37095 - DNA, 1216 bp, Artificial Sequence
  chemically treated genomic DNA (Homo sapiens) CpG-island No: 37095
aaattagaatttggataacggtaaatgagatgaaaggcgaataattcgaaagtcggattattgaggagttttgggaacgcgtcgcgagttgaagttatacggggaattttattttgtcgggatagggtcggttttggtcgtttttagggagtcgggtagttttcgcggcgtggttcgggttttttttgaagttcgttcgttttttttcgtttggtttagcggcgcggtcgtcggaggattttgtttacgcgtttaacgtcgggcgttttgttttgaaggtaaagggttttttgtttcgtacgattcggagtcgtcgaggaggtgacggcggtagttttggggcggttcggtgttatttattattattttgtttttttgaggcgcggttttttaattgtttcggtttcgttaggaggcgcgcgttttagtcgtttcgtcgcgcggtttcgatcgtattttagttcggggcgaagaaagaaaaggcggtcggttttcgtcgtttttcgtttatttagtcgggttcgcgtaggcgcgcgtagttttcgttttcgcggtcgttttttttttaggtcgtcgggcgcgtcgcgggcggggtcggcgcggggggcgggagtcggtacgggttcggttggggttcgattcgggattagttggtttcggagcggaggagggagtttcgatcgttacgagcgtcgaagagataaagtcgcgttagggggttcggtcggggcgggggagttcggggtttgttggtgttttagttcgcgcggagggtttttcggattcgcgcgtcgtcgttgtcgtcgtcgtcgtttcgtaataggttcgggcggtttcgtttttcgtttttttttttcgtattcgcgatttttcggggtattttagttcggtcggggtcgtagtttggttattcgtttttatgcggttcgggtttaagatgatgtcggtaagtgggcgagcggttagggcgtcgggttcggaagtgtgcggggtcgcgtgtcgggggttggttcgcgttttcgggcgcgtcggggaaggagtttgggggtcgtagttcgcgcggaggggtcggggtttttcgagtttcgagcgggttttaggaaggggaggttttattttttgggttttgcgtttatagtcgtcgtgggggcgcggcgagattttaatttcgaggcgggtttttttagttgtttcggagttaggcgagtcgttcgcg

SEQ ID NO: 37096 - DNA, 1216 bp, Artificial Sequence
  chemically treated genomic DNA (Homo sapiens) CpG-island No: 37096
cgcgaacgactcgcctaactccgaaacaactaaaaaaacccgcctcgaaattaaaatctcgccgcgcccccacgacgactataaacgcaaaacccaaaaaataaaacctccccttcctaaaacccgctcgaaactcgaaaaaccccgacccctccgcgcgaactacgacccccaaactccttccccgacgcgcccgaaaacgcgaaccaacccccgacacgcgaccccgcacacttccgaacccgacgccctaaccgctcgcccacttaccgacatcatcttaaacccgaaccgcataaaaacgaataaccaaactacgaccccgaccgaactaaaataccccgaaaaatcgcgaatacgaaaaaaaaaaacgaaaaacgaaaccgcccgaacctattacgaaacgacgacgacgacaacgacgacgcgcgaatccgaaaaaccctccgcgcgaactaaaacaccaacaaaccccgaactcccccgccccgaccgaaccccctaacgcgactttatctcttcgacgctcgtaacgatcgaaactccctcctccgctccgaaaccaactaatcccgaatcgaaccccaaccgaacccgtaccgactcccgccccccgcgccgaccccgcccgcgacgcgcccgacgacctaaaaaaaaaacgaccgcgaaaacgaaaactacgcgcgcctacgcgaacccgactaaataaacgaaaaacgacgaaaaccgaccgccttttctttcttcgccccgaactaaaatacgatcgaaaccgcgcgacgaaacgactaaaacgcgcgcctcctaacgaaaccgaaacaattaaaaaaccgcgcctcaaaaaaacaaaataataataaataacaccgaaccgccccaaaactaccgccgtcacctcctcgacgactccgaatcgtacgaaacaaaaaaccctttaccttcaaaacaaaacgcccgacgttaaacgcgtaaacaaaatcctccgacgaccgcgccgctaaaccaaacgaaaaaaaacgaacgaacttcaaaaaaaacccgaaccacgccgcgaaaactacccgactccctaaaaacgaccaaaaccgaccctatcccgacaaaataaaattccccgtataacttcaactcgcgacgcgttcccaaaactcctcaataatccgactttcgaattattcgcctttcatctcatttaccgttatccaaattctaattt

SEQ ID NO: 37097 - DNA, 585 bp, Artificial Sequence
  chemically treated genomic DNA (Homo sapiens) CpG-island No: 37097
ggtgcgcgcgggttgtcggcgtggtgtaggtggggatcgtagtgcgcgtggcgggtgtcgagggcgcgcgggtcggggggggggtgcggcggtcgtggggggttcgcggggttggcggcggcggcggcgcgcgggaggcggttggtcgggcgggcgggtcgcgcggtgggggggtgtggggggcggggcgcgggcggggggggcgcgggggttgcggggggagggcgcgtggggggtcggcgggggggcgcgcgcggggcgcgggcggcggcgggttggggggttgaggcgacggggcgggcgtcggtcggacgggcgcgggggcgcggggcgcgtttgtcgggggggtgggtcgcgtgcgggggcggcgcggtgtcgtgcggggtttggcggtgggaggcggcggggtaggggcgcggggtgcggggcgcgaggcgggcgagggcgggggcggggcgtgtgcgcgcgcgcggggggaggtgggcgaggagggggtggggcgagggtgggtaggagggggcgtgttggaggttgtggggggtggggcgcggcggcgtcgagcgtgcgggggggcggggtgacggg

SEQ ID NO: 37098 - DNA, 585 bp, Artificial Sequence
  chemically treated genomic DNA (Homo sapiens) CpG-island No: 37098
cccgtcaccccgcccccccgcacgctcgacgccgccgcgccccaccccccacaacctccaacacgccccctcctacccaccctcgccccaccccctcctcgcccacctccccccgcgcgcgcgcacacgccccgcccccgccctcgcccgcctcgcgccccgcaccccgcgcccctaccccgccgcctcccaccgccaaaccccgcacgacaccgcgccgcccccgcacgcgacccacccccccgacaaacgcgccccgcgcccccgcgcccgtccgaccgacgcccgccccgtcgcctcaaccccccaacccgccgccgcccgcgccccgcgcgcgcccccccgccgaccccccacgcgccctccccccgcaacccccgcgccccccccgcccgcgccccgccccccacacccccccaccgcgcgacccgcccgcccgaccaaccgcctcccgcgcgccgccgccgccgccaaccccgcgaaccccccacgaccgccgcaccccccccccgacccgcgcgccctcgacacccgccacgcgcactacgatccccacctacaccacgccgacaacccgcgcgcacc

SEQ ID NO: 37099 - DNA, 585 bp, Artificial Sequence
  chemically treated genomic DNA (Homo sapiens) CpG-island No: 37099
ttcgttatttcgttttttcgtacgttcgacgtcgtcgcgttttattttttataatttttaatacgtttttttttatttattttcgttttatttttttttcgtttattttttttcgcgcgcgcgtatacgtttcgttttcgttttcgttcgtttcgcgtttcgtatttcgcgtttttatttcgtcgttttttatcgttaggtttcgtacggtatcgcgtcgttttcgtacgcggtttattttttcgataggcgcgtttcgcgttttcgcgttcgttcggtcgacgttcgtttcgtcgttttaattttttagttcgtcgtcgttcgcgtttcgcgcgcgttttttcgtcggttttttacgcgtttttttttcgtagttttcgcgtttttttcgttcgcgtttcgttttttatatttttttatcgcgcggttcgttcgttcggttaatcgtttttcgcgcgtcgtcgtcgtcgttagtttcgcgggttttttacggtcgtcgtatttttttttcgattcgcgcgttttcgatattcgttacgcgtattgcgatttttatttgtattacgtcggtaattcgcgcgtatt

SEQ ID NO: 37100 - DNA, 585 bp, Artificial Sequence
  chemically treated genomic DNA (Homo sapiens) CpG-island No: 37100
aatacgcgcgaattaccgacgtaatacaaataaaaatcgcaatacgcgtaacgaatatcgaaaacgcgcgaatcgaaaaaaaaatacgacgaccgtaaaaaacccgcgaaactaacgacgacgacgacgcgcgaaaaacgattaaccgaacgaacgaaccgcgcgataaaaaaatataaaaaacgaaacgcgaacgaaaaaaacgcgaaaactacgaaaaaaaaacgcgtaaaaaaccgacgaaaaaacgcgcgcgaaacgcgaacgacgacgaactaaaaaattaaaacgacgaaacgaacgtcgaccgaacgaacgcgaaaacgcgaaacgcgcctatcgaaaaaataaaccgcgtacgaaaacgacgcgataccgtacgaaacctaacgataaaaaacgacgaaataaaaacgcgaaatacgaaacgcgaaacgaacgaaaacgaaaacgaaacgtatacgcgcgcgcgaaaaaaaataaacgaaaaaaaaataaaacgaaaataaataaaaaaaaacgtattaaaaattataaaaaataaaacgcgacgacgtcgaacgtacgaaaaaacgaaataacgaa

SEQ ID NO: 37101 - DNA, 777 bp, Artificial Sequence
  chemically treated genomic DNA (Homo sapiens) CpG-island No: 37101
agtgttgcgcgcgtcggtttacgaggcggcgtaggttacgtcgttataaaaaatggaaaaattgtcgtcgcgttttgataacgttattttggtgaagcgcgaagatcgttagttagtgtatagttttaagttgcgcggcgtatacgttatgatggcgggtttgacggaagaatagaaagcgtacggcgtgattattgtttttgcgggtaattacgcgtagggcgtcgcgtttttttttgcgcggttaggcgtgaaggttttgatcgttatgttaatcgttatcgtcgatattaaagtcgacgcggtgcgcggtttcggcggcgaagtgttgttttacggcgcgaattttgatgaagcgaaagttaaagcgatcgaattgttatagtagtaggggtttatttgggtgtcgtcgttcgattattcgatggtgattgtcgggtaaggtacgttggcgttggaattgttttagtaggacgtttatttcgatcgcgtatttgtgttagtcgggcggcggcggtttggttgttggcgtggcggtgttgattaaataattgatgtcgtaaattaaagtgatcgtcgtagaagcggaagatttcgtttgtttgaaagtagcgttggatgcgggttattcggttgatttgtcgcgcgtagggttatttgttgaaggcgtagcggtaaaacgtatcggtgacgaaatttttcgttatagtataggagtatttcgacgatattattatcgtcgatagcgatgcgatttgtgcggcgatgaaggattta

SEQ ID NO: 37102 - DNA, 777 bp, Artificial Sequence
  chemically treated genomic DNA (Homo sapiens) CpG-island No: 37102
taaatccttcatcgccgcacaaatcgcatcgctatcgacgataataatatcgtcgaaatactcctatactataacgaaaaatttcgtcaccgatacgttttaccgctacgccttcaacaaataaccctacgcgcgacaaatcaaccgaataacccgcatccaacgctactttcaaacaaacgaaatcttccgcttctacgacgatcactttaatttacgacatcaattatttaatcaacaccgccacgccaacaaccaaaccgccgccgcccgactaacacaaatacgcgatcgaaataaacgtcctactaaaacaattccaacgccaacgtaccttacccgacaatcaccatcgaataatcgaacgacgacacccaaataaacccctactactataacaattcgatcgctttaactttcgcttcatcaaaattcgcgccgtaaaacaacacttcgccgccgaaaccgcgcaccgcgtcgactttaatatcgacgataacgattaacataacgatcaaaaccttcacgcctaaccgcgcaaaaaaaaacgcgacgccctacgcgtaattacccgcaaaaacaataatcacgccgtacgctttctattcttccgtcaaacccgccatcataacgtatacgccgcgcaacttaaaactatacactaactaacgatcttcgcgcttcaccaaaataacgttatcaaaacgcgacgacaatttttccattttttataacgacgtaacctacgccgcctcgtaaaccgacgcgcgcaacact

SEQ ID NO: 37103 - DNA, 777 bp, Artificial Sequence
  chemically treated genomic DNA (Homo sapiens) CpG-island No: 37103
taaattttttatcgtcgtatagatcgtatcgttatcgacggtgatgatgtcgtcgagatatttttgtgttataacggaaggtttcgttatcgatgcgttttatcgttacgtttttagtaaatagttttacgcgcggtagattaatcggatgattcgtatttagcgttgtttttaggtaggcggagtttttcgtttttacggcgattattttgatttgcggtattagttgtttgattagtatcgttacgttagtagttagatcgtcgtcgttcgattggtataaatacgcggtcgagatgggcgttttgttggagtagttttagcgttagcgtgttttgttcggtaattattatcggatggtcgaacggcggtatttaggtgaatttttgttgttgtgatagttcgatcgttttggttttcgttttattaaagttcgcgtcgtggagtagtatttcgtcgtcgaagtcgcgtatcgcgtcgattttgatgtcggcggtggcggttggtataacgattagggtttttacgtttaatcgcgtagaagaaaacgcgacgttttgcgcgtggttattcgtagaagtagtgattacgtcgtgcgttttttgttttttcgttaggttcgttattatggcgtatgcgtcgcgtagtttaaagttgtgtattggttggcgattttcgcgttttattagaatgacgttattaagacgcgacgatagtttttttattttttgtagcggcgtaatttgcgtcgtttcgtaaatcggcgcgcgtagtatt

SEQ ID NO: 37104 - DNA, 777 bp, Artificial Sequence
  chemically treated genomic DNA (Homo sapiens) CpG-island No: 37104
aatactacgcgcgccgatttacgaaacgacgcaaattacgccgctacaaaaaataaaaaaactatcgtcgcgtcttaataacgtcattctaataaaacgcgaaaatcgccaaccaatacacaactttaaactacgcgacgcatacgccataataacgaacctaacgaaaaaacaaaaaacgcacgacgtaatcactacttctacgaataaccacgcgcaaaacgtcgcgttttcttctacgcgattaaacgtaaaaaccctaatcgttataccaaccgccaccgccgacatcaaaatcgacgcgatacgcgacttcgacgacgaaatactactccacgacgcgaactttaataaaacgaaaaccaaaacgatcgaactatcacaacaacaaaaattcacctaaataccgccgttcgaccatccgataataattaccgaacaaaacacgctaacgctaaaactactccaacaaaacgcccatctcgaccgcgtatttataccaatcgaacgacgacgatctaactactaacgtaacgatactaatcaaacaactaataccgcaaatcaaaataatcgccgtaaaaacgaaaaactccgcctacctaaaaacaacgctaaatacgaatcatccgattaatctaccgcgcgtaaaactatttactaaaaacgtaacgataaaacgcatcgataacgaaaccttccgttataacacaaaaatatctcgacgacatcatcaccgtcgataacgatacgatctatacgacgataaaaaattta

SEQ ID NO: 37105 - DNA, 698 bp, Artificial Sequence
  chemically treated genomic DNA (Homo sapiens) CpG-island No: 37105
ttcgcgcgtatttgcgttgtttattaggaggcgttttcgtattcgtttcgtaggcgtttttcgtcgtcggtcggtgcgtgggtacgcgtagaaatcgttaggtggcgacggtttttttttttacgcgcggacgtcggcgtgggtcgacgcggtcggagcgttcgcgcgtgcgtagagtcgaggttaggttgttttcgaagcggggcggggcgaagcggggcggggtcgagtagggcggggcgggggtttgaggtgatttttaagtcgcggggcggtttcggtggtgcggggaaatcgaaagtgggcggcggtcgcggcggggtttttggcggagacggcggtaggagttgggtttagagacgcggggacgggtcgtgggttttcggaacgaggtgagtgtaggttttgcgggtttcgggcgcgataggtgtcgggcgacgtcggacgagatttcgggcgggcgcggcgtatttgggttatcggtgggatcgcggttagggtcgggggttttaataggttcggggttttttttttgtagtcgtaggggattgttttcgtttcgacgtttgggaatcgggttgggcgtcgggggagttggagttttagagcgttgtgttttaaatttttgaagggattttgtttcgggtcgggcgtttacgcgggagtcggacggagttttttgtcgtttcggaagtttt

SEQ ID NO: 37106 - DNA, 698 bp, Artificial Sequence
  chemically treated genomic DNA (Homo sapiens) CpG-island No: 37106
aaaacttccgaaacgacaaaaaactccgtccgactcccgcgtaaacgcccgacccgaaacaaaatcccttcaaaaatttaaaacacaacgctctaaaactccaactcccccgacgcccaacccgattcccaaacgtcgaaacgaaaacaatcccctacgactacaaaaaaaaaaccccgaacctattaaaacccccgaccctaaccgcgatcccaccgataacccaaatacgccgcgcccgcccgaaatctcgtccgacgtcgcccgacacctatcgcgcccgaaacccgcaaaacctacactcacctcgttccgaaaacccacgacccgtccccgcgtctctaaacccaactcctaccgccgtctccgccaaaaaccccgccgcgaccgccgcccactttcgatttccccgcaccaccgaaaccgccccgcgacttaaaaatcacctcaaacccccgccccgccctactcgaccccgccccgcttcgccccgccccgcttcgaaaacaacctaacctcgactctacgcacgcgcgaacgctccgaccgcgtcgacccacgccgacgtccgcgcgtaaaaaaaaaaaccgtcgccacctaacgatttctacgcgtacccacgcaccgaccgacgacgaaaaacgcctacgaaacgaatacgaaaacgcctcctaataaacaacgcaaatacgcgcgaa

SEQ ID NO: 37107 - DNA, 698 bp, Artificial Sequence
  chemically treated genomic DNA (Homo sapiens) CpG-island No: 37107
agagttttcgaggcggtaggaggtttcgttcgattttcgcgtgaacgttcggttcggagtagggtttttttagagatttaaaatataacgttttggaattttaattttttcggcgtttagttcggtttttaggcgtcggggcgggggtaattttttgcggttgtagggaaaaggtttcgagtttgttggagttttcggttttggtcgcggttttatcggtgatttaggtgcgtcgcgttcgttcgaaatttcgttcgacgtcgttcggtatttgtcgcgttcggagttcgtaggatttgtatttatttcgtttcgggggtttacggttcgttttcgcgtttttgggtttagtttttgtcgtcgttttcgttaggggtttcgtcgcggtcgtcgtttattttcggttttttcgtattatcggagtcgtttcgcggtttgggaattattttaagttttcgtttcgttttgttcggtttcgtttcgtttcgtttcgtttcgtttcgagggtagtttggtttcggttttgcgtacgcgcgggcgtttcggtcgcgtcggtttacgtcggcgttcgcgcgtgggaagggaaatcgtcgttatttagcggtttttgcgcgtgtttacgtatcggtcggcggcggaagacgtttgcggggcgggtgcgggagcgttttttggtggataacgtaggtacgcgcggg

SEQ ID NO: 37108 - DNA, 698 bp, Artificial Sequence
  chemically treated genomic DNA (Homo sapiens) CpG-island No: 37108
cccgcgcgtacctacgttatccaccaaaaaacgctcccgcacccgccccgcaaacgtcttccgccgccgaccgatacgtaaacacgcgcaaaaaccgctaaataacgacgatttcccttcccacgcgcgaacgccgacgtaaaccgacgcgaccgaaacgcccgcgcgtacgcaaaaccgaaaccaaactaccctcgaaacgaaacgaaacgaaacgaaacgaaaccgaacaaaacgaaacgaaaacttaaaataattcccaaaccgcgaaacgactccgataatacgaaaaaaccgaaaataaacgacgaccgcgacgaaacccctaacgaaaacgacgacaaaaactaaacccaaaaacgcgaaaacgaaccgtaaacccccgaaacgaaataaatacaaatcctacgaactccgaacgcgacaaataccgaacgacgtcgaacgaaatttcgaacgaacgcgacgcacctaaatcaccgataaaaccgcgaccaaaaccgaaaactccaacaaactcgaaaccttttccctacaaccgcaaaaaattacccccgccccgacgcctaaaaaccgaactaaacgccgaaaaaattaaaattccaaaacgttatattttaaatctctaaaaaaaccctactccgaaccgaacgttcacgcgaaaatcgaacgaaacctcctaccgcctcgaaaactct

SEQ ID NO: 37109 - DNA, 838 bp, Artificial Sequence
  chemically treated genomic DNA (Homo sapiens) CpG-island No: 37109
cggaatttgtcgttgagcgaatgtattcgtttagattcgatttttttttttagggcgcggttttcgggtaggtttttttacgagttttttattcgagtagagtagggtttcgcggaggcgtcgatcgggcgcgaggttttttgtttgtttaggtttttcggcgattttgagcgaattttttcggggttagtttcgtttaggttgagaagggaacggcggaaggcggagtgcgttttcgggagttcggagttgggattgtagtttttatggggttaagtttacggggtgcggtcgcgcggttaatgagcgttttttatgttttgacggtgtttcgtttcgcggcgttgtcgcgttttcgttttttcgttttttcgtcgcgcgttcgggatttcgattagttttgatcgtacgggggtcgcggttacggggcgtaggggttatggtgcgcggtaggatttttcggttttcggttcgggacgtgcgtttttttacgtcgtttgggggttacggcgcggacgttatggtaagcgcggacgttatggtaagcgcggacgttatggtaagcgcggacgttatggtaagcgcggacgttatggtaagcgcggacgttatggtaagcgcggacgttatggtaagcgcggacgttatggtaagcgcggacgttatggtacgcgcggtttgcggttcgggtttttttcgtttcgtcgattgtagttttgcgggtttcgggtagtttttcgatttcgaatttattgtttttgtatagtgggaggcgcgtttgggggagatattcgttttttatgttttggagtaattgtataagtatttagaaattttt

SEQ ID NO: 37110 - DNA, 838 bp, Artificial Sequence
  chemically treated genomic DNA (Homo sapiens) CpG-island No: 37110
aaaaatttctaaatacttatacaattactccaaaacataaaaaacgaatatctcccccaaacgcgcctcccactatacaaaaacaataaattcgaaatcgaaaaactacccgaaacccgcaaaactacaatcgacgaaacgaaaaaaacccgaaccgcaaaccgcgcgtaccataacgtccgcgcttaccataacgtccgcgcttaccataacgtccgcgcttaccataacgtccgcgcttaccataacgtccgcgcttaccataacgtccgcgcttaccataacgtccgcgcttaccataacgtccgcgcttaccataacgtccgcgccgtaacccccaaacgacgtaaaaaaacgcacgtcccgaaccgaaaaccgaaaaatcctaccgcgcaccataacccctacgccccgtaaccgcgacccccgtacgatcaaaactaatcgaaatcccgaacgcgcgacgaaaaaacgaaaaaacgaaaacgcgacaacgccgcgaaacgaaacaccgtcaaaacataaaaaacgctcattaaccgcgcgaccgcaccccgtaaacttaaccccataaaaactacaatcccaactccgaactcccgaaaacgcactccgccttccgccgttcccttctcaacctaaacgaaactaaccccgaaaaaattcgctcaaaatcgccgaaaaacctaaacaaacaaaaaacctcgcgcccgatcgacgcctccgcgaaaccctactctactcgaataaaaaactcgtaaaaaaacctacccgaaaaccgcgccctaaaaaaaaaaatcgaatctaaacgaatacattcgctcaacgacaaattccg

SEQ ID NO: 37111 - DNA, 838 bp, Artificial Sequence
  chemically treated genomic DNA (Homo sapiens) CpG-island No: 37111
gaaagtttttggatatttatataattgttttaaggtatgaaaagcgagtgttttttttaggcgcgttttttattgtatagaagtaatgggttcgaagtcgggaagttgttcggggttcgtagagttgtagtcggcggggcgggagggattcgggtcgtaagtcgcgcgtattatggcgttcgcgtttattatggcgttcgcgtttattatggcgttcgcgtttattatggcgttcgcgtttattatggcgttcgcgtttattatggcgttcgcgtttattatggcgttcgcgtttattatggcgttcgcgtttattatggcgttcgcgtcgtggtttttaagcgacgtggggaagcgtacgtttcggatcgagagtcgggagattttgtcgcgtattatggtttttgcgtttcgtggtcgcggttttcgtgcggttaggattggtcgggatttcgagcgcgcggcgggagggcgggagggcgggagcgcggtagcgtcgcgaggcggggtatcgttagggtatagagggcgtttattggtcgcgcggtcgtatttcgtgaatttggttttatgggagttgtagttttagtttcgggttttcgggggcgtatttcgtttttcgtcgttttttttttagtttagacggagttgatttcgagagggttcgtttagggtcgtcggggaatttgggtaggtaggaggtttcgcgttcggtcggcgttttcgcgggattttgttttgttcggatggaagattcgtgaagggatttgttcgggagtcgcgttttagagggagaagtcgggtttgagcgagtgtattcgtttagcggtagatttcg

SEQ ID NO: 37112 - DNA, 838 bp, Artificial Sequence
  chemically treated genomic DNA (Homo sapiens) CpG-island No: 37112
cgaaatctaccgctaaacgaatacactcgctcaaacccgacttctccctctaaaacgcgactcccgaacaaatcccttcacgaatcttccatccgaacaaaacaaaatcccgcgaaaacgccgaccgaacgcgaaacctcctacctacccaaattccccgacgaccctaaacgaaccctctcgaaatcaactccgtctaaactaaaaaaaaaacgacgaaaaacgaaatacgcccccgaaaacccgaaactaaaactacaactcccataaaaccaaattcacgaaatacgaccgcgcgaccaataaacgccctctataccctaacgataccccgcctcgcgacgctaccgcgctcccgccctcccgccctcccgccgcgcgctcgaaatcccgaccaatcctaaccgcacgaaaaccgcgaccacgaaacgcaaaaaccataatacgcgacaaaatctcccgactctcgatccgaaacgtacgcttccccacgtcgcttaaaaaccacgacgcgaacgccataataaacgcgaacgccataataaacgcgaacgccataataaacgcgaacgccataataaacgcgaacgccataataaacgcgaacgccataataaacgcgaacgccataataaacgcgaacgccataataaacgcgaacgccataatacgcgcgacttacgacccgaatccctcccgccccgccgactacaactctacgaaccccgaacaacttcccgacttcgaacccattacttctatacaataaaaaacgcgcctaaaaaaaacactcgcttttcataccttaaaacaattatataaatatccaaaaactttc

SEQ ID NO: 37113 - DNA, 695 bp, Artificial Sequence
  chemically treated genomic DNA (Homo sapiens) CpG-island No: 37113
gtcgatttacgtgtttttttggaagtcggtaggttttacgtattttattacgttcgttttgtgggcgtttacggtgacgaattcgttttttcggagttatttcgggatttcgttagttttttcggaattagaggttagggtttgtttttcggcgttcgggtcgcgtatttttttcggttttcggggagtagtcggggtttttagttagtatgcgcgagaaggagcgtaatttcgaggttcgtatttttcggacgcggaacggggagtcgggcgtcggggtttcgatgtcggggcgttttcgacggcggtttacgagttgttgggggttagggggtttttcggcggggacggtcgtaggcggtggggggtggttgataggcgtttcgggttcggcgttaagggcggtgggtatggatttcggcggtcgttagcgtttaggttcgggttacggcgttcgatagatcgcggtggagacgttgtgtgataagtatcgttataggttttatttacggggttggggggtcgttttgtgttttttgagtcgggttgacgttgtgatagttatgataggcggtgcggaaagtattttggtatgtttgtcgtagatttttaggttcgggacgttatcgtgtggataagaatattaggtttattttcggttgagttgtagtaggacggggtagtagggttgagat

SEQ ID NO: 37114 - DNA, 695 bp, Artificial Sequence
  chemically treated genomic DNA (Homo sapiens) CpG-island No: 37114
atctcaaccctactaccccgtcctactacaactcaaccgaaaataaacctaatattcttatccacacgataacgtcccgaacctaaaaatctacgacaaacataccaaaatactttccgcaccgcctatcataactatcacaacgtcaacccgactcaaaaaacacaaaacgaccccccaaccccgtaaataaaacctataacgatacttatcacacaacgtctccaccgcgatctatcgaacgccgtaacccgaacctaaacgctaacgaccgccgaaatccatacccaccgcccttaacgccgaacccgaaacgcctatcaaccaccccccaccgcctacgaccgtccccgccgaaaaaccccctaacccccaacaactcgtaaaccgccgtcgaaaacgccccgacatcgaaaccccgacgcccgactccccgttccgcgtccgaaaaatacgaacctcgaaattacgctccttctcgcgcatactaactaaaaaccccgactactccccgaaaaccgaaaaaaatacgcgacccgaacgccgaaaaacaaaccctaacctctaattccgaaaaaactaacgaaatcccgaaataactccgaaaaaacgaattcgtcaccgtaaacgcccacaaaacgaacgtaataaaatacgtaaaacctaccgacttccaaaaaaacacgtaaatcgac

SEQ ID NO: 37115 - DNA, 695 bp, Artificial Sequence
  chemically treated genomic DNA (Homo sapiens) CpG-island No: 37115
gttttagttttgttatttcgttttgttgtagtttagtcggagatgggtttgatgtttttgtttatacgatggcgtttcgggtttgaagatttgcgataaatatgttaaagtgtttttcgtatcgtttgttatagttgttatagcgttagttcgatttaggaggtataggacggttttttagtttcgtgagtgaagtttgtagcggtatttgttatatagcgtttttatcgcgatttgtcggacgtcgtggttcgagtttggacgttagcggtcgtcggggtttatgtttatcgtttttgacgtcgagttcgaggcgtttattagttattttttatcgtttacggtcgttttcgtcgaggagttttttggtttttagtagttcgtgagtcgtcgtcgagagcgtttcgatatcgaggtttcggcgttcggtttttcgtttcgcgttcggagggtgcgggtttcggagttgcgttttttttcgcgtatgttggttggggatttcggttgtttttcgggggtcgaggggaatgcgcggttcgggcgtcgggggataggttttggtttttgatttcgaggaagttgacgaggtttcggagtggtttcgagagggcgagttcgttatcgtgggcgtttataaaacgggcgtggtgagatacgtggggtttgtcgatttttaagagggtacgtgggtcggt

SEQ ID NO: 37116 - DNA, 695 bp, Artificial Sequence
  chemically treated genomic DNA (Homo sapiens) CpG-island No: 37116
accgacccacgtaccctcttaaaaatcgacaaaccccacgtatctcaccacgcccgttttataaacgcccacgataacgaactcgccctctcgaaaccactccgaaacctcgtcaacttcctcgaaatcaaaaaccaaaacctatcccccgacgcccgaaccgcgcattcccctcgacccccgaaaaacaaccgaaatccccaaccaacatacgcgaaaaaaaacgcaactccgaaacccgcaccctccgaacgcgaaacgaaaaaccgaacgccgaaacctcgatatcgaaacgctctcgacgacgactcacgaactactaaaaaccaaaaaactcctcgacgaaaacgaccgtaaacgataaaaaataactaataaacgcctcgaactcgacgtcaaaaacgataaacataaaccccgacgaccgctaacgtccaaactcgaaccacgacgtccgacaaatcgcgataaaaacgctatataacaaataccgctacaaacttcactcacgaaactaaaaaaccgtcctatacctcctaaatcgaactaacgctataacaactataacaaacgatacgaaaaacactttaacatatttatcgcaaatcttcaaacccgaaacgccatcgtataaacaaaaacatcaaacccatctccgactaaactacaacaaaacgaaataacaaaactaaaac

SEQ ID NO: 37117 - DNA, 586 bp, Artificial Sequence
  chemically treated genomic DNA (Homo sapiens) CpG-island No: 37117
ttcgtcgtcgggttttacggggatcgcggagtttttttagaggatcgcggcgggggacggcggtattttattcgagttgtttatggcgtttacgttgttcggcggggtaacggtagtttttagggtttttgggcgagcgtcgggattgcgttgcggttcgttgtttagggggttcgatttgtttttcgtattcggagcgtcggaaaaaggaaatcggttcggcggcggcggcggcggcggcggcggggaggttgaggttgggagaaacggggttcgcggagggataaaatttttttttcgcgttgttgagttagcgtcgtcggggttggtcgttcgggggagggtcgacgggggcggtttagttgacgcgttgggttcgttagcgttcgggggttgaggtcgcgtttgttttcgcgtaggatcgtatagatggtttgcgcgttagagggggtcggcgttttttttttttaggttttcgttttcgggtcgcgcgggcgtttttcgggattaggttcgttttaaggagggaggttgacgggttttttgtgggtttagatttttagtattttagtatcggggaatcgtt

SEQ ID NO: 37118 - DNA, 586 bp, Artificial Sequence
  chemically treated genomic DNA (Homo sapiens) CpG-island No: 37118
aacgattccccgatactaaaatactaaaaatctaaacccacaaaaaacccgtcaacctccctccttaaaacgaacctaatcccgaaaaacgcccgcgcgacccgaaaacgaaaacctaaaaaaaaaaaacgccgaccccctctaacgcgcaaaccatctatacgatcctacgcgaaaacaaacgcgacctcaacccccgaacgctaacgaacccaacgcgtcaactaaaccgcccccgtcgaccctcccccgaacgaccaaccccgacgacgctaactcaacaacgcgaaaaaaaaattttatccctccgcgaaccccgtttctcccaacctcaacctccccgccgccgccgccgccgccgccgccgaaccgatttcctttttccgacgctccgaatacgaaaaacaaatcgaaccccctaaacaacgaaccgcaacgcaatcccgacgctcgcccaaaaaccctaaaaactaccgttaccccgccgaacaacgtaaacgccataaacaactcgaataaaataccgccgtcccccgccgcgatcctctaaaaaaactccgcgatccccgtaaaacccgacgacgaa

SEQ ID NO: 37119 - DNA, 586 bp, Artificial Sequence
  chemically treated genomic DNA (Homo sapiens) CpG-island No: 37119
gacgatttttcgatgttagagtattgggggtttgggtttatagggaattcgttagtttttttttttggagcgggtttgatttcgggaggcgttcgcgcggttcggaggcgggaatttagggggagaaggcgtcggttttttttggcgcgtagattatttgtgcggttttgcgcgggggtaggcgcggttttagttttcgggcgttggcggatttagcgcgttagttaggtcgttttcgtcggttttttttcgggcggttagtttcgacggcgttgatttagtaacgcgaggggggagttttgttttttcgcggatttcgttttttttagttttagttttttcgtcgtcgtcgtcgtcgtcgtcgtcgagtcggtttttttttttcggcgtttcgggtgcgagagataggtcgggttttttaggtagcgagtcgtagcgtaatttcggcgttcgtttaaggattttggaagttatcgttatttcgtcgggtagcgtgggcgttatgagtagttcgggtgaggtgtcgtcgtttttcgtcgcggttttttggaggagtttcgcggttttcgtgaggttcggcggcggg

SEQ ID NO: 37120 - DNA, 586 bp, Artificial Sequence
  chemically treated genomic DNA (Homo sapiens) CpG-island No: 37120
cccgccgccgaacctcacgaaaaccgcgaaactcctccaaaaaaccgcgacgaaaaacgacgacacctcacccgaactactcataacgcccacgctacccgacgaaataacgataacttccaaaatccttaaacgaacgccgaaattacgctacgactcgctacctaaaaaacccgacctatctctcgcacccgaaacgccgaaaaaaaaaaaccgactcgacgacgacgacgacgacgacgacgaaaaaactaaaactaaaaaaaacgaaatccgcgaaaaaacaaaactcccccctcgcgttactaaatcaacgccgtcgaaactaaccgcccgaaaaaaaaccgacgaaaacgacctaactaacgcgctaaatccgccaacgcccgaaaactaaaaccgcgcctacccccgcgcaaaaccgcacaaataatctacgcgccaaaaaaaaccgacgccttctccccctaaattcccgcctccgaaccgcgcgaacgcctcccgaaatcaaacccgctccaaaaaaaaaaactaacgaattccctataaacccaaacccccaatactctaacatcgaaaaatcgtc

SEQ ID NO: 37121 - DNA, 602 bp, Artificial Sequence
  chemically treated genomic DNA (Homo sapiens) CpG-island No: 37121
ggtttatcggttttcgtttttttattttgtgttttttttcgttttttcgtttttttttttgttttattttcgcgtgtttttttttttatttttttttttttttcgttgttttttttcgttttcgttcgttttttgttggcgtttttcgtttttgttttgtttttttttcggttttttttttttttttttttttgttttcgtttttgttcgttggtgtttttttttttttttttgtttttttcgtcgttcgtggttgtttttttttttgttttttcgtgtcgttttttttcgttgtcgtttcgttcgtttcgtttttttacgtttttttgttttttttgttcgttttttttgttgtgtcgcgtcgtgttttttcgtttttgttttttgcgttttttggttttcgcgttgttttgtttttttggtttcgtgttttttcggtttttgtcggtcgttggcgtgtcgttttttttttttcgtttcgtcggtgttgttggcgttcgtgttcgttttttgtcgtgttttgttgtttcggttttttttttgtgttttttttagttgtgggtttttcgtcgtattttttcgcggttcgttttgttttgttt

SEQ ID NO: 37122 - DNA, 602 bp, Artificial Sequence
  chemically treated genomic DNA (Homo sapiens) CpG-island No: 37122
aaacaaaacaaaacgaaccgcgaaaaaatacgacgaaaaacccacaactaaaaaaaacacaaaaaaaaaaccgaaacaacaaaacacgacaaaaaacgaacacgaacgccaacaacaccgacgaaacgaaaaaaaaaaaacgacacgccaacgaccgacaaaaaccgaaaaaacacgaaaccaaaaaaacaaaacaacgcgaaaaccaaaaaacgcaaaaaacaaaaacgaaaaaacacgacgcgacacaacaaaaaaaacgaacaaaaaaaacaaaaaaacgtaaaaaaacgaaacgaacgaaacgacaacgaaaaaaaacgacacgaaaaaacaaaaaaaaaaacaaccacgaacgacgaaaaaaacaaaaaaaaaaaaaaaaacaccaacgaacaaaaacgaaaacaaaaaaaaaaaaaaaaaaaaaaccgaaaaaaaaacaaaacaaaaacgaaaaacgccaacaaaaaacgaacgaaaacgaaaaaaaacaacgaaaaaaaaaaaaaaataaaaaaaaaaacacgcgaaaataaaacaaaaaaaaaaacgaaaaaacgaaaaaaaacacaaaataaaaaaacgaaaaccgataaacc

SEQ ID NO: 37123 - DNA, 602 bp, Artificial Sequence
  chemically treated genomic DNA (Homo sapiens) CpG-island No: 37123
gagtagggtaagacgagtcgcgggagggtacggcgaagagtttatagttgaagagggtataaaaggaggatcggagtaataaggtacgatagagaacgagtacgagcgttagtaatatcgacgagacgaagagggagagacggtacgttagcgatcgataaggatcgagagaatacggaattaggagaatagagtagcgcggaggttagaggacgtagagagtagagacgaggaggtacgacgcggtataataaggggagcgaataggggagatagagaagcgtgagggggcgagacgggcgaagcgatagcggaagagagcggtacgagagggtaaagagaggagtagttacgagcggcggagaaaataagaggagaggagagagtattagcgggtagaggcgggaataaaaaggaagaaaaaggaagagtcgagaagaaggtagaataaagacgaaggacgttaataaggggcgagcgaaaacggaggagggtagcgaggagaggaggggaatggggagagagatacgcgagagtagagtaggagggaaggcgggggagcgagagagggtatagagtgaagaggcgggagtcgatgggtt

SEQ ID NO: 37124 - DNA, 602 bp, Artificial Sequence
  chemically treated genomic DNA (Homo sapiens) CpG-island No: 37124
aacccatcgactcccgcctcttcactctataccctctctcgctcccccgccttccctcctactctactctcgcgtatctctctccccattcccctcctctcctcgctaccctcctccgttttcgctcgccccttattaacgtccttcgtctttattctaccttcttctcgactcttcctttttcttcctttttattcccgcctctacccgctaatactctctcctctcctcttattttctccgccgctcgtaactactcctctctttaccctctcgtaccgctctcttccgctatcgcttcgcccgtctcgccccctcacgcttctctatctcccctattcgctccccttattataccgcgtcgtacctcctcgtctctactctctacgtcctctaacctccgcgctactctattctcctaattccgtattctctcgatccttatcgatcgctaacgtaccgtctctccctcttcgtctcgtcgatattactaacgctcgtactcgttctctatcgtaccttattactccgatcctccttttataccctcttcaactataaactcttcgccgtaccctcccgcgactcgtcttaccctactc

SEQ ID NO: 37125 - DNA, 536 bp, Artificial Sequence
  chemically treated genomic DNA (Homo sapiens) CpG-island No: 37125
cgagggtagcgtcgttagtatacgttttagtattatttttttttgacgttcgttttcggatgtttgacgatcgttttcgtttgtcgtttttataaaggggattttttttaatattcgatcgatttttatttcgttttgcgtcgcgcgttttcgtcggtgcgtatatttgttaattttgtgcgtttttaggtttttggagacgtcgagtgaggagttgttttgatcgttcggaatcgattcgtattttatcgcgatatatatcgtagtttcgttttttgtagtttcgtaattatatttttcgcggttttagggggcggtggcgcgtgcggagattttttcggtgtagttatgattttaggtaggagcggagcgttattatcgcgcgtacgcgtcgaaatttcggaaattttttggtatcgattcgttttgtattatagcgtagggcgcgttattttttttttaggtacgatgcgagcgtagtattttgtttgttaattgtgttgttagcgtttatatgtataaagtttgttattaga

SEQ ID NO: 37126 - DNA, 536 bp, Artificial Sequence
  chemically treated genomic DNA (Homo sapiens) CpG-island No: 37126
tctaataacaaactttatacatataaacgctaacaacacaattaacaaacaaaatactacgctcgcatcgtacctaaaaaaaaaataacgcgccctacgctataatacaaaacgaatcgataccaaaaaatttccgaaatttcgacgcgtacgcgcgataataacgctccgctcctacctaaaatcataactacaccgaaaaaatctccgcacgcgccaccgccccctaaaaccgcgaaaaatataattacgaaactacaaaaaacgaaactacgatatatatcgcgataaaatacgaatcgattccgaacgatcaaaacaactcctcactcgacgtctccaaaaacctaaaaacgcacaaaattaacaaatatacgcaccgacgaaaacgcgcgacgcaaaacgaaataaaaatcgatcgaatattaaaaaaaatcccctttataaaaacgacaaacgaaaacgatcgtcaaacatccgaaaacgaacgtcaaaaaaaaataatactaaaacgtatactaacgacgctaccctcg

SEQ ID NO: 37127 - DNA, 536 bp, Artificial Sequence
  chemically treated genomic DNA (Homo sapiens) CpG-island No: 37127
tttgataatagattttgtatatatgaacgttgatagtatagttgatagataggatgttgcgttcgtatcgtatttagaggaaaaatggcgcgttttgcgttgtaatataggacgggtcggtgttagagaattttcgaggtttcggcgcgtacgcgcggtaatgacgtttcgtttttatttggagttatggttgtatcgagagaattttcgtacgcgttatcgttttttggaatcgcgaggggtgtggttgcgaggttgtagaaagcgagattgcggtgtgtgtcgcggtggagtgcggatcgatttcgggcggttagagtagttttttattcggcgtttttaagaatttgggagcgtatagagttgataggtgtacgtatcggcggaggcgcgcggcgtagggcgaggtgggaatcgatcgagtattgggaaaagttttttttataagggcggtaggcgggggcgatcgttagatattcggaggcggacgttagaggagagtggtgttagggcgtgtgttagcgacgttgttttcg

SEQ ID NO: 37128 - DNA, 536 bp, Artificial Sequence
  chemically treated genomic DNA (Homo sapiens) CpG-island No: 37128
cgaaaacaacgtcgctaacacacgccctaacaccactctcctctaacgtccgcctccgaatatctaacgatcgcccccgcctaccgcccttataaaaaaaacttttcccaatactcgatcgattcccacctcgccctacgccgcgcgcctccgccgatacgtacacctatcaactctatacgctcccaaattcttaaaaacgccgaataaaaaactactctaaccgcccgaaatcgatccgcactccaccgcgacacacaccgcaatctcgctttctacaacctcgcaaccacacccctcgcgattccaaaaaacgataacgcgtacgaaaattctctcgatacaaccataactccaaataaaaacgaaacgtcattaccgcgcgtacgcgccgaaacctcgaaaattctctaacaccgacccgtcctatattacaacgcaaaacgcgccatttttcctctaaatacgatacgaacgcaacatcctatctatcaactatactatcaacgttcatatatacaaaatctattatcaaa

SEQ ID NO: 37129 - DNA, 978 bp, Artificial Sequence
  chemically treated genomic DNA (Homo sapiens) CpG-island No: 37129
  unsure (177..178, 186, 285..286, 291, 295..)
ttatcgagtaatttttttagcgttttagaagaacgttggcgtgcgcgcgtttttagtatatggtcgagattgattagatcgatattatcgcgttggtttcgtaataaagatgtcgcgtttttatcgggattattgcggttaggtgcgtttatcgaatagagttacgttacgtttagnntatttagncgttattagcgtatttatcgtcgtcgtatcgtttagtaggtttttatgtattgggtaaaaatggtcgcggcgaaaatttattacgtggttttagggggnntttanttannnggtcgataattaattataggttgcggttgttagcggtgattattatgttatcgtcgattattttttagattattatcgggatatttatcgttagtgcgataattgtttgttagcggaagcgttttatcgtagcgacggcggttttttgttggcgttcgcggcgtttagcgttatttttaatcgttttcgcgtcgtagttcgtttgttttatcgtttgtattaaattttgtggggaggtattgtttattattagcgtagtacgtttcgttaggtttattcgtgtttgagtgacgttcggtacgttttgtagcgtattttgtacgcgggtgatatagttggcgtagtttatgtcgtttagtagtaattgttggttgttatcgttatcggcggtcgttgtcggaagcgttttagaaatcgttgttagtgttttcgacgggattgatgatttcgttagcggtttagtttttgggtggtttatagatgcgttataattcgtttgtttgatggtttcgattagttgttttgtattggtagtttcggtaacgtgcgttttagtgatagatatattcgtttgtttaatattcggacgttgtttaagatttttttttacgcgtttaacgtagtgatcgtaggataggtcgtttagggttaggtcgatagtttgtgatataaaatattttt

SEQ ID NO: 37130 - DNA, 978 bp, Artificial Sequence
  chemically treated genomic DNA (Homo sapiens) CpG-island No: 37130
  unsure (682..683, 688, 693..694, 793, 801..)
aaaaatattttatatcacaaactatcgacctaaccctaaacgacctatcctacgatcactacgttaaacgcgtaaaaaaaaatcttaaacaacgtccgaatattaaacaaacgaatatatctatcactaaaacgcacgttaccgaaactaccaatacaaaacaactaatcgaaaccatcaaacaaacgaattataacgcatctataaaccacccaaaaactaaaccgctaacgaaatcatcaatcccgtcgaaaacactaacaacgatttctaaaacgcttccgacaacgaccgccgataacgataacaaccaacaattactactaaacgacataaactacgccaactatatcacccgcgtacaaaatacgctacaaaacgtaccgaacgtcactcaaacacgaataaacctaacgaaacgtactacgctaataataaacaatacctccccacaaaatttaatacaaacgataaaacaaacgaactacgacgcgaaaacgattaaaaataacgctaaacgccgcgaacgccaacaaaaaaccgccgtcgctacgataaaacgcttccgctaacaaacaattatcgcactaacgataaatatcccgataataatctaaaaaataatcgacgataacataataatcaccgctaacaaccgcaacctataattaattatcgaccnnntaantaaannccccctaaaaccacgtaataaattttcgccgcgaccatttttacccaatacataaaaacctactaaacgatacgacgacgataaatacgctaataacgnctaaatannctaaacgtaacgtaactctattcgataaacgcacctaaccgcaataatcccgataaaaacgcgacatctttattacgaaaccaacgcgataatatcgatctaatcaatctcgaccatatactaaaaacgcgcgcacgccaacgttcttctaaaacgctaaaaaaattactcgataa

SEQ ID NO: 37131 - DNA, 978 bp, Artificial Sequence
  chemically treated genomic DNA (Homo sapiens) CpG-island No: 37131
  unsure (682..683, 688, 693..694, 793, 801..)
aggagtgttttatgttataaattatcgatttgattttggacggtttgttttgcggttattgcgttaaacgcgtgaaagaaagttttgaatagcgttcggatgttgagtaggcggatgtgtttattattgaagcgtacgttatcgggattgttagtgtagaatagttgatcgaaattattaaataagcgggttatgacgtatttgtaagttatttaaaggttaaatcgttggcggagttattaatttcgtcggaagtattgatagcggtttttgaggcgttttcggtagcgatcgtcgatgacgatgatagttagtagttgttgttgagcggtatgagttgcgttagttgtgttattcgcgtataaaatgcgttgtaaagcgtatcgggcgttatttaggtacgggtaaatttggcggagcgtattgcgttggtgatgggtagtgtttttttataagatttagtgtaggcggtggaataagcgggttacggcgcggaagcgattgaagatgacgttaaacgtcgcgagcgttagtaagaaatcgtcgtcgttacgatgaagcgttttcgttggtaggtaattgtcgtattggcggtgggtatttcggtgatggtttgggggatgatcggcgataatatgatggttatcgttgataatcgtagtttgtggttggttatcggttnnntgantaaannttttttggggttacgtgatgggttttcgtcgcggttatttttatttagtgtatggaagtttgttgaacggtgcggcgacgatggatacgttggtggcgnttgggtannttgggcgtggcgtggttttattcgatgagcgtatttggtcgtagtggtttcgatggaagcgcgatatttttattacgaagttagcgcgatgatatcggtttgattaatttcggttatatgttggaagcgcgcgtacgttagcgtttttttaaggcgttggaaaagttattcgataa

SEQ ID NO: 37132 - DNA, 978 bp, Artificial Sequence
  chemically treated genomic DNA (Homo sapiens) CpG-island No: 37132
  unsure (177..178, 186, 285..286, 291, 295..)
ttatcgaataacttttccaacgccttaaaaaaacgctaacgtacgcgcgcttccaacatataaccgaaattaatcaaaccgatatcatcgcgctaacttcgtaataaaaatatcgcgcttccatcgaaaccactacgaccaaatacgctcatcgaataaaaccacgccacgcccaanntacccaancgccaccaacgtatccatcgtcgccgcaccgttcaacaaacttccatacactaaataaaaataaccgcgacgaaaacccatcacgtaaccccaaaaaanntttantcannnaaccgataaccaaccacaaactacgattatcaacgataaccatcatattatcgccgatcatcccccaaaccatcaccgaaatacccaccgccaatacgacaattacctaccaacgaaaacgcttcatcgtaacgacgacgatttcttactaacgctcgcgacgtttaacgtcatcttcaatcgcttccgcgccgtaacccgcttattccaccgcctacactaaatcttataaaaaaacactacccatcaccaacgcaatacgctccgccaaatttacccgtacctaaataacgcccgatacgctttacaacgcattttatacgcgaataacacaactaacgcaactcataccgctcaacaacaactactaactatcatcgtcatcgacgatcgctaccgaaaacgcctcaaaaaccgctatcaatacttccgacgaaattaataactccgccaacgatttaacctttaaataacttacaaatacgtcataacccgcttatttaataatttcgatcaactattctacactaacaatcccgataacgtacgcttcaataataaacacatccgcctactcaacatccgaacgctattcaaaactttctttcacgcgtttaacgcaataaccgcaaaacaaaccgtccaaaatcaaatcgataatttataacataaaacactcct

SEQ ID NO: 37133 - DNA, 642 bp, Artificial Sequence
  chemically treated genomic DNA (Homo sapiens) CpG-island No: 37133
ttatcgcgttgagtgtttgttgtattaacggtagattatcgtttgttagtatcgggatttcgttgtattgtaagttttttatttttagtcggaaattcgggttagcggttttttgcgtattgcgggagttggcgtatagcgttgtatcgttttggttatcgttacgtatggcgattatcggtttgataaaagcgattttattcggcgttgttataatgtatatcgtatcgatacgatcgttattattggtgaattggttatcggttggcgtggtttgtagcgttggattgttggtcgttatgtcggagtcggttgtcgttttgagagtaatcgggttattcgttaaagtaatattagaatcgtcgttaatattcgcgcgtaattcgttggtggaattaaatttttgttgtagaacggtgtcgtcgtttagtttttgttatttttgcgtaaacgtattggttacgcgatcgtttaatgaattgcgtgggattagtattagcggcgtttgtttattttggttacgaatatgacgcgttgtatcgcgcgtttcgtttttcggtgaaagcgcgaagtaataaatattgacgcgattttcgatatttttcggttggtttagtgttagtacgtttagcggagtgttgt

SEQ ID NO: 37134 - DNA, 642 bp, Artificial Sequence
  chemically treated genomic DNA (Homo sapiens) CpG-island No: 37134
acaacactccgctaaacgtactaacactaaaccaaccgaaaaatatcgaaaatcgcgtcaatatttattacttcgcgctttcaccgaaaaacgaaacgcgcgatacaacgcgtcatattcgtaaccaaaataaacaaacgccgctaatactaatcccacgcaattcattaaacgatcgcgtaaccaatacgtttacgcaaaaataacaaaaactaaacgacgacaccgttctacaacaaaaatttaattccaccaacgaattacgcgcgaatattaacgacgattctaatattactttaacgaataacccgattactctcaaaacgacaaccgactccgacataacgaccaacaatccaacgctacaaaccacgccaaccgataaccaattcaccaataataacgatcgtatcgatacgatatacattataacaacgccgaataaaatcgcttttatcaaaccgataatcgccatacgtaacgataaccaaaacgatacaacgctatacgccaactcccgcaatacgcaaaaaaccgctaacccgaatttccgactaaaaataaaaaacttacaatacaacgaaatcccgatactaacaaacgataatctaccgttaatacaacaaacactcaacgcgataa

SEQ ID NO: 37135 - DNA, 642 bp, Artificial Sequence
  chemically treated genomic DNA (Homo sapiens) CpG-island No: 37135
gtaatatttcgttgaacgtattggtattgaattagtcggagaatatcgaaaatcgcgttaatatttgttatttcgcgtttttatcggaagacgaagcgcgcgatgtagcgcgttatattcgtgattagggtaaataagcgtcgttggtgttgattttacgtagtttattgggcgatcgcgtagttaatgcgtttgcgtaagagtggtagaaattgggcggcggtatcgttttgtaataaaaatttggttttattagcgaattacgcgcgggtgttaacggcggttttggtattgttttaacgggtagttcgattatttttagagcgataatcgatttcggtatgacgattaataatttaacgttgtaaattacgttaatcgatgattagtttattaataatggcggtcgtgtcgatgcggtgtatattgtggtaacgtcgggtgaaatcgtttttattaaatcgatgatcgttatgcgtaacggtagttagagcggtgtaacgttgtacgttagttttcgtagtgcgtaagggatcgttggttcggattttcgattggagatggaaggtttgtagtatagcgaaatttcgatgttggtaggcggtaatttatcgttaatgtagtaggtatttagcgcggtga

SEQ ID NO: 37136 - DNA, 642 bp, Artificial Sequence
  chemically treated genomic DNA (Homo sapiens) CpG-island No: 37136
tcaccgcgctaaatacctactacattaacgataaattaccgcctaccaacatcgaaatttcgctatactacaaaccttccatctccaatcgaaaatccgaaccaacgatcccttacgcactacgaaaactaacgtacaacgttacaccgctctaactaccgttacgcataacgatcatcgatttaataaaaacgatttcacccgacgttaccacaatatacaccgcatcgacacgaccgccattattaataaactaatcatcgattaacgtaatttacaacgttaaattattaatcgtcataccgaaatcgattatcgctctaaaaataatcgaactacccgttaaaacaataccaaaaccgccgttaacacccgcgcgtaattcgctaataaaaccaaatttttattacaaaacgataccgccgcccaatttctaccactcttacgcaaacgcattaactacgcgatcgcccaataaactacgtaaaatcaacaccaacgacgcttatttaccctaatcacgaatataacgcgctacatcgcgcgcttcgtcttccgataaaaacgcgaaataacaaatattaacgcgattttcgatattctccgactaattcaataccaatacgttcaacgaaatattac

SEQ ID NO: 37137 - DNA, 670 bp, Artificial Sequence
  chemically treated genomic DNA (Homo sapiens) CpG-island No: 37137
ttcggggcgtaaagtggggtatttgaatttgatcgatagcgatatatcgcgtttgattgcgacgttggaagttttaatttcgttgttgtcgtcggaatatgttagcggcgtgatttgggcgtagagtaagttcggttaattggtgttttatttttgtcggatgcggcgtaaacgttttattcggtttatcgattcggtatttattgtaggtttgataagatgcgttaagtatcgtattaggtattgtgtattaattgtcggatgcggtatcggttgtaggtttgataagacgcgttaagcgtcgtattaggtataaatgtttaatgtttacgattatagcgaaatataggttttcgtttcgttcgttagcgtttttttaattcgcgataacgttttaatttacgcgggtttattacggtttttgatataattatttatcgtcgttatattcggttttatcgaattatcggttttggtaaatggcgttaatttattcggtgtggtatggcgaatggtacgttgttgcggcgttttttagtttttatatatcgtattagtatcggtgaggattattagtttatttgtattaatttgttcggcgagtaacgtagcggcgagatttttatttattattgttttattttttggttcgttatttcggtttacgggt

SEQ ID NO: 37138 - DNA, 670 bp, Artificial Sequence
  chemically treated genomic DNA (Homo sapiens) CpG-island No: 37138
acccgtaaaccgaaataacgaaccaaaaaataaaacaataataaataaaaatctcgccgctacgttactcgccgaacaaattaatacaaataaactaataatcctcaccgatactaatacgatatataaaaactaaaaaacgccgcaacaacgtaccattcgccataccacaccgaataaattaacgccatttaccaaaaccgataattcgataaaaccgaatataacgacgataaataattatatcaaaaaccgtaataaacccgcgtaaattaaaacgttatcgcgaattaaaaaaacgctaacgaacgaaacgaaaacctatatttcgctataatcgtaaacattaaacatttatacctaatacgacgcttaacgcgtcttatcaaacctacaaccgataccgcatccgacaattaatacacaatacctaatacgatacttaacgcatcttatcaaacctacaataaataccgaatcgataaaccgaataaaacgtttacgccgcatccgacaaaaataaaacaccaattaaccgaacttactctacgcccaaatcacgccgctaacatattccgacgacaacaacgaaattaaaacttccaacgtcgcaatcaaacgcgatatatcgctatcgatcaaattcaaataccccactttacgccccgaa

SEQ ID NO: 37139 - DNA, 670 bp, Artificial Sequence
  chemically treated genomic DNA (Homo sapiens) CpG-island No: 37139
gttcgtgggtcggaatgacggattagggagtgaagtagtgatggataaagatttcgtcgttgcgttgttcgtcgagtagattaatgtagatggattggtgatttttatcgatgttgatgcggtatatgaaaattggggaacgtcgtagtaacgtgttattcgttatgttatatcggatgagttagcgttatttgttaaagtcgatggttcgatggggtcgaatgtaacggcggtgagtggttatgttagaagtcgtggtaaattcgcgtggattggggcgttatcgcgaattgaagagacgttggcgggcgaagcggggatttgtatttcgttgtagtcgtaggtattagatatttgtgtttgatgcgacgtttgacgcgttttattaggtttataatcggtgtcgtattcggtaattggtgtataatgtttgatgcgatgtttgacgtattttattaggtttataatgggtatcggatcggtaggtcggataaggcgtttacgtcgtattcggtaagaatagagtattagttaatcgaatttattttgcgtttaaattacgtcgttggtatatttcggcggtagtagcgggattaaggtttttagcgtcgtagttagacgcgatgtgtcgttgtcggttaaatttagatgttttattttacgtttcgga

SEQ ID NO: 37140 - DNA, 670 bp, Artificial Sequence
  chemically treated genomic DNA (Homo sapiens) CpG-island No: 37140
tccgaaacgtaaaataaaacatctaaatttaaccgacaacgacacatcgcgtctaactacgacgctaaaaaccttaatcccgctactaccgccgaaatataccaacgacgtaatttaaacgcaaaataaattcgattaactaatactctattcttaccgaatacgacgtaaacgccttatccgacctaccgatccgatacccattataaacctaataaaatacgtcaaacatcgcatcaaacattatacaccaattaccgaatacgacaccgattataaacctaataaaacgcgtcaaacgtcgcatcaaacacaaatatctaatacctacgactacaacgaaatacaaatccccgcttcgcccgccaacgtctcttcaattcgcgataacgccccaatccacgcgaatttaccacgacttctaacataaccactcaccgccgttacattcgaccccatcgaaccatcgactttaacaaataacgctaactcatccgatataacataacgaataacacgttactacgacgttccccaattttcatataccgcatcaacatcgataaaaatcaccaatccatctacattaatctactcgacgaacaacgcaacgacgaaatctttatccatcactacttcactccctaatccgtcattccgacccacgaac

SEQ ID NO: 37141 - DNA, 1098 bp, Artificial Sequence
  chemically treated genomic DNA (Homo sapiens) CpG-island No: 37141
agtttcggcggcgaaggttagcgtcgacggtagtcggtatttgacggcgtgatcgattcgagtcggtaatcgcgttttttttcggggtcgcgagggcgggcggggggcgggcggtaggcggggggcgtcgcgtttttattttcggtcgcgattgttttttttgcgtcgagtttcgatagagtcgtgcgttttcgagaggttgtttttgtgtgcggggatcgtcgtcggagtgcgcggaaaacgggagttgtatttcggaggcgtagcgacgttggggagttggggtttgggggtggggagggcgggaagcgacggggagacgcggagttttcgggagagaaaggaggcgttttagcgttttgcgagagtttaggagacgagtttcggagcgcgaggcgggcggaggttgtagttcgcggcgcgggcgagaggtgagcgtcgaggcgcggtcgggggtgcgggcgcggttttcgtttcgaggagcgagtgtttattgtttagttcggtgcggggtcggcggagatcgaggttttaatttttcgggggtagcgcggtagagtcgagaaggtgaattttgggaaggtgtattttttaatggaagcgcggagcggttgtagcggagagtgggagtcgggcgaggggaggtaggattcgggaagtgttgggggtgtgtgaaggtgaagcggggtgtcggggcggtcggcgagttgtagcgcggggcggggaaggggagtcgcggttcggcgggtggttcgggttcgtgttagtttcgggggtggggggcgaggggcgtcgagtatcgcgggcggacgggaaggagttgcggcgggcggggcgggcggcgcgttggggtcgagtaggtcgggtcgtggtgggggcggggagtcgggggtcgggtttcggcggcgtcgagtcgggttcgtttttgattgaattttttgggtgcgggcgtgtatgtaggaggcgcgttggggtcggggtcgggggcgggaggcggatcgggaggtttcgggttggttcgttagcgtttttttttttcgttttttttttttcgtttttgaagggataggttttcggggttttaggcgggaagcggga

SEQ ID NO: 37142 - DNA, 1098 bp, Artificial Sequence
  chemically treated genomic DNA (Homo sapiens) CpG-island No: 37142
tcccgcttcccgcctaaaaccccgaaaacctatcccttcaaaaacgaaaaaaaaaaaacgaaaaaaaaaaacgctaacgaaccaacccgaaacctcccgatccgcctcccgcccccgaccccgaccccaacgcgcctcctacatacacgcccgcacccaaaaaattcaatcaaaaacgaacccgactcgacgccgccgaaacccgacccccgactccccgcccccaccacgacccgacctactcgaccccaacgcgccgcccgccccgcccgccgcaactccttcccgtccgcccgcgatactcgacgcccctcgccccccacccccgaaactaacacgaacccgaaccacccgccgaaccgcgactccccttccccgccccgcgctacaactcgccgaccgccccgacaccccgcttcaccttcacacacccccaacacttcccgaatcctacctcccctcgcccgactcccactctccgctacaaccgctccgcgcttccattaaaaaatacaccttcccaaaattcaccttctcgactctaccgcgctacccccgaaaaattaaaacctcgatctccgccgaccccgcaccgaactaaacaataaacactcgctcctcgaaacgaaaaccgcgcccgcacccccgaccgcgcctcgacgctcacctctcgcccgcgccgcgaactacaacctccgcccgcctcgcgctccgaaactcgtctcctaaactctcgcaaaacgctaaaacgcctcctttctctcccgaaaactccgcgtctccccgtcgcttcccgccctccccacccccaaaccccaactccccaacgtcgctacgcctccgaaatacaactcccgttttccgcgcactccgacgacgatccccgcacacaaaaacaacctctcgaaaacgcacgactctatcgaaactcgacgcaaaaaaaacaatcgcgaccgaaaataaaaacgcgacgccccccgcctaccgcccgccccccgcccgccctcgcgaccccgaaaaaaaacgcgattaccgactcgaatcgatcacgccgtcaaataccgactaccgtcgacgctaaccttcgccgccgaaact

SEQ ID NO: 37143 - DNA, 1098 bp, Artificial Sequence
  chemically treated genomic DNA (Homo sapiens) CpG-island No: 37143
tttcgtttttcgtttggggtttcgagggtttgtttttttaggggcggagagaagggggcgagaaaagggggcgttggcgagttaattcggaatttttcggttcgtttttcgttttcggtttcggttttagcgcgttttttgtatatacgttcgtatttagaaagtttagttaggggcgagttcggttcggcgtcgtcggggttcggttttcggtttttcgtttttattacggttcggtttgttcggttttagcgcgtcgttcgtttcgttcgtcgtagttttttttcgttcgttcgcggtgttcggcgtttttcgttttttattttcggggttgatacgggttcgggttattcgtcgggtcgcggtttttttttttcgtttcgcgttgtagttcgtcggtcgtttcgatatttcgttttatttttatatatttttagtatttttcgagttttgttttttttcgttcggtttttatttttcgttgtagtcgtttcgcgtttttattaaagaatgtatttttttaggatttattttttcggttttgtcgcgttgttttcgaggggttagagtttcggttttcgtcgatttcgtatcgggttgggtaatgggtattcgtttttcggggcgggggtcgcgttcgtattttcggtcgcgtttcggcgtttatttttcgttcgcgtcgcgggttgtagttttcgttcgtttcgcgtttcgggattcgttttttgagttttcgtaaggcgttggagcgttttttttttttttcggggatttcgcgttttttcgtcgtttttcgttttttttatttttaagttttaattttttagcgtcgttgcgttttcgggatgtaattttcgtttttcgcgtatttcggcggcggttttcgtatataaaaatagtttttcggaggcgtacggttttgtcggagttcggcgtaggaagggtagtcgcggtcgggggtggggacgcggcgtttttcgtttgtcgttcgtttttcgttcgttttcgcggtttcgggggaaggcgcggttatcggttcgggtcggttacgtcgttaggtgtcggttgtcgtcggcgttgattttcgtcgtcgaagtt

SEQ ID NO: 37144 - DNA, 1098 bp, Artificial Sequence
  chemically treated genomic DNA (Homo sapiens) CpG-island No: 37144
aacttcgacgacgaaaatcaacgccgacgacaaccgacacctaacgacgtaaccgacccgaaccgataaccgcgccttcccccgaaaccgcgaaaacgaacgaaaaacgaacgacaaacgaaaaacgccgcgtccccacccccgaccgcgactacccttcctacgccgaactccgacaaaaccgtacgcctccgaaaaactatttttatatacgaaaaccgccgccgaaatacgcgaaaaacgaaaattacatcccgaaaacgcaacgacgctaaaaaattaaaacttaaaaataaaaaaaacgaaaaacgacgaaaaaacgcgaaatccccgaaaaaaaaaaaaaacgctccaacgccttacgaaaactcaaaaaacgaatcccgaaacgcgaaacgaacgaaaactacaacccgcgacgcgaacgaaaaataaacgccgaaacgcgaccgaaaatacgaacgcgacccccgccccgaaaaacgaatacccattacccaacccgatacgaaatcgacgaaaaccgaaactctaacccctcgaaaacaacgcgacaaaaccgaaaaaataaatcctaaaaaaatacattctttaataaaaacgcgaaacgactacaacgaaaaataaaaaccgaacgaaaaaaaacaaaactcgaaaaatactaaaaatatataaaaataaaacgaaatatcgaaacgaccgacgaactacaacgcgaaacgaaaaaaaaaaaccgcgacccgacgaataacccgaacccgtatcaaccccgaaaataaaaaacgaaaaacgccgaacaccgcgaacgaacgaaaaaaaactacgacgaacgaaacgaacgacgcgctaaaaccgaacaaaccgaaccgtaataaaaacgaaaaaccgaaaaccgaaccccgacgacgccgaaccgaactcgcccctaactaaactttctaaatacgaacgtatatacaaaaaacgcgctaaaaccgaaaccgaaaacgaaaaacgaaccgaaaaattccgaattaactcgccaacgcccccttttctcgcccccttctctccgcccctaaaaaaacaaaccctcgaaaccccaaacgaaaaacgaaa

SEQ ID NO: 37145 - DNA, 960 bp, Artificial Sequence
  chemically treated genomic DNA (Homo sapiens) CpG-island No: 37145
tgtcgtcggtttttatttaggtcgaggtggttcggttttatgtatcgcgacgtaacgcggggaggtagataaggtatagggcggcgtttataatttatgttaattcgttttatgtgttcgtcgaggcggtataaatcgtcgtgacgattagcggtttaatgatcgaagttaggttggtaagagtcgcgagcgatttttgaagttgtttttgatggtcgttatttatttgtttggatagtatggtttgtaacgcgggtatttcgatgtcgtcggaagcgagaagaattataatggggaaggttatttagtttcgcgtcgcgaacgttagtaagacgtagtttagcgcgtcggtcgttatgtcggcgataatggtttgtttttcgtcgaaacgtttggtggcgggattagtgacgaaggtttgagcgagggcgtgtaagatttcgaatatcgtaagcgataggtcgattatcgtcgcgttttagcgaaagcggttttcgtcgaaaatgatttagagcgttgtcggtatttgttttacgagttgtatgataaagaagatagttataagtgcggcgacgatagttatgtttcgcgtttatcggaaggagttgattgggttgaaggtttttaagggtatcggtcgacgtttttttttatgcgatttttgtattaggaagtagtttagtagtaggttgaggtcgttgagtatcgtcgtcgtaaggaatggtgtatgtaaggagatggcgtttaatagtttttcggttacggggtttgttattatatttacgtcgaaataagcgtttatgagttcgaagtggcgagttcgattttttttatcggtgatgtcggcgatataggcgttagtaatcgtatttgtggcgtcggtgatgtcggttacgatgcgttcggcgtagaggattagttatattattgttattataaatatttattaataagaaaata

SEQ ID NO: 37146 - DNA, 960 bp, Artificial Sequence
  chemically treated genomic DNA (Homo sapiens) CpG-island No: 37146
tattttcttattaataaatatttataataacaataatataactaatcctctacgccgaacgcatcgtaaccgacatcaccgacgccacaaatacgattactaacgcctatatcgccgacatcaccgataaaaaaaatcgaactcgccacttcgaactcataaacgcttatttcgacgtaaatataataacaaaccccgtaaccgaaaaactattaaacgccatctccttacatacaccattccttacgacgacgatactcaacgacctcaacctactactaaactacttcctaatacaaaaatcgcataaaaaaaaacgtcgaccgatacccttaaaaaccttcaacccaatcaactccttccgataaacgcgaaacataactatcgtcgccgcacttataactatcttctttatcatacaactcgtaaaacaaataccgacaacgctctaaatcattttcgacgaaaaccgctttcgctaaaacgcgacgataatcgacctatcgcttacgatattcgaaatcttacacgccctcgctcaaaccttcgtcactaatcccgccaccaaacgtttcgacgaaaaacaaaccattatcgccgacataacgaccgacgcgctaaactacgtcttactaacgttcgcgacgcgaaactaaataaccttccccattataattcttctcgcttccgacgacatcgaaatacccgcgttacaaaccatactatccaaacaaataaataacgaccatcaaaaacaacttcaaaaatcgctcgcgactcttaccaacctaacttcgatcattaaaccgctaatcgtcacgacgatttataccgcctcgacgaacacataaaacgaattaacataaattataaacgccgccctataccttatctacctccccgcgttacgtcgcgatacataaaaccgaaccacctcgacctaaataaaaaccgacgaca

SEQ ID NO: 37147 - DNA, 960 bp, Artificial Sequence
  chemically treated genomic DNA (Homo sapiens) CpG-island No: 37147
tatttttttgttaatagatgtttatgataataatgatgtggttgattttttacgtcggacgtatcgtggtcggtattatcggcgttataggtgcggttgttggcgtttatatcgtcgatattatcgatggggaagatcgggttcgttatttcgggtttatgagcgtttgtttcggcgtgggtatggtggtaggtttcgtggtcgggggattgttgggcgttatttttttgtatgtattattttttgcggcggcggtgtttaacggttttaatttattattgggttgttttttaatgtaggagtcgtataagggagagcgtcgatcgatgtttttgagagtttttaatttagttagtttttttcggtgggcgcggggtatgattatcgtcgtcgtatttatgattgttttttttattatgtaattcgtaggataggtgtcggtagcgttttgggttattttcggcgaggatcgttttcgttggagcgcgacgatgatcggtttgtcgtttgcggtattcggaattttgtacgttttcgtttaagttttcgttattggtttcgttattaaacgtttcggcgagaagtaggttattatcgtcggtatggcggtcgacgcgttgggttacgttttgttggcgttcgcgacgcgaggttggatggttttttttattatgatttttttcgttttcggcggtatcgggatgttcgcgttgtaggttatgttgtttaggtaggtagatgacgattattagggatagttttaaggatcgttcgcggtttttattagtttaatttcgattattggatcgttgatcgttacggcgatttatgtcgtttcggcgagtatatggaacgggttggtatggattgtaggcgtcgttttatattttgtttgttttttcgcgttgcgtcgcggtgtatggagtcgggttatttcgatttgaatggaagtcggcggta

SEQ ID NO: 37148 - DNA, 960 bp, Artificial Sequence
  chemically treated genomic DNA (Homo sapiens) CpG-island No: 37148
taccgccgacttccattcaaatcgaaataacccgactccatacaccgcgacgcaacgcgaaaaaacaaacaaaatataaaacgacgcctacaatccataccaacccgttccatatactcgccgaaacgacataaatcgccgtaacgatcaacgatccaataatcgaaattaaactaataaaaaccgcgaacgatccttaaaactatccctaataatcgtcatctacctacctaaacaacataacctacaacgcgaacatcccgataccgccgaaaacgaaaaaaatcataataaaaaaaaccatccaacctcgcgtcgcgaacgccaacaaaacgtaacccaacgcgtcgaccgccataccgacgataataacctacttctcgccgaaacgtttaataacgaaaccaataacgaaaacttaaacgaaaacgtacaaaattccgaataccgcaaacgacaaaccgatcatcgtcgcgctccaacgaaaacgatcctcgccgaaaataacccaaaacgctaccgacacctatcctacgaattacataataaaaaaaacaatcataaatacgacgacgataatcataccccgcgcccaccgaaaaaaactaactaaattaaaaactctcaaaaacatcgatcgacgctctcccttatacgactcctacattaaaaaacaacccaataataaattaaaaccgttaaacaccgccgccgcaaaaaataatacatacaaaaaaataacgcccaacaatcccccgaccacgaaacctaccaccatacccacgccgaaacaaacgctcataaacccgaaataacgaacccgatcttccccatcgataatatcgacgatataaacgccaacaaccgcacctataacgccgataataccgaccacgatacgtccgacgtaaaaaatcaaccacatcattattatcataaacatctattaacaaaaaaata

SEQ ID NO: 37149 - DNA, 641 bp, Artificial Sequence
  chemically treated genomic DNA (Homo sapiens) CpG-island No: 37149
tgcgttcggcgcgcgttcgcggtaggagcggggacggggacggggacggggacggacggggacgcggacgggggaggaggtcgcggtaggggcgggcgcggtatttgcgggtcgatgtcgtttatcgcgtaatatttgatttttttgaatatttttttaggaattttgggcgtttggttcgatatgatcgcggcggttcgggaggtttcgcggcggcgttcggtttcgtttatttttcgttttcggttttcgcggcgttcggcgtttttattcgtttcgttaacggttttgttcgcgtagttcgggttcggttttgcgaatcggggttcgttttttcgtttttcgcgttttcgttcgcgttcgcgtcgagcgttcgaagcgcgggagtcgcgcgcgttttgcgggacgtattatttcgtttcggttatcgagggggagcgtcgaggagtcgttcggtttttagtgacgtttcgcgtttttgtcgttagttacggtttcggggtagttggcgtcggtagttcgttttggtttttgcggtttcgtggtcgtcgttttgtaacgagggggtttcgaggacgaggggaaattagtttttttttcggcggggttggagtgagtcggtttcgggtaggaggggagtt

SEQ ID NO: 37150 - DNA, 641 bp, Artificial Sequence
  chemically treated genomic DNA (Homo sapiens) CpG-island No: 37150
aactcccctcctacccgaaaccgactcactccaaccccgccgaaaaaaaaactaatttcccctcgtcctcgaaaccccctcgttacaaaacgacgaccacgaaaccgcaaaaaccaaaacgaactaccgacgccaactaccccgaaaccgtaactaacgacaaaaacgcgaaacgtcactaaaaaccgaacgactcctcgacgctccccctcgataaccgaaacgaaataatacgtcccgcaaaacgcgcgcgactcccgcgcttcgaacgctcgacgcgaacgcgaacgaaaacgcgaaaaacgaaaaaacgaaccccgattcgcaaaaccgaacccgaactacgcgaacaaaaccgttaacgaaacgaataaaaacgccgaacgccgcgaaaaccgaaaacgaaaaataaacgaaaccgaacgccgccgcgaaacctcccgaaccgccgcgatcatatcgaaccaaacgcccaaaattcctaaaaaaatattcaaaaaaatcaaatattacgcgataaacgacatcgacccgcaaataccgcgcccgcccctaccgcgacctcctcccccgtccgcgtccccgtccgtccccgtccccgtccccgtccccgctcctaccgcgaacgcgcgccgaacgca

SEQ ID NO: 37151 - DNA, 641 bp, Artificial Sequence
  chemically treated genomic DNA (Homo sapiens) CpG-island No: 37151
agttttttttttgttcgggatcggtttattttagtttcgtcgaggggggagttggttttttttcgttttcggggttttttcgttgtagagcggcggttacggaatcgtaagggttagagcgggttgtcggcgttagttatttcggagtcgtggttggcggtagaggcgcggggcgttattggaggtcgggcggtttttcggcgttttttttcggtggtcggggcgggatggtgcgtttcgtagggcgcgcgcggttttcgcgtttcgggcgttcggcgcgggcgcgggcgggggcgcggagggcgggggagcggatttcgattcgtaggatcgggttcgggttgcgcgggtagggtcgttggcggggcgagtgggggcgtcgggcgtcgcgggggtcgggggcggggggtgggcggggtcgggcgtcgtcgcggagtttttcgggtcgtcgcgattatgtcggattaggcgtttaaagtttttgaggagatgtttagggaggttaagtattacgcggtgggcgatatcgattcgtaggtatcgcgttcgtttttgtcgcggttttttttttcgttcgcgttttcgttcgttttcgttttcgttttcgttttcgtttttgtcgcgggcgcgcgtcgggcgta

SEQ ID NO: 37152 - DNA, 641 bp, Artificial Sequence
  chemically treated genomic DNA (Homo sapiens) CpG-island No: 37152
tacgcccgacgcgcgcccgcgacaaaaacgaaaacgaaaacgaaaacgaaaacgaacgaaaacgcgaacgaaaaaaaaaaccgcgacaaaaacgaacgcgatacctacgaatcgatatcgcccaccgcgtaatacttaacctccctaaacatctcctcaaaaactttaaacgcctaatccgacataatcgcgacgacccgaaaaactccgcgacgacgcccgaccccgcccaccccccgcccccgacccccgcgacgcccgacgcccccactcgccccgccaacgaccctacccgcgcaacccgaacccgatcctacgaatcgaaatccgctcccccgccctccgcgcccccgcccgcgcccgcgccgaacgcccgaaacgcgaaaaccgcgcgcgccctacgaaacgcaccatcccgccccgaccaccgaaaaaaaacgccgaaaaaccgcccgacctccaataacgccccgcgcctctaccgccaaccacgactccgaaataactaacgccgacaacccgctctaacccttacgattccgtaaccgccgctctacaacgaaaaaaccccgaaaacgaaaaaaaaccaactcccccctcgacgaaactaaaataaaccgatcccgaacaaaaaaaaaact

SEQ ID NO: 37153 - DNA, 680 bp, Artificial Sequence
  chemically treated genomic DNA (Homo sapiens) CpG-island No: 37153
gcggcgtatgcgcgcggcggaggggggggtggggttttggggtcgcgagtgggagcgggagcggttttgcggttttttcgggttttttggttttgggcggagtgggattgggtgtttcggttgttcgtagtggtcgcgagtgcggtcggatttggagtagtatttgagtcgttttggtcgagtaaggcgcggggtttcggtttatatcgcgttggattcggttatgtcgtgacggaattttcgaggtcgtagcgttacgcgagacgcgtattggtggttttcgcggcgagttttggggttttcgtaaggttttagtgttcgagttggggacgtgttggggggaggttcggtttcgtcgttgttcgaggtttcgttgtttcggtcggatcggtttggtttttggcgttttgtcgggttcgcgttggaggagagttttagatagtagagttcgcggtgtagttttagtttcgggaagtttcgcgtttaataggttaatattatatagcggcgattttaatggttacgtttttatttatagttcgtttttttttcgttaagatttatagaatacggtagagtggtttcgggattatttgtttaagatatttgtacgatcggaagttgggagaagaaattaaggttatgatgatgaacgtagtttttttcgtttatttttaatt

SEQ ID NO: 37154 - DNA, 680 bp, Artificial Sequence
  chemically treated genomic DNA (Homo sapiens) CpG-island No: 37154
aattaaaaataaacgaaaaaaactacgttcatcatcataaccttaatttcttctcccaacttccgatcgtacaaatatcttaaacaaataatcccgaaaccactctaccgtattctataaatcttaacgaaaaaaaaacgaactataaataaaaacgtaaccattaaaatcgccgctatataatattaacctattaaacgcgaaacttcccgaaactaaaactacaccgcgaactctactatctaaaactctcctccaacgcgaacccgacaaaacgccaaaaaccaaaccgatccgaccgaaacaacgaaacctcgaacaacgacgaaaccgaacctccccccaacacgtccccaactcgaacactaaaaccttacgaaaaccccaaaactcgccgcgaaaaccaccaatacgcgtctcgcgtaacgctacgacctcgaaaattccgtcacgacataaccgaatccaacgcgatataaaccgaaaccccgcgccttactcgaccaaaacgactcaaatactactccaaatccgaccgcactcgcgaccactacgaacaaccgaaacacccaatcccactccgcccaaaaccaaaaaacccgaaaaaaccgcaaaaccgctcccgctcccactcgcgaccccaaaaccccacccccccctccgccgcgcgcatacgccgc

SEQ ID NO: 37155 - DNA, 680 bp, Artificial Sequence
  chemically treated genomic DNA (Homo sapiens) CpG-island No: 37155
gattggaaataaacgagaaaggttgcgtttattattatggttttaatttttttttttaattttcggtcgtgtaggtgttttgggtaggtgatttcgaggttattttgtcgtgttttgtgaattttggcggaagggaggcgagttgtaaataaaagcgtgattattagaatcgtcgttgtgtagtattaatttgttgagcgcggggtttttcggggttggagttgtatcgcgggttttgttgtttgggatttttttttagcgcggattcgataggacgttagggattaggtcggttcggtcgggatagcggggtttcgggtagcgacggggtcgggtttttttttagtacgtttttagttcgggtattgaggttttgcggagattttaggattcgtcgcggaggttattagtgcgcgtttcgcgtggcgttacggtttcgggaatttcgttacggtatagtcgggtttagcgcggtgtagatcggggtttcgcgttttgttcggttagagcggtttaagtattattttaggttcggtcgtattcgcggttattgcgaatagtcgggatatttaattttatttcgtttagggttaagaagttcgaggaggtcgtagaatcgttttcgtttttattcgcggttttaaggttttattttttttttcgtcgcgcgtatgcgtcgt

SEQ ID NO: 37156 - DNA, 680 bp, Artificial Sequence
  chemically treated genomic DNA (Homo sapiens) CpG-island No: 37156
acgacgcatacgcgcgacgaaaaaaaaaataaaaccttaaaaccgcgaataaaaacgaaaacgattctacgacctcctcgaacttcttaaccctaaacgaaataaaattaaatatcccgactattcgcaataaccgcgaatacgaccgaacctaaaataatacttaaaccgctctaaccgaacaaaacgcgaaaccccgatctacaccgcgctaaacccgactataccgtaacgaaattcccgaaaccgtaacgccacgcgaaacgcgcactaataacctccgcgacgaatcctaaaatctccgcaaaacctcaatacccgaactaaaaacgtactaaaaaaaaacccgaccccgtcgctacccgaaaccccgctatcccgaccgaaccgacctaatccctaacgtcctatcgaatccgcgctaaaaaaaaatcccaaacaacaaaacccgcgatacaactccaaccccgaaaaaccccgcgctcaacaaattaatactacacaacgacgattctaataatcacgcttttatttacaactcgcctcccttccgccaaaattcacaaaacacgacaaaataacctcgaaatcacctacccaaaacacctacacgaccgaaaattaaaaaaaaaaattaaaaccataataataaacgcaacctttctcgtttatttccaatc

SEQ ID NO: 37157 - DNA, 966 bp, Artificial Sequence
  chemically treated genomic DNA (Homo sapiens) CpG-island No: 37157
tgtcgtcggtttttatttaggtcgaggtggttcggttttatgtatcgcgacgtaacgcggggaggtagataaggtatagggcggcgtttataatttatgttaattcgttttatgtgttcgtcgaggcggtataaatcgtcgtgacgattagcggtttaatgatcgaagttaggttggtaagagtcgcgagcgatttttgaagttgtttttgatggtcgttatttatttgtttggatagtatggtttgtaacgcgggtatttcgatgtcgtcggaagcgagaagaattataatggggaaggttatttagtttcgcgtcgcgaacgttagtaagacgtagtttagcgcgtcggtcgttatgtcggcgataatggtttgtttttcgtcgaaacgtttggtggcgggattagtgacgaaggtttgagcgagggcgtgtaagatttcgaatatcgtaagcgataggtcgattatcgtcgcgttttagcgaaagcggttttcgtcgaaaatgatttagagcgttgtcggtatttgttttacgagttgtatgataaagaagatagttataagtgcggcgacgatagttatgtttcgcgtttatcggaaggagttgattgggttgaaggtttttaagggtatcggtcgacgtttttttttatgcgatttttgtattaggaagtagtttagtagtaggttgaggtcgttgagtatcgtcgtcgtaaggaatggtgtatgtaaggagatggcgtttaatagtttttcggttacggggtttgttattatatttacgtcgaaataagcgtttatgagttcgaagtggcgagttcgattttttttatcggtgatgtcggcgatataggcgttagtaatcgtatttgtggcgtcggtgatgtcggttacgatgcgttcggcgtagaggattttttattttattagtttttttaatagtgtgatgttgataatttttttat

SEQ ID NO: 37158 - DNA, 966 bp, Artificial Sequence
  chemically treated genomic DNA (Homo sapiens) CpG-island No: 37158
ataaaaaaattatcaacatcacactattaaaaaaactaataaaataaaaaatcctctacgccgaacgcatcgtaaccgacatcaccgacgccacaaatacgattactaacgcctatatcgccgacatcaccgataaaaaaaatcgaactcgccacttcgaactcataaacgcttatttcgacgtaaatataataacaaaccccgtaaccgaaaaactattaaacgccatctccttacatacaccattccttacgacgacgatactcaacgacctcaacctactactaaactacttcctaatacaaaaatcgcataaaaaaaaacgtcgaccgatacccttaaaaaccttcaacccaatcaactccttccgataaacgcgaaacataactatcgtcgccgcacttataactatcttctttatcatacaactcgtaaaacaaataccgacaacgctctaaatcattttcgacgaaaaccgctttcgctaaaacgcgacgataatcgacctatcgcttacgatattcgaaatcttacacgccctcgctcaaaccttcgtcactaatcccgccaccaaacgtttcgacgaaaaacaaaccattatcgccgacataacgaccgacgcgctaaactacgtcttactaacgttcgcgacgcgaaactaaataaccttccccattataattcttctcgcttccgacgacatcgaaatacccgcgttacaaaccatactatccaaacaaataaataacgaccatcaaaaacaacttcaaaaatcgctcgcgactcttaccaacctaacttcgatcattaaaccgctaatcgtcacgacgatttataccgcctcgacgaacacataaaacgaattaacataaattataaacgccgccctataccttatctacctccccgcgttacgtcgcgatacataaaaccgaaccacctcgacctaaataaaaaccgacgaca

SEQ ID NO: 37159 - DNA, 966 bp, Artificial Sequence
  chemically treated genomic DNA (Homo sapiens) CpG-island No: 37159
atagggaaattattaatattatattattagaggaattaataagatggaagattttttacgtcggacgtatcgtggtcggtattatcggcgttataggtgcggttgttggcgtttatatcgtcgatattatcgatggggaagatcgggttcgttatttcgggtttatgagcgtttgtttcggcgtgggtatggtggtaggtttcgtggtcgggggattgttgggcgttatttttttgtatgtattattttttgcggcggcggtgtttaacggttttaatttattattgggttgttttttaatgtaggagtcgtataagggagagcgtcgatcgatgtttttgagagtttttaatttagttagtttttttcggtgggcgcggggtatgattatcgtcgtcgtatttatgattgttttttttattatgtaattcgtaggataggtgtcggtagcgttttgggttattttcggcgaggatcgttttcgttggagcgcgacgatgatcggtttgtcgtttgcggtattcggaattttgtacgttttcgtttaagttttcgttattggtttcgttattaaacgtttcggcgagaagtaggttattatcgtcggtatggcggtcgacgcgttgggttacgttttgttggcgttcgcgacgcgaggttggatggttttttttattatgatttttttcgttttcggcggtatcgggatgttcgcgttgtaggttatgttgtttaggtaggtagatgacgattattagggatagttttaaggatcgttcgcggtttttattagtttaatttcgattattggatcgttgatcgttacggcgatttatgtcgtttcggcgagtatatggaacgggttggtatggattgtaggcgtcgttttatattttgtttgttttttcgcgttgcgtcgcggtgtatggagtcgggttatttcgatttgaatggaagtcggcggta

SEQ ID NO: 37160 - DNA, 966 bp, Artificial Sequence
  chemically treated genomic DNA (Homo sapiens) CpG-island No: 37160
taccgccgacttccattcaaatcgaaataacccgactccatacaccgcgacgcaacgcgaaaaaacaaacaaaatataaaacgacgcctacaatccataccaacccgttccatatactcgccgaaacgacataaatcgccgtaacgatcaacgatccaataatcgaaattaaactaataaaaaccgcgaacgatccttaaaactatccctaataatcgtcatctacctacctaaacaacataacctacaacgcgaacatcccgataccgccgaaaacgaaaaaaatcataataaaaaaaaccatccaacctcgcgtcgcgaacgccaacaaaacgtaacccaacgcgtcgaccgccataccgacgataataacctacttctcgccgaaacgtttaataacgaaaccaataacgaaaacttaaacgaaaacgtacaaaattccgaataccgcaaacgacaaaccgatcatcgtcgcgctccaacgaaaacgatcctcgccgaaaataacccaaaacgctaccgacacctatcctacgaattacataataaaaaaaacaatcataaatacgacgacgataatcataccccgcgcccaccgaaaaaaactaactaaattaaaaactctcaaaaacatcgatcgacgctctcccttatacgactcctacattaaaaaacaacccaataataaattaaaaccgttaaacaccgccgccgcaaaaaataatacatacaaaaaaataacgcccaacaatcccccgaccacgaaacctaccaccatacccacgccgaaacaaacgctcataaacccgaaataacgaacccgatcttccccatcgataatatcgacgatataaacgccaacaaccgcacctataacgccgataataccgaccacgatacgtccgacgtaaaaaatcttccatcttattaattcctctaataatataatattaataatttccctat

SEQ ID NO: 37161 - DNA, 1086 bp, Artificial Sequence
  chemically treated genomic DNA (Homo sapiens) CpG-island No: 37161
acggtgtagttttttttttattcgcgttttttttagttttagtcgtgcgtagtcggtttcggttaagtggggttgtcgtcgagtgcgttttttttcgggacgtttattttcgtgtcggggggcggtgttgcggcggcgcggggcgggtcgcgggggcggggacgttgggcgtaggaggcgcggtcgggagcgtcgcgcgtcgggagcggggcggcgggcgtcggggttggtatggcgtggttttgtattagtcgtttgtgttgtttggcgcggcgttggaattagttggatcgtttcgacgtggcggtgtcgtttattttgtacggttattcggatttcgatagcgaggagtcgggtacgggcggcgtcgtttcgcgtaggggttagtttttcgcgggcgttcgggatttcggtcgggacgtgtcgtttatttagtattagcgggatttcggtttgtggattacgttcgtcgggtttaaggattcgtcgtcggggcgcggatcgggggcgggcggtcgtaggggtaaatttttcgcgtagtttttcgcgttatttgcgttcggcgttcgcggggtttacgtgttgtttatcggcgacgcggacgcggttgtagtagtgattacgtcgtataggtatgggttgggtagggatcgtaacgagtttttattttgtggtgggaggacgcggaggttcggagttagagggatggggtgggcggtagagcggaggcgtttggagttcggattttacgcgatttcggagttgtcggcggttttagaggttattttcgtttggttcgtgggtattgtaggcggcgttttcgttgttttatgttcggatttagtgttcgagtattttcgtgtcgggagcgtatcgttgttttcgtagtcgtttttttgggggtagtcgttagaatggtttgtttttagtcgagttggaatcggtttttttttaatttttatcgtcgggtttagtcgtgcgaggggtgcgcgtaggttatgttttttagtttttttcggttattgtttagtgtgcgggcgttggtggtgaggatcgagcgtagggtttcgtgtgggtgagtttttt

SEQ ID NO: 37162 - DNA, 1086 bp, Artificial Sequence
  chemically treated genomic DNA (Homo sapiens) CpG-island No: 37162
aaaaaactcacccacacgaaaccctacgctcgatcctcaccaccaacgcccgcacactaaacaataaccgaaaaaaactaaaaaacataacctacgcgcacccctcgcacgactaaacccgacgataaaaattaaaaaaaaaccgattccaactcgactaaaaacaaaccattctaacgactacccccaaaaaaacgactacgaaaacaacgatacgctcccgacacgaaaatactcgaacactaaatccgaacataaaacaacgaaaacgccgcctacaatacccacgaaccaaacgaaaataacctctaaaaccgccgacaactccgaaatcgcgtaaaatccgaactccaaacgcctccgctctaccgcccaccccatccctctaactccgaacctccgcgtcctcccaccacaaaataaaaactcgttacgatccctacccaacccatacctatacgacgtaatcactactacaaccgcgtccgcgtcgccgataaacaacacgtaaaccccgcgaacgccgaacgcaaataacgcgaaaaactacgcgaaaaatttacccctacgaccgcccgcccccgatccgcgccccgacgacgaatccttaaacccgacgaacgtaatccacaaaccgaaatcccgctaatactaaataaacgacacgtcccgaccgaaatcccgaacgcccgcgaaaaactaacccctacgcgaaacgacgccgcccgtacccgactcctcgctatcgaaatccgaataaccgtacaaaataaacgacaccgccacgtcgaaacgatccaactaattccaacgccgcgccaaacaacacaaacgactaatacaaaaccacgccataccaaccccgacgcccgccgccccgctcccgacgcgcgacgctcccgaccgcgcctcctacgcccaacgtccccgcccccgcgacccgccccgcgccgccgcaacaccgccccccgacacgaaaataaacgtcccgaaaaaaaacgcactcgacgacaaccccacttaaccgaaaccgactacgcacgactaaaactaaaaaaaacgcgaataaaaaaaaaactacaccgt

SEQ ID NO: 37163 - DNA, 1086 bp, Artificial Sequence
  chemically treated genomic DNA (Homo sapiens) CpG-island No: 37163
gaagggtttatttatacgggattttgcgttcggtttttattattaacgttcgtatattaggtagtgatcggagagagttgggggatatggtttgcgcgtatttttcgtacggttaggttcggcggtgggagttaaagggaggtcggttttaattcggttgaaggtaggttattttgacggttgtttttaggagggcggttgcgagggtagcggtgcgttttcggtacgggggtgttcgagtattgagttcgggtatggagtagcgaaggcgtcgtttgtagtgtttacggattaaacgggggtgatttttgaggtcgtcggtagtttcgaggtcgcgtgggattcgggttttaggcgttttcgttttgtcgtttattttatttttttggtttcgggttttcgcgtttttttattatagggtggggattcgttgcggtttttatttagtttatatttgtacgacgtggttattgttgtagtcgcgttcgcgtcgtcgatgggtagtacgtagatttcgcgggcgtcgggcgtaggtggcgcggaggattgcgcggaggatttgtttttgcggtcgttcgttttcggttcgcgtttcggcggcggatttttgggttcggcgggcgtggtttataagtcgaagtttcgttggtattgagtgagcggtacgtttcggtcggaatttcgggcgttcgcgggaggttggtttttgcgcgaggcggcgtcgttcgtgttcggtttttcgttgtcgaggttcgagtagtcgtgtagagtgagcggtatcgttacgtcggagcggtttagttggttttagcgtcgcgttaggtagtataggcggttgatatagggttacgttatgttagtttcggcgttcgtcgtttcgttttcggcgcgcggcgttttcggtcgcgttttttgcgtttagcgttttcgttttcgcggttcgtttcgcgtcgtcgtagtatcgtttttcggtacgagggtgggcgtttcgggagggggcgtattcggcggtagttttatttggtcggggtcggttgcgtacggttggagttggagggagcgcggatgggggaaaggttgtatcgt
